United States Patent Application Publication US 2023/0087228 A1 - sequence listing, part 10

SEQ ID NO: 994 - DNA, 103763 bp, Artificial Sequence
  Synthetic Oligonucleotide
  misc_feature (1)..(86682): n is a, c, g, or t
nnnnnnnnnnnnnnnnnnnnnnnnnnnnnnnnnnnnnnnnnnnnnnnnnnnnnnnnnnnnnnnnnnnnnnnnnnnnnnnnnnnnnnnnnnnnnnnnnnnnnnnnnnnnnnnnnnnnnnnnnnnnnnnnnnnnnnnnnnnnnnnnnnnnnnnnnnnnnnnnnnnnnnnnnnnnnnnnnnnnnnnnnnnnnnnnnnnnnnnnnnnnnnnnnnnnnnnnnnnnnnnnnnnnnnnnnnnnnnnnnnnnnnnnnnnnnnnnnnnnnnnnnnnnnnnnnnnnnnnnnnnnnnnnnnnnnnnnnnnnnnnnnnnnnnnnnnnnnnnnnnnnnnnnnnnnnnnnnnnnnnnnnnnnnnnnnnnnnnnnnnnnnnnnnnnnnnnnnnnnnnnnnnnnnnnnnnnnnnnnnnnnnnnnnnnnnnnnnnnnnnnnnnnnnnnnnnnnnnnnnnnnnnnnnnnnnnnnnnnnnnnnnnnnnnnnnnnnnnnnnnnnnnnnnnnnnnnnnnnnnnnnnnnnnnnnnnnnnnnnnnnnnnnnnnnnnnnnnnnnnnnnnnnnnnnnnnnnnnnnnnnnnnnnnnnnnnnnnnnnnnnnnnnnnnnnnnnnnnnnnnnnnnnnnnnnnnnnnnnnnnnnnnnnnnnnnnnnnnnnnnnnnnnnnnnnnnnnnnnnnnnnnnnnnnnnnnnnnnnnnnnnnnnnnnnnnnnnnnnnnnnnnnnnnnnnnnnnnnnnnnnnnnnnnnnnnnnnnnnnnnnnnnnnnnnnnnnnnnnnnnnnnnnnnnnnnnnnnnnnnnnnnnnnnnnnnnnnnnnnnnnnnnnnnnnnnnnnnnnnnnnnnnnnnnnnnnnnnnnnnnnnnnnnnnnnnnnnnnnnnnnnnnnnnnnnnnnnnnnnnnnnnnnnnnnnnnnnnnnnnnnnnnnnnnnnnnnnnnnnnnnnnnnnnnnnnnnnnnnnnnnnnnnnnnnnnnnnnnnnnnnnnnnnnnnnnnnnnnnnnnnnnnnnnnnnnnnnnnnnnnnnnnnnnnnnnnnnnnnnnnnnnnnnnnnnnnnnnnnnnnnnnnnnnnnnnnnnnnnnnnnnnnnnnnnnnnnnnnnnnnnnnnnnnnnnnnnnnnnnnnnnnnnnnnnnnnnnnnnnnnnnnnnnnnnnnnnnnnnnnnnnnnnnnnnnnnnnnnnnnnnnnnnnnnnnnnnnnnnnnnnnnnnnnnnnnnnnnnnnnnnnnnnnnnnnnnnnnnnnnnnnnnnnnnnnnnnnnnnnnnnnnnnnnnnnnnnnnnnnnnnnnnnnnnnnnnnnnnnnnnnnnnnnnnnnnnnnnnnnnnnnnnnnnnnnnnnnnnnnnnnnnnnnnnnnnnnnnnnnnnnnnnnnnnnnnnnnnnnnnnnnnnnnnnnnnnnnnnnnnnnnnnnnnnnnnnnnnnnnnnnnnnnnnnnnnnnnnnnnnnnnnnnnnnnnnnnnnnnnnnnnnnnnnnnnnnnnnnnnnnnnnnnnnnnnnnnnnnnnnnnnnnnnnnnnnnnnnnnnnnnnnnnnnnnnnnnnnnnnnnnnnnnnnnnnnnnnnnnnnnnnnnnnnnnnnnnnnnnnnnnnnnnnnnnnnnnnnnnnnnnnnnnnnnnnnnnnnnnnnnnnnnnnnnnnnnnnnnnnnnnnnnnnnnnnnnnnnnnnnnnnnnnnnnnnnnnnnnnnnnnnnnnnnnnnnnnnnnnnnnnnnnnnnnnnnnnnnnnnnnnnnnnnnnnnnnnnnnnnnnnnnnnnnnnnnnnnnnnnnnnnnnnnnnnnnnnnnnnnnnnnnnnnnnnnnnnnnnnnnnnnnnnnnnnnnnnnnnnnnnnnnnnnnnnnnnnnnnnnnnnnnnnnnnnnnnnnnnnnnnnnnnnnnnnnnnnnnnnnnnnnnnnnnnnnnnnnnnnnnnnnnnnnnnnnnnnnnnnnnnnnnnnnnnnnnnnnnnnnnnnnnnnnnnnnnnnnnnnnnnnnnnnnnnnnnnnnnnnnnnnnnnnnnnnnnnnnnnnnnnnnnnnnnnnnnnnnnnnnnnnnnnnnnnnnnnnnnnnnnnnnnnnnnnnnnnnnnnnnnnnnnnnnnnnnnnnnnnnnnnnnnnnnnnnnnnnnnnnnnnnnnnnnnnnnnnnnnnnnnnnnnnnnnnnnnnnnnnnnnnnnnnnnnnnnnnnnnnnnnnnnnnnnnnnnnnnnnnnnnnnnnnnnnnnnnnnnnnnnnnnnnnnnnnnnnnnnnnnnnnnnnnnnnnnnnnnnnnnnnnnnnnnnnnnnnnnnnnnnnnnnnnnnnnnnnnnnnnnnnnnnnnnnnnnnnnnnnnnnnnnnnnnnnnnnnnnnnnnnnnnnnnnnnnnnnnnnnnnnnnnnnnnnnnnnnnnnnnnnnnnnnnnnnnnnnnnnnnnnnnnnnnnnnnnnnnnnnnnnnnnnnnnnnnnnnnnnnnnnnnnnnnnnnnnnnnnnnnnnnnnnnnnnnnnnnnnnnnnnnnnnnnnnnnnnnnnnnnnnnnnnnnnnnnnnnnnnnnnnnnnnnnnnnnnnnnnnnnnnnnnnnnnnnnnnnnnnnnnnnnnnnnnnnnnnnnnnnnnnnnnnnnnnnnnnnnnnnnnnnnnnnnnnnnnnnnnnnnnnnnnnnnnnnnnnnnnnnnnnnnnnnnnnnnnnnnnnnnnnnnnnnnnnnnnnnnnnnnnnnnnnnnnnnnnnnnnnnnnnnnnnnnnnnnnnnnnnnnnnnnnnnnnnnnnnnnnnnnnnnnnnnnnnnnnnnnnnnnnnnnnnnnnnnnnnnnnnnnnnnnnnnnnnnnnnnnnnnnnnnnnnnnnnnnnnnnnnnnnnnnnnnnnnnnnnnnnnnnnnnnnnnnnnnnnnnnnnnnnnnnnnnnnnnnnnnnnnnnnnnnnnnnnnnnnnnnnnnnnnnnnnnnnnnnnnnnnnnnnnnnnnnnnnnnnnnnnnnnnnnnnnnnnnnnnnnnnnnnnnnnnnnnnnnnnnnnnnnnnnnnnnnnnnnnnnnnnnnnnnnnnnnnnnnnnnnnnnnnnnnnnnnnnnnnnnnnnnnnnnnnnnnnnnnnnnnnnnnnnnnnnnnnnnnnnnnnnnnnnnnnnnnnnnnnnnnnnnnnnnnnnnnnnnnnnnnnnnnnnnnnnnnnnnnnnnnnnnnnnnnnnnnnnnnnnnnnnnnnnnnnnnnnnnnnnnnnnnnnnnnnnnnnnnnnnnnnnnnnnnnnnnnnnnnnnnnnnnnnnnnnnnnnnnnnnnnnnnnnnnnnnnnnnnnnnnnnnnnnnnnnnnnnnnnnnnnnnnnnnnnnnnnnnnnnnnnnnnnnnnnnnnnnnnnnnnnnnnnnnnnnnnnnnnnnnnnnnnnnnnnnnnnnnnnnnnnnnnnnnnnnnnnnnnnnnnnnnnnnnnnnnnnnnnnnnnnnnnnnnnnnnnnnnnnnnnnnnnnnnnnnnnnnnnnnnnnnnnnnnnnnnnnnnnnnnnnnnnnnnnnnnnnnnnnnnnnnnnnnnnnnnnnnnnnnnnnnnnnnnnnnnnnnnnnnnnnnnnnnnnnnnnnnnnnnnnnnnnnnnnnnnnnnnnnnnnnnnnnnnnnnnnnnnnnnnnnnnnnnnnnnnnnnnnnnnnnnnnnnnnnnnnnnnnnnnnnnnnnnnnnnnnnnnnnnnnnnnnnnnnnnnnnnnnnnnnnnnnnnnnnnnnnnnnnnnnnnnnnnnnnnnnnnnnnnnnnnnnnnnnnnnnnnnnnnnnnnnnnnnnnnnnnnnnnnnnnnnnnnnnnnnnnnnnnnnnnnnnnnnnnnnnnnnnnnnnnnnnnnnnnnnnnnnnnnnnnnnnnnnnnnnnnnnnnnnnnnnnnnnnnnnnnnnnnnnnnnnnnnnnnnnnnnnnnnnnnnnnnnnnnnnnnnnnnnnnnnnnnnnnnnnnnnnnnnnnnnnnnnnnnnnnnnnnnnnnnnnnnnnnnnnnnnnnnnnnnnnnnnnnnnnnnnnnnnnnnnnnnnnnnnnnnnnnnnnnnnnnnnnnnnnnnnnnnnnnnnnnnnnnnnnnnnnnnnnnnnnnnnnnnnnnnnnnnnnnnnnnnnnnnnnnnnnnnnnnnnnnnnnnnnnnnnnnnnnnnnnnnnnnnnnnnnnnnnnnnnnnnnnnnnnnnnnnnnnnnnnnnnnnnnnnnnnnnnnnnnnnnnnnnnnnnnnnnnnnnnnnnnnnnnnnnnnnnnnnnnnnnnnnnnnnnnnnnnnnnnnnnnnnnnnnnnnnnnnnnnnnnnnnnnnnnnnnnnnnnnnnnnnnnnnnnnnnnnnnnnnnnnnnnnnnnnnnnnnnnnnnnnnnnnnnnnnnnnnnnnnnnnnnnnnnnnnnnnnnnnnnnnnnnnnnnnnnnnnnnnnnnnnnnnnnnnnnnnnnnnnnnnnnnnnnnnnnnnnnnnnnnnnnnnnnnnnnnnnnnnnnnnnnnnnnnnnnnnnnnnnnnnnnnnnnnnnnnnnnnnnnnnnnnnnnnnnnnnnnnnnnnnnnnnnnnnnnnnnnnnnnnnnnnnnnnnnnnnnnnnnnnnnnnnnnnnnnnnnnnnnnnnnnnnnnnnnnnnnnnnnnnnnnnnnnnnnnnnnnnnnnnnnnnnnnnnnnnnnnnnnnnnnnnnnnnnnnnnnnnnnnnnnnnnnnnnnnnnnnnnnnnnnnnnnnnnnnnnnnnnnnnnnnnnnnnnnnnnnnnnnnnnnnnnnnnnnnnnnnnnnnnnnnnnnnnnnnnnnnnnnnnnnnnnnnnnnnnnnnnnnnnnnnnnnnnnnnnnnnnnnnnnnnnnnnnnnnnnnnnnnnnnnnnnnnnnnnnnnnnnnnnnnnnnnnnnnnnnnnnnnnnnnnnnnnnnnnnnnnnnnnnnnnnnnnnnnnnnnnnnnnnnnnnnnnnnnnnnnnnnnnnnnnnnnnnnnnnnnnnnnnnnnnnnnnnnnnnnnnnnnnnnnnnnnnnnnnnnnnnnnnnnnnnnnnnnnnnnnnnnnnnnnnnnnnnnnnnnnnnnnnnnnnnnnnnnnnnnnnnnnnnnnnnnnnnnnnnnnnnnnnnnnnnnnnnnnnnnnnnnnnnnnnnnnnnnnnnnnnnnnnnnnnnnnnnnnnnnnnnnnnnnnnnnnnnnnnnnnnnnnnnnnnnnnnnnnnnnnnnnnnnnnnnnnnnnnnnnnnnnnnnnnnnnnnnnnnnnnnnnnnnnnnnnnnnnnnnnnnnnnnnnnnnnnnnnnnnnnnnnnnnnnnnnnnnnnnnnnnnnnnnnnnnnnnnnnnnnnnnnnnnnnnnnnnnnnnnnnnnnnnnnnnnnnnnnnnnnnnnnnnnnnnnnnnnnnnnnnnnnnnnnnnnnnnnnnnnnnnnnnnnnnnnnnnnnnnnnnnnnnnnnnnnnnnnnnnnnnnnnnnnnnnnnnnnnnnnnnnnnnnnnnnnnnnnnnnnnnnnnnnnnnnnnnnnnnnnnnnnnnnnnnnnnnnnnnnnnnnnnnnnnnnnnnnnnnnnnnnnnnnnnnnnnnnnnnnnnnnnnnnnnnnnnnnnnnnnnnnnnnnnnnnnnnnnnnnnnnnnnnnnnnnnnnnnnnnnnnnnnnnnnnnnnnnnnnnnnnnnnnnnnnnnnnnnnnnnnnnnnnnnnnnnnnnnnnnnnnnnnnnnnnnnnnnnnnnnnnnnnnnnnnnnnnnnnnnnnnnnnnnnnnnnnnnnnnnnnnnnnnnnnnnnnnnnnnnnnnnnnnnnnnnnnnnnnnnnnnnnnnnnnnnnnnnnnnnnnnnnnnnnnnnnnnnnnnnnnnnnnnnnnnnnnnnnnnnnnnnnnnnnnnnnnnnnnnnnnnnnnnnnnnnnnnnnnnnnnnnnnnnnnnnnnnnnnnnnnnnnnnnnnnnnnnnnnnnnnnnnnnnnnnnnnnnnnnnnnnnnnnnnnnnnnnnnnnnnnnnnnnnnnnnnnnnnnnnnnnnnnnnnnnnnnnnnnnnnnnnnnnnnnnnnnnnnnnnnnnnnnnnnnnnnnnnnnnnnnnnnnnnnnnnnnnnnnnnnnnnnnnnnnnnnnnnnnnnnnnnnnnnnnnnnnnnnnnnnnnnnnnnnnnnnnnnnnnnnnnnnnnnnnnnnnnnnnnnnnnnnnnnnnnnnnnnnnnnnnnnnnnnnnnnnnnnnnnnnnnnnnnnnnnnnnnnnnnnnnnnnnnnnnnnnnnnnnnnnnnnnnnnnnnnnnnnnnnnnnnnnnnnnnnnnnnnnnnnnnnnnnnnnnnnnnnnnnnnnnnnnnnnnnnnnnnnnnnnnnnnnnnnnnnnnnnnnnnnnnnnnnnnnnnnnnnnnnnnnnnnnnnnnnnnnnnnnnnnnnnnnnnnnnnnnnnnnnnnnnnnnnnnnnnnnnnnnnnnnnnnnnnnnnnnnnnnnnnnnnnnnnnnnnnnnnnnnnnnnnnnnnnnnnnnnnnnnnnnnnnnnnnnnnnnnnnnnnnnnnnnnnnnnnnnnnnnnnnnnnnnnnnnnnnnnnnnnnnnnnnnnnnnnnnnnnnnnnnnnnnnnnnnnnnnnnnnnnnnnnnnnnnnnnnnnnnnnnnnnnnnnnnnnnnnnnnnnnnnnnnnnnnnnnnnnnnnnnnnnnnnnnnnnnnnnnnnnnnnnnnnnnnnnnnnnnnnnnnnnnnnnnnnnnnnnnnnnnnnnnnnnnnnnnnnnnnnnnnnnnnnnnnnnnnnnnnnnnnnnnnnnnnnnnnnnnnnnnnnnnnnnnnnnnnnnnnnnnnnnnnnnnnnnnnnnnnnnnnnnnnnnnnnnnnnnnnnnnnnnnnnnnnnnnnnnnnnnnnnnnnnnnnnnnnnnnnnnnnnnnnnnnnnnnnnnnnnnnnnnnnnnnnnnnnnnnnnnnnnnnnnnnnnnnnnnnnnnnnnnnnnnnnnnnnnnnnnnnnnnnnnnnnnnnnnnnnnnnnnnnnnnnnnnnnnnnnnnnnnnnnnnnnnnnnnnnnnnnnnnnnnnnnnnnnnnnnnnnnnnnnnnnnnnnnnnnnnnnnnnnnnnnnnnnnnnnnnnnnnnnnnnnnnnnnnnnnnnnnnnnnnnnnnnnnnnnnnnnnnnnnnnnnnnnnnnnnnnnnnnnnnnnnnnnnnnnnnnnnnnnnnnnnnnnnnnnnnnnnnnnnnnnnnnnnnnnnnnnnnnnnnnnnnnnnnnnnnnnnnnnnnnnnnnnnnnnnnnnnnnnnnnnnnnnnnnnnnnnnnnnnnnnnnnnnnnnnnnnnnnnnnnnnnnnnnnnnnnnnnnnnnnnnnnnnnnnnnnnnnnnnnnnnnnnnnnnnnnnnnnnnnnnnnnnnnnnnnnnnnnnnnnnnnnnnnnnnnnnnnnnnnnnnnnnnnnnnnnnnnnnnnnnnnnnnnnnnnnnnnnnnnnnnnnnnnnnnnnnnnnnnnnnnnnnnnnnnnnnnnnnnnnnnnnnnnnnnnnnnnnnnnnnnnnnnnnnnnnnnnnnnnnnnnnnnnnnnnnnnnnnnnnnnnnnnnnnnnnnnnnnnnnnnnnnnnnnnnnnnnnnnnnnnnnnnnnnnnnnnnnnnnnnnnnnnnnnnnnnnnnnnnnnnnnnnnnnnnnnnnnnnnnnnnnnnnnnnnnnnnnnnnnnnnnnnnnnnnnnnnnnnnnnnnnnnnnnnnnnnnnnnnnnnnnnnnnnnnnnnnnnnnnnnnnnnnnnnnnnnnnnnnnnnnnnnnnnnnnnnnnnnnnnnnnnnnnnnnnnnnnnnnnnnnnnnnnnnnnnnnnnnnnnnnnnnnnnnnnnnnnnnnnnnnnnnnnnnnnnnnnnnnnnnnnnnnnnnnnnnnnnnnnnnnnnnnnnnnnnnnnnnnnnnnnnnnnnnnnnnnnnnnnnnnnnnnnnnnnnnnnnnnnnnnnnnnnnnnnnnnnnnnnnnnnnnnnnnnnnnnnnnnnnnnnnnnnnnnnnnnnnnnnnnnnnnnnnnnnnnnnnnnnnnnnnnnnnnnnnnnnnnnnnnnnnnnnnnnnnnnnnnnnnnnnnnnnnnnnnnnnnnnnnnnnnnnnnnnnnnnnnnnnnnnnnnnnnnnnnnnnnnnnnnnnnnnnnnnnnnnnnnnnnnnnnnnnnnnnnnnnnnnnnnnnnnnnnnnnnnnnnnnnnnnnnnnnnnnnnnnnnnnnnnnnnnnnnnnnnnnnnnnnnnnnnnnnnnnnnnnnnnnnnnnnnnnnnnnnnnnnnnnnnnnnnnnnnnnnnnnnnnnnnnnnnnnnnnnnnnnnnnnnnnnnnnnnnnnnnnnnnnnnnnnnnnnnnnnnnnnnnnnnnnnnnnnnnnnnnnnnnnnnnnnnnnnnnnnnnnnnnnnnnnnnnnnnnnnnnnnnnnnnnnnnnnnnnnnnnnnnnnnnnnnnnnnnnnnnnnnnnnnnnnnnnnnnnnnnnnnnnnnnnnnnnnnnnnnnnnnnnnnnnnnnnnnnnnnnnnnnnnnnnnnnnnnnnnnnnnnnnnnnnnnnnnnnnnnnnnnnnnnnnnnnnnnnnnnnnnnnnnnnnnnnnnnnnnnnnnnnnnnnnnnnnnnnnnnnnnnnnnnnnnnnnnnnnnnnnnnnnnnnnnnnnnnnnnnnnnnnnnnnnnnnnnnnnnnnnnnnnnnnnnnnnnnnnnnnnnnnnnnnnnnnnnnnnnnnnnnnnnnnnnnnnnnnnnnnnnnnnnnnnnnnnnnnnnnnnnnnnnnnnnnnnnnnnnnnnnnnnnnnnnnnnnnnnnnnnnnnnnnnnnnnnnnnnnnnnnnnnnnnnnnnnnnnnnnnnnnnnnnnnnnnnnnnnnnnnnnnnnnnnnnnnnnnnnnnnnnnnnnnnnnnnnnnnnnnnnnnnnnnnnnnnnnnnnnnnnnnnnnnnnnnnnnnnnnnnnnnnnnnnnnnnnnnnnnnnnnnnnnnnnnnnnnnnnnnnnnnnnnnnnnnnnnnnnnnnnnnnnnnnnnnnnnnnnnnnnnnnnnnnnnnnnnnnnnnnnnnnnnnnnnnnnnnnnnnnnnnnnnnnnnnnnnnnnnnnnnnnnnnnnnnnnnnnnnnnnnnnnnnnnnnnnnnnnnnnnnnnnnnnnnnnnnnnnnnnnnnnnnnnnnnnnnnnnnnnnnnnnnnnnnnnnnnnnnnnnnnnnnnnnnnnnnnnnnnnnnnnnnnnnnnnnnnnnnnnnnnnnnnnnnnnnnnnnnnnnnnnnnnnnnnnnnnnnnnnnnnnnnnnnnnnnnnnnnnnnnnnnnnnnnnnnnnnnnnnnnnnnnnnnnnnnnnnnnnnnnnnnnnnnnnnnnnnnnnnnnnnnnnnnnnnnnnnnnnnnnnnnnnnnnnnnnnnnnnnnnnnnnnnnnnnnnnnnnnnnnnnnnnnnnnnnnnnnnnnnnnnnnnnnnnnnnnnnnnnnnnnnnnnnnnnnnnnnnnnnnnnnnnnnnnnnnnnnnnnnnnnnnnnnnnnnnnnnnnnnnnnnnnnnnnnnnnnnnnnnnnnnnnnnnnnnnnnnnnnnnnnnnnnnnnnnnnnnnnnnnnnnnnnnnnnnnnnnnnnnnnnnnnnnnnnnnnnnnnnnnnnnnnnnnnnnnnnnnnnnnnnnnnnnnnnnnnnnnnnnnnnnnnnnnnnnnnnnnnnnnnnnnnnnnnnnnnnnnnnnnnnnnnnnnnnnnnnnnnnnnnnnnnnnnnnnnnnnnnnnnnnnnnnnnnnnnnnnnnnnnnnnnnnnnnnnnnnnnnnnnnnnnnnnnnnnnnnnnnnnnnnnnnnnnnnnnnnnnnnnnnnnnnnnnnnnnnnnnnnnnnnnnnnnnnnnnnnnnnnnnnnnnnnnnnnnnnnnnnnnnnnnnnnnnnnnnnnnnnnnnnnnnnnnnnnnnnnnnnnnnnnnnnnnnnnnnnnnnnnnnnnnnnnnnnnnnnnnnnnnnnnnnnnnnnnnnnnnnnnnnnnnnnnnnnnnnnnnnnnnnnnnnnnnnnnnnnnnnnnnnnnnnnnnnnnnnnnnnnnnnnnnnnnnnnnnnnnnnnnnnnnnnnnnnnnnnnnnnnnnnnnnnnnnnnnnnnnnnnnnnnnnnnnnnnnnnnnnnnnnnnnnnnnnnnnnnnnnnnnnnnnnnnnnnnnnnnnnnnnnnnnnnnnnnnnnnnnnnnnnnnnnnnnnnnnnnnnnnnnnnnnnnnnnnnnnnnnnnnnnnnnnnnnnnnnnnnnnnnnnnnnnnnnnnnnnnnnnnnnnnnnnnnnnnnnnnnnnnnnnnnnnnnnnnnnnnnnnnnnnnnnnnnnnnnnnnnnnnnnnnnnnnnnnnnnnnnnnnnnnnnnnnnnnnnnnnnnnnnnnnnnnnnnnnnnnnnnnnnnnnnnnnnnnnnnnnnnnnnnnnnnnnnnnnnnnnnnnnnnnnnnnnnnnnnnnnnnnnnnnnnnnnnnnnnnnnnnnnnnnnnnnnnnnnnnnnnnnnnnnnnnnnnnnnnnnnnnnnnnnnnnnnnnnnnnnnnnnnnnnnnnnnnnnnnnnnnnnnnnnnnnnnnnnnnnnnnnnnnnnnnnnnnnnnnnnnnnnnnnnnnnnnnnnnnnnnnnnnnnnnnnnnnnnnnnnnnnnnnnnnnnnnnnnnnnnnnnnnnnnnnnnnnnnnnnnnnnnnnnnnnnnnnnnnnnnnnnnnnnnnnnnnnnnnnnnnnnnnnnnnnnnnnnnnnnnnnnnnnnnnnnnnnnnnnnnnnnnnnnnnnnnnnnnnnnnnnnnnnnnnnnnnnnnnnnnnnnnnnnnnnnnnnnnnnnnnnnnnnnnnnnnnnnnnnnnnnnnnnnnnnnnnnnnnnnnnnnnnnnnnnnnnnnnnnnnnnnnnnnnnnnnnnnnnnnnnnnnnnnnnnnnnnnnnnnnnnnnnnnnnnnnnnnnnnnnnnnnnnnnnnnnnnnnnnnnnnnnnnnnnnnnnnnnnnnnnnnnnnnnnnnnnnnnnnnnnnnnnnnnnnnnnnnnnnnnnnnnnnnnnnnnnnnnnnnnnnnnnnnnnnnnnnnnnnnnnnnnnnnnnnnnnnnnnnnnnnnnnnnnnnnnnnnnnnnnnnnnnnnnnnnnnnnnnnnnnnnnnnnnnnnnnnnnnnnnnnnnnnnnnnnnnnnnnnnnnnnnnnnnnnnnnnnnnnnnnnnnnnnnnnnnnnnnnnnnnnnnnnnnnnnnnnnnnnnnnnnnnnnnnnnnnnnnnnnnnnnnnnnnnnnnnnnnnnnnnnnnnnnnnnnnnnnnnnnnnnnnnnnnnnnnnnnnnnnnnnnnnnnnnnnnnnnnnnnnnnnnnnnnnnnnnnnnnnnnnnnnnnnnnnnnnnnnnnnnnnnnnnnnnnnnnnnnnnnnnnnnnnnnnnnnnnnnnnnnnnnnnnnnnnnnnnnnnnnnnnnnnnnnnnnnnnnnnnnnnnnnnnnnnnnnnnnnnnnnnnnnnnnnnnnnnnnnnnnnnnnnnnnnnnnnnnnnnnnnnnnnnnnnnnnnnnnnnnnnnnnnnnnnnnnnnnnnnnnnnnnnnnnnnnnnnnnnnnnnnnnnnnnnnnnnnnnnnnnnnnnnnnnnnnnnnnnnnnnnnnnnnnnnnnnnnnnnnnnnnnnnnnnnnnnnnnnnnnnnnnnnnnnnnnnnnnnnnnnnnnnnnnnnnnnnnnnnnnnnnnnnnnnnnnnnnnnnnnnnnnnnnnnnnnnnnnnnnnnnnnnnnnnnnnnnnnnnnnnnnnnnnnnnnnnnnnnnnnnnnnnnnnnnnnnnnnnnnnnnnnnnnnnnnnnnnnnnnnnnnnnnnnnnnnnnnnnnnnnnnnnnnnnnnnnnnnnnnnnnnnnnnnnnnnnnnnnnnnnnnnnnnnnnnnnnnnnnnnnnnnnnnnnnnnnnnnnnnnnnnnnnnnnnnnnnnnnnnnnnnnnnnnnnnnnnnnnnnnnnnnnnnnnnnnnnnnnnnnnnnnnnnnnnnnnnnnnnnnnnnnnnnnnnnnnnnnnnnnnnnnnnnnnnnnnnnnnnnnnnnnnnnnnnnnnnnnnnnnnnnnnnnnnnnnnnnnnnnnnnnnnnnnnnnnnnnnnnnnnnnnnnnnnnnnnnnnnnnnnnnnnnnnnnnnnnnnnnnnnnnnnnnnnnnnnnnnnnnnnnnnnnnnnnnnnnnnnnnnnnnnnnnnnnnnnnnnnnnnnnnnnnnnnnnnnnnnnnnnnnnnnnnnnnnnnnnnnnnnnnnnnnnnnnnnnnnnnnnnnnnnnnnnnnnnnnnnnnnnnnnnnnnnnnnnnnnnnnnnnnnnnnnnnnnnnnnnnnnnnnnnnnnnnnnnnnnnnnnnnnnnnnnnnnnnnnnnnnnnnnnnnnnnnnnnnnnnnnnnnnnnnnnnnnnnnnnnnnnnnnnnnnnnnnnnnnnnnnnnnnnnnnnnnnnnnnnnnnnnnnnnnnnnnnnnnnnnnnnnnnnnnnnnnnnnnnnnnnnnnnnnnnnnnnnnnnnnnnnnnnnnnnnnnnnnnnnnnnnnnnnnnnnnnnnnnnnnnnnnnnnnnnnnnnnnnnnnnnnnnnnnnnnnnnnnnnnnnnnnnnnnnnnnnnnnnnnnnnnnnnnnnnnnnnnnnnnnnnnnnnnnnnnnnnnnnnnnnnnnnnnnnnnnnnnnnnnnnnnnnnnnnnnnnnnnnnnnnnnnnnnnnnnnnnnnnnnnnnnnnnnnnnnnnnnnnnnnnnnnnnnnnnnnnnnnnnnnnnnnnnnnnnnnnnnnnnnnnnnnnnnnnnnnnnnnnnnnnnnnnnnnnnnnnnnnnnnnnnnnnnnnnnnnnnnnnnnnnnnnnnnnnnnnnnnnnnnnnnnnnnnnnnnnnnnnnnnnnnnnnnnnnnnnnnnnnnnnnnnnnnnnnnnnnnnnnnnnnnnnnnnnnnnnnnnnnnnnnnnnnnnnnnnnnnnnnnnnnnnnnnnnnnnnnnnnnnnnnnnnnnnnnnnnnnnnnnnnnnnnnnnnnnnnnnnnnnnnnnnnnnnnnnnnnnnnnnnnnnnnnnnnnnnnnnnnnnnnnnnnnnnnnnnnnnnnnnnnnnnnnnnnnnnnnnnnnnnnnnnnnnnnnnnnnnnnnnnnnnnnnnnnnnnnnnnnnnnnnnnnnnnnnnnnnnnnnnnnnnnnnnnnnnnnnnnnnnnnnnnnnnnnnnnnnnnnnnnnnnnnnnnnnnnnnnnnnnnnnnnnnnnnnnnnnnnnnnnnnnnnnnnnnnnnnnnnnnnnnnnnnnnnnnnnnnnnnnnnnnnnnnnnnnnnnnnnnnnnnnnnnnnnnnnnnnnnnnnnnnnnnnnnnnnnnnnnnnnnnnnnnnnnnnnnnnnnnnnnnnnnnnnnnnnnnnnnnnnnnnnnnnnnnnnnnnnnnnnnnnnnnnnnnnnnnnnnnnnnnnnnnnnnnnnnnnnnnnnnnnnnnnnnnnnnnnnnnnnnnnnnnnnnnnnnnnnnnnnnnnnnnnnnnnnnnnnnnnnnnnnnnnnnnnnnnnnnnnnnnnnnnnnnnnnnnnnnnnnnnnnnnnnnnnnnnnnnnnnnnnnnnnnnnnnnnnnnnnnnnnnnnnnnnnnnnnnnnnnnnnnnnnnnnnnnnnnnnnnnnnnnnnnnnnnnnnnnnnnnnnnnnnnnnnnnnnnnnnnnnnnnnnnnnnnnnnnnnnnnnnnnnnnnnnnnnnnnnnnnnnnnnnnnnnnnnnnnnnnnnnnnnnnnnnnnnnnnnnnnnnnnnnnnnnnnnnnnnnnnnnnnnnnnnnnnnnnnnnnnnnnnnnnnnnnnnnnnnnnnnnnnnnnnnnnnnnnnnnnnnnnnnnnnnnnnnnnnnnnnnnnnnnnnnnnnnnnnnnnnnnnnnnnnnnnnnnnnnnnnnnnnnnnnnnnnnnnnnnnnnnnnnnnnnnnnnnnnnnnnnnnnnnnnnnnnnnnnnnnnnnnnnnnnnnnnnnnnnnnnnnnnnnnnnnnnnnnnnnnnnnnnnnnnnnnnnnnnnnnnnnnnnnnnnnnnnnnnnnnnnnnnnnnnnnnnnnnnnnnnnnnnnnnnnnnnnnnnnnnnnnnnnnnnnnnnnnnnnnnnnnnnnnnnnnnnnnnnnnnnnnnnnnnnnnnnnnnnnnnnnnnnnnnnnnnnnnnnnnnnnnnnnnnnnnnnnnnnnnnnnnnnnnnnnnnnnnnnnnnnnnnnnnnnnnnnnnnnnnnnnnnnnnnnnnnnnnnnnnnnnnnnnnnnnnnnnnnnnnnnnnnnnnnnnnnnnnnnnnnnnnnnnnnnnnnnnnnnnnnnnnnnnnnnnnnnnnnnnnnnnnnnnnnnnnnnnnnnnnnnnnnnnnnnnnnnnnnnnnnnnnnnnnnnnnnnnnnnnnnnnnnnnnnnnnnnnnnnnnnnnnnnnnnnnnnnnnnnnnnnnnnnnnnnnnnnnnnnnnnnnnnnnnnnnnnnnnnnnnnnnnnnnnnnnnnnnnnnnnnnnnnnnnnnnnnnnnnnnnnnnnnnnnnnnnnnnnnnnnnnnnnnnnnnnnnnnnnnnnnnnnnnnnnnnnnnnnnnnnnnnnnnnnnnnnnnnnnnnnnnnnnnnnnnnnnnnnnnnnnnnnnnnnnnnnnnnnnnnnnnnnnnnnnnnnnnnnnnnnnnnnnnnnnnnnnnnnnnnnnnnnnnnnnnnnnnnnnnnnnnnnnnnnnnnnnnnnnnnnnnnnnnnnnnnnnnnnnnnnnnnnnnnnnnnnnnnnnnnnnnnnnnnnnnnnnnnnnnnnnnnnnnnnnnnnnnnnnnnnnnnnnnnnnnnnnnnnnnnnnnnnnnnnnnnnnnnnnnnnnnnnnnnnnnnnnnnnnnnnnnnnnnnnnnnnnnnnnnnnnnnnnnnnnnnnnnnnnnnnnnnnnnnnnnnnnnnnnnnnnnnnnnnnnnnnnnnnnnnnnnnnnnnnnnnnnnnnnnnnnnnnnnnnnnnnnnnnnnnnnnnnnnnnnnnnnnnnnnnnnnnnnnnnnnnnnnnnnnnnnnnnnnnnnnnnnnnnnnnnnnnnnnnnnnnnnnnnnnnnnnnnnnnnnnnnnnnnnnnnnnnnnnnnnnnnnnnnnnnnnnnnnnnnnnnnnnnnnnnnnnnnnnnnnnnnnnnnnnnnnnnnnnnnnnnnnnnnnnnnnnnnnnnnnnnnnnnnnnnnnnnnnnnnnnnnnnnnnnnnnnnnnnnnnnnnnnnnnnnnnnnnnnnnnnnnnnnnnnnnnnnnnnnnnnnnnnnnnnnnnnnnnnnnnnnnnnnnnnnnnnnnnnnnnnnnnnnnnnnnnnnnnnnnnnnnnnnnnnnnnnnnnnnnnnnnnnnnnnnnnnnnnnnnnnnnnnnnnnnnnnnnnnnnnnnnnnnnnnnnnnnnnnnnnnnnnnnnnnnnnnnnnnnnnnnnnnnnnnnnnnnnnnnnnnnnnnnnnnnnnnnnnnnnnnnnnnnnnnnnnnnnnnnnnnnnnnnnnnnnnnnnnnnnnnnnnnnnnnnnnnnnnnnnnnnnnnnnnnnnnnnnnnnnnnnnnnnnnnnnnnnnnnnnnnnnnnnnnnnnnnnnnnnnnnnnnnnnnnnnnnnnnnnnnnnnnnnnnnnnnnnnnnnnnnnnnnnnnnnnnnnnnnnnnnnnnnnnnnnnnnnnnnnnnnnnnnnnnnnnnnnnnnnnnnnnnnnnnnnnnnnnnnnnnnnnnnnnnnnnnnnnnnnnnnnnnnnnnnnnnnnnnnnnnnnnnnnnnnnnnnnnnnnnnnnnnnnnnnnnnnnnnnnnnnnnnnnnnnnnnnnnnnnnnnnnnnnnnnnnnnnnnnnnnnnnnnnnnnnnnnnnnnnnnnnnnnnnnnnnnnnnnnnnnnnnnnnnnnnnnnnnnnnnnnnnnnnnnnnnnnnnnnnnnnnnnnnnnnnnnnnnnnnnnnnnnnnnnnnnnnnnnnnnnnnnnnnnnnnnnnnnnnnnnnnnnnnnnnnnnnnnnnnnnnnnnnnnnnnnnnnnnnnnnnnnnnnnnnnnnnnnnnnnnnnnnnnnnnnnnnnnnnnnnnnnnnnnnnnnnnnnnnnnnnnnnnnnnnnnnnnnnnnnnnnnnnnnnnnnnnnnnnnnnnnnnnnnnnnnnnnnnnnnnnnnnnnnnnnnnnnnnnnnnnnnnnnnnnnnnnnnnnnnnnnnnnnnnnnnnnnnnnnnnnnnnnnnnnnnnnnnnnnnnnnnnnnnnnnnnnnnnnnnnnnnnnnnnnnnnnnnnnnnnnnnnnnnnnnnnnnnnnnnnnnnnnnnnnnnnnnnnnnnnnnnnnnnnnnnnnnnnnnnnnnnnnnnnnnnnnnnnnnnnnnnnnnnnnnnnnnnnnnnnnnnnnnnnnnnnnnnnnnnnnnnnnnnnnnnnnnnnnnnnnnnnnnnnnnnnnnnnnnnnnnnnnnnnnnnnnnnnnnnnnnnnnnnnnnnnnnnnnnnnnnnnnnnnnnnnnnnnnnnnnnnnnnnnnnnnnnnnnnnnnnnnnnnnnnnnnnnnnnnnnnnnnnnnnnnnnnnnnnnnnnnnnnnnnnnnnnnnnnnnnnnnnnnnnnnnnnnnnnnnnnnnnnnnnnnnnnnnnnnnnnnnnnnnnnnnnnnnnnnnnnnnnnnnnnnnnnnnnnnnnnnnnnnnnnnnnnnnnnnnnnnnnnnnnnnnnnnnnnnnnnnnnnnnnnnnnnnnnnnnnnnnnnnnnnnnnnnnnnnnnnnnnnnnnnnnnnnnnnnnnnnnnnnnnnnnnnnnnnnnnnnnnnnnnnnnnnnnnnnnnnnnnnnnnnnnnnnnnnnnnnnnnnnnnnnnnnnnnnnnnnnnnnnnnnnnnnnnnnnnnnnnnnnnnnnnnnnnnnnnnnnnnnnnnnnnnnnnnnnnnnnnnnnnnnnnnnnnnnnnnnnnnnnnnnnnnnnnnnnnnnnnnnnnnnnnnnnnnnnnnnnnnnnnnnnnnnnnnnnnnnnnnnnnnnnnnnnnnnnnnnnnnnnnnnnnnnnnnnnnnnnnnnnnnnnnnnnnnnnnnnnnnnnnnnnnnnnnnnnnnnnnnnnnnnnnnnnnnnnnnnnnnnnnnnnnnnnnnnnnnnnnnnnnnnnnnnnnnnnnnnnnnnnnnnnnnnnnnnnnnnnnnnnnnnnnnnnnnnnnnnnnnnnnnnnnnnnnnnnnnnnnnnnnnnnnnnnnnnnnnnnnnnnnnnnnnnnnnnnnnnnnnnnnnnnnnnnnnnnnnnnnnnnnnnnnnnnnnnnnnnnnnnnnnnnnnnnnnnnnnnnnnnnnnnnnnnnnnnnnnnnnnnnnnnnnnnnnnnnnnnnnnnnnnnnnnnnnnnnnnnnnnnnnnnnnnnnnnnnnnnnnnnnnnnnnnnnnnnnnnnnnnnnnnnnnnnnnnnnnnnnnnnnnnnnnnnnnnnnnnnnnnnnnnnnnnnnnnnnnnnnnnnnnnnnnnnnnnnnnnnnnnnnnnnnnnnnnnnnnnnnnnnnnnnnnnnnnnnnnnnnnnnnnnnnnnnnnnnnnnnnnnnnnnnnnnnnnnnnnnnnnnnnnnnnnnnnnnnnnnnnnnnnnnnnnnnnnnnnnnnnnnnnnnnnnnnnnnnnnnnnnnnnnnnnnnnnnnnnnnnnnnnnnnnnnnnnnnnnnnnnnnnnnnnnnnnnnnnnnnnnnnnnnnnnnnnnnnnnnnnnnnnnnnnnnnnnnnnnnnnnnnnnnnnnnnnnnnnnnnnnnnnnnnnnnnnnnnnnnnnnnnnnnnnnnnnnnnnnnnnnnnnnnnnnnnnnnnnnnnnnnnnnnnnnnnnnnnnnnnnnnnnnnnnnnnnnnnnnnnnnnnnnnnnnnnnnnnnnnnnnnnnnnnnnnnnnnnnnnnnnnnnnnnnnnnnnnnnnnnnnnnnnnnnnnnnnnnnnnnnnnnnnnnnnnnnnnnnnnnnnnnnnnnnnnnnnnnnnnnnnnnnnnnnnnnnnnnnnnnnnnnnnnnnnnnnnnnnnnnnnnnnnnnnnnnnnnnnnnnnnnnnnnnnnnnnnnnnnnnnnnnnnnnnnnnnnnnnnnnnnnnnnnnnnnnnnnnnnnnnnnnnnnnnnnnnnnnnnnnnnnnnnnnnnnnnnnnnnnnnnnnnnnnnnnnnnnnnnnnnnnnnnnnnnnnnnnnnnnnnnnnnnnnnnnnnnnnnnnnnnnnnnnnnnnnnnnnnnnnnnnnnnnnnnnnnnnnnnnnnnnnnnnnnnnnnnnnnnnnnnnnnnnnnnnnnnnnnnnnnnnnnnnnnnnnnnnnnnnnnnnnnnnnnnnnnnnnnnnnnnnnnnnnnnnnnnnnnnnnnnnnnnnnnnnnnnnnnnnnnnnnnnnnnnnnnnnnnnnnnnnnnnnnnnnnnnnnnnnnnnnnnnnnnnnnnnnnnnnnnnnnnnnnnnnnnnnnnnnnnnnnnnnnnnnnnnnnnnnnnnnnnnnnnnnnnnnnnnnnnnnnnnnnnnnnnnnnnnnnnnnnnnnnnnnnnnnnnnnnnnnnnnnnnnnnnnnnnnnnnnnnnnnnnnnnnnnnnnnnnnnnnnnnnnnnnnnnnnnnnnnnnnnnnnnnnnnnnnnnnnnnnnnnnnnnnnnnnnnnnnnnnnnnnnnnnnnnnnnnnnnnnnnnnnnnnnnnnnnnnnnnnnnnnnnnnnnnnnnnnnnnnnnnnnnnnnnnnnnnnnnnnnnnnnnnnnnnnnnnnnnnnnnnnnnnnnnnnnnnnnnnnnnnnnnnnnnnnnnnnnnnnnnnnnnnnnnnnnnnnnnnnnnnnnnnnnnnnnnnnnnnnnnnnnnnnnnnnnnnnnnnnnnnnnnnnnnnnnnnnnnnnnnnnnnnnnnnnnnnnnnnnnnnnnnnnnnnnnnnnnnnnnnnnnnnnnnnnnnnnnnnnnnnnnnnnnnnnnnnnnnnnnnnnnnnnnnnnnnnnnnnnnnnnnnnnnnnnnnnnnnnnnnnnnnnnnnnnnnnnnnnnnnnnnnnnnnnnnnnnnnnnnnnnnnnnnnnnnnnnnnnnnnnnnnnnnnnnnnnnnnnnnnnnnnnnnnnnnnnnnnnnnnnnnnnnnnnnnnnnnnnnnnnnnnnnnnnnnnnnnnnnnnnnnnnnnnnnnnnnnnnnnnnnnnnnnnnnnnnnnnnnnnnnnnnnnnnnnnnnnnnnnnnnnnnnnnnnnnnnnnnnnnnnnnnnnnnnnnnnnnnnnnnnnnnnnnnnnnnnnnnnnnnnnnnnnnnnnnnnnnnnnnnnnnnnnnnnnnnnnnnnnnnnnnnnnnnnnnnnnnnnnnnnnnnnnnnnnnnnnnnnnnnnnnnnnnnnnnnnnnnnnnnnnnnnnnnnnnnnnnnnnnnnnnnnnnnnnnnnnnnnnnnnnnnnnnnnnnnnnnnnnnnnnnnnnnnnnnnnnnnnnnnnnnnnnnnnnnnnnnnnnnnnnnnnnnnnnnnnnnnnnnnnnnnnnnnnnnnnnnnnnnnnnnnnnnnnnnnnnnnnnnnnnnnnnnnnnnnnnnnnnnnnnnnnnnnnnnnnnnnnnnnnnnnnnnnnnnnnnnnnnnnnnnnnnnnnnnnnnnnnnnnnnnnnnnnnnnnnnnnnnnnnnnnnnnnnnnnnnnnnnnnnnnnnnnnnnnnnnnnnnnnnnnnnnnnnnnnnnnnnnnnnnnnnnnnnnnnnnnnnnnnnnnnnnnnnnnnnnnnnnnnnnnnnnnnnnnnnnnnnnnnnnnnnnnnnnnnnnnnnnnnnnnnnnnnnnnnnnnnnnnnnnnnnnnnnnnnnnnnnnnnnnnnnnnnnnnnnnnnnnnnnnnnnnnnnnnnnnnnnnnnnnnnnnnnnnnnnnnnnnnnnnnnnnnnnnnnnnnnnnnnnnnnnnnnnnnnnnnnnnnnnnnnnnnnnnnnnnnnnnnnnnnnnnnnnnnnnnnnnnnnnnnnnnnnnnnnnnnnnnnnnnnnnnnnnnnnnnnnnnnnnnnnnnnnnnnnnnnnnnnnnnnnnnnnnnnnnnnnnnnnnnnnnnnnnnnnnnnnnnnnnnnnnnnnnnnnnnnnnnnnnnnnnnnnnnnnnnnnnnnnnnnnnnnnnnnnnnnnnnnnnnnnnnnnnnnnnnnnnnnnnnnnnnnnnnnnnnnnnnnnnnnnnnnnnnnnnnnnnnnnnnnnnnnnnnnnnnnnnnnnnnnnnnnnnnnnnnnnnnnnnnnnnnnnnnnnnnnnnnnnnnnnnnnnnnnnnnnnnnnnnnnnnnnnnnnnnnnnnnnnnnnnnnnnnnnnnnnnnnnnnnnnnnnnnnnnnnnnnnnnnnnnnnnnnnnnnnnnnnnnnnnnnnnnnnnnnnnnnnnnnnnnnnnnnnnnnnnnnnnnnnnnnnnnnnnnnnnnnnnnnnnnnnnnnnnnnnnnnnnnnnnnnnnnnnnnnnnnnnnnnnnnnnnnnnnnnnnnnnnnnnnnnnnnnnnnnnnnnnnnnnnnnnnnnnnnnnnnnnnnnnnnnnnnnnnnnnnnnnnnnnnnnnnnnnnnnnnnnnnnnnnnnnnnnnnnnnnnnnnnnnnnnnnnnnnnnnnnnnnnnnnnnnnnnnnnnnnnnnnnnnnnnnnnnnnnnnnnnnnnnnnnnnnnnnnnnnnnnnnnnnnnnnnnnnnnnnnnnnnnnnnnnnnnnnnnnnnnnnnnnnnnnnnnnnnnnnnnnnnnnnnnnnnnnnnnnnnnnnnnnnnnnnnnnnnnnnnnnnnnnnnnnnnnnnnnnnnnnnnnnnnnnnnnnnnnnnnnnnnnnnnnnnnnnnnnnnnnnnnnnnnnnnnnnnnnnnnnnnnnnnnnnnnnnnnnnnnnnnnnnnnnnnnnnnnnnnnnnnnnnnnnnnnnnnnnnnnnnnnnnnnnnnnnnnnnnnnnnnnnnnnnnnnnnnnnnnnnnnnnnnnnnnnnnnnnnnnnnnnnnnnnnnnnnnnnnnnnnnnnnnnnnnnnnnnnnnnnnnnnnnnnnnnnnnnnnnnnnnnnnnnnnnnnnnnnnnnnnnnnnnnnnnnnnnnnnnnnnnnnnnnnnnnnnnnnnnnnnnnnnnnnnnnnnnnnnnnnnnnnnnnnnnnnnnnnnnnnnnnnnnnnnnnnnnnnnnnnnnnnnnnnnnnnnnnnnnnnnnnnnnnnnnnnnnnnnnnnnnnnnnnnnnnnnnnnnnnnnnnnnnnnnnnnnnnnnnnnnnnnnnnnnnnnnnnnnnnnnnnnnnnnnnnnnnnnnnnnnnnnnnnnnnnnnnnnnnnnnnnnnnnnnnnnnnnnnnnnnnnnnnnnnnnnnnnnnnnnnnnnnnnnnnnnnnnnnnnnnnnnnnnnnnnnnnnnnnnnnnnnnnnnnnnnnnnnnnnnnnnnnnnnnnnnnnnnnnnnnnnnnnnnnnnnnnnnnnnnnnnnnnnnnnnnnnnnnnnnnnnnnnnnnnnnnnnnnnnnnnnnnnnnnnnnnnnnnnnnnnnnnnnnnnnnnnnnnnnnnnnnnnnnnnnnnnnnnnnnnnnnnnnnnnnnnnnnnnnnnnnnnnnnnnnnnnnnnnnnnnnnnnnnnnnnnnnnnnnnnnnnnnnnnnnnnnnnnnnnnnnnnnnnnnnnnnnnnnnnnnnnnnnnnnnnnnnnnnnnnnnnnnnnnnnnnnnnnnnnnnnnnnnnnnnnnnnnnnnnnnnnnnnnnnnnnnnnnnnnnnnnnnnnnnnnnnnnnnnnnnnnnnnnnnnnnnnnnnnnnnnnnnnnnnnnnnnnnnnnnnnnnnnnnnnnnnnnnnnnnnnnnnnnnnnnnnnnnnnnnnnnnnnnnnnnnnnnnnnnnnnnnnnnnnnnnnnnnnnnnnnnnnnnnnnnnnnnnnnnnnnnnnnnnnnnnnnnnnnnnnnnnnnnnnnnnnnnnnnnnnnnnnnnnnnnnnnnnnnnnnnnnnnnnnnnnnnnnnnnnnnnnnnnnnnnnnnnnnnnnnnnnnnnnnnnnnnnnnnnnnnnnnnnnnnnnnnnnnnnnnnnnnnnnnnnnnnnnnnnnnnnnnnnnnnnnnnnnnnnnnnnnnnnnnnnnnnnnnnnnnnnnnnnnnnnnnnnnnnnnnnnnnnnnnnnnnnnnnnnnnnnnnnnnnnnnnnnnnnnnnnnnnnnnnnnnnnnnnnnnnnnnnnnnnnnnnnnnnnnnnnnnnnnnnnnnnnnnnnnnnnnnnnnnnnnnnnnnnnnnnnnnnnnnnnnnnnnnnnnnnnnnnnnnnnnnnnnnnnnnnnnnnnnnnnnnnnnnnnnnnnnnnnnnnnnnnnnnnnnnnnnnnnnnnnnnnnnnnnnnnnnnnnnnnnnnnnnnnnnnnnnnnnnnnnnnnnnnnnnnnnnnnnnnnnnnnnnnnnnnnnnnnnnnnnnnnnnnnnnnnnnnnnnnnnnnnnnnnnnnnnnnnnnnnnnnnnnnnnnnnnnnnnnnnnnnnnnnnnnnnnnnnnnnnnnnnnnnnnnnnnnnnnnnnnnnnnnnnnnnnnnnnnnnnnnnnnnnnnnnnnnnnnnnnnnnnnnnnnnnnnnnnnnnnnnnnnnnnnnnnnnnnnnnnnnnnnnnnnnnnnnnnnnnnnnnnnnnnnnnnnnnnnnnnnnnnnnnnnnnnnnnnnnnnnnnnnnnnnnnnnnnnnnnnnnnnnnnnnnnnnnnnnnnnnnnnnnnnnnnnnnnnnnnnnnnnnnnnnnnnnnnnnnnnnnnnnnnnnnnnnnnnnnnnnnnnnnnnnnnnnnnnnnnnnnnnnnnnnnnnnnnnnnnnnnnnnnnnnnnnnnnnnnnnnnnnnnnnnnnnnnnnnnnnnnnnnnnnnnnnnnnnnnnnnnnnnnnnnnnnnnnnnnnnnnnnnnnnnnnnnnnnnnnnnnnnnnnnnnnnnnnnnnnnnnnnnnnnnnnnnnnnnnnnnnnnnnnnnnnnnnnnnnnnnnnnnnnnnnnnnnnnnnnnnnnnnnnnnnnnnnnnnnnnnnnnnnnnnnnnnnnnnnnnnnnnnnnnnnnnnnnnnnnnnnnnnnnnnnnnnnnnnnnnnnnnnnnnnnnnnnnnnnnnnnnnnnnnnnnnnnnnnnnnnnnnnnnnnnnnnnnnnnnnnnnnnnnnnnnnnnnnnnnnnnnnnnnnnnnnnnnnnnnnnnnnnnnnnnnnnnnnnnnnnnnnnnnnnnnnnnnnnnnnnnnnnnnnnnnnnnnnnnnnnnnnnnnnnnnnnnnnnnnnnnnnnnnnnnnnnnnnnnnnnnnnnnnnnnnnnnnnnnnnnnnnnnnnnnnnnnnnnnnnnnnnnnnnnnnnnnnnnnnnnnnnnnnnnnnnnnnnnnnnnnnnnnnnnnnnnnnnnnnnnnnnnnnnnnnnnnnnnnnnnnnnnnnnnnnnnnnnnnnnnnnnnnnnnnnnnnnnnnnnnnnnnnnnnnnnnnnnnnnnnnnnnnnnnnnnnnnnnnnnnnnnnnnnnnnnnnnnnnnnnnnnnnnnnnnnnnnnnnnnnnnnnnnnnnnnnnnnnnnnnnnnnnnnnnnnnnnnnnnnnnnnnnnnnnnnnnnnnnnnnnnnnnnnnnnnnnnnnnnnnnnnnnnnnnnnnnnnnnnnnnnnnnnnnnnnnnnnnnnnnnnnnnnnnnnnnnnnnnnnnnnnnnnnnnnnnnnnnnnnnnnnnnnnnnnnnnnnnnnnnnnnnnnnnnnnnnnnnnnnnnnnnnnnnnnnnnnnnnnnnnnnnnnnnnnnnnnnnnnnnnnnnnnnnnnnnnnnnnnnnnnnnnnnnnnnnnnnnnnnnnnnnnnnnnnnnnnnnnnnnnnnnnnnnnnnnnnnnnnnnnnnnnnnnnnnnnnnnnnnnnnnnnnnnnnnnnnnnnnnnnnnnnnnnnnnnnnnnnnnnnnnnnnnnnnnnnnnnnnnnnnnnnnnnnnnnnnnnnnnnnnnnnnnnnnnnnnnnnnnnnnnnnnnnnnnnnnnnnnnnnnnnnnnnnnnnnnnnnnnnnnnnnnnnnnnnnnnnnnnnnnnnnnnnnnnnnnnnnnnnnnnnnnnnnnnnnnnnnnnnnnnnnnnnnnnnnnnnnnnnnnnnnnnnnnnnnnnnnnnnnnnnnnnnnnnnnnnnnnnnnnnnnnnnnnnnnnnnnnnnnnnnnnnnnnnnnnnnnnnnnnnnnnnnnnnnnnnnnnnnnnnnnnnnnnnnnnnnnnnnnnnnnnnnnnnnnnnnnnnnnnnnnnnnnnnnnnnnnnnnnnnnnnnnnnnnnnnnnnnnnnnnnnnnnnnnnnnnnnnnnnnnnnnnnnnnnnnnnnnnnnnnnnnnnnnnnnnnnnnnnnnnnnnnnnnnnnnnnnnnnnnnnnnnnnnnnnnnnnnnnnnnnnnnnnnnnnnnnnnnnnnnnnnnnnnnnnnnnnnnnnnnnnnnnnnnnnnnnnnnnnnnnnnnnnnnnnnnnnnnnnnnnnnnnnnnnnnnnnnnnnnnnnnnnnnnnnnnnnnnnnnnnnnnnnnnnnnnnnnnnnnnnnnnnnnnnnnnnnnnnnnnnnnnnnnnnnnnnnnnnnnnnnnnnnnnnnnnnnnnnnnnnnnnnnnnnnnnnnnnnnnnnnnnnnnnnnnnnnnnnnnnnnnnnnnnnnnnnnnnnnnnnnnnnnnnnnnnnnnnnnnnnnnnnnnnnnnnnnnnnnnnnnnnnnnnnnnnnnnnnnnnnnnnnnnnnnnnnnnnnnnnnnnnnnnnnnnnnnnnnnnnnnnnnnnnnnnnnnnnnnnnnnnnnnnnnnnnnnnnnnnnnnnnnnnnnnnnnnnnnnnnnnnnnnnnnnnnnnnnnnnnnnnnnnnnnnnnnnnnnnnnnnnnnnnnnnnnnnnnnnnnnnnnnnnnnnnnnnnnnnnnnnnnnnnnnnnnnnnnnnnnnnnnnnnnnnnnnnnnnnnnnnnnnnnnnnnnnnnnnnnnnnnnnnnnnnnnnnnnnnnnnnnnnnnnnnnnnnnnnnnnnnnnnnnnnnnnnnnnnnnnnnnnnnnnnnnnnnnnnnnnnnnnnnnnnnnnnnnnnnnnnnnnnnnnnnnnnnnnnnnnnnnnnnnnnnnnnnnnnnnnnnnnnnnnnnnnnnnnnnnnnnnnnnnnnnnnnnnnnnnnnnnnnnnnnnnnnnnnnnnnnnnnnnnnnnnnnnnnnnnnnnnnnnnnnnnnnnnnnnnnnnnnnnnnnnnnnnnnnnnnnnnnnnnnnnnnnnnnnnnnnnnnnnnnnnnnnnnnnnnnnnnnnnnnnnnnnnnnnnnnnnnnnnnnnnnnnnnnnnnnnnnnnnnnnnnnnnnnnnnnnnnnnnnnnnnnnnnnnnnnnnnnnnnnnnnnnnnnnnnnnnnnnnnnnnnnnnnnnnnnnnnnnnnnnnnnnnnnnnnnnnnnnnnnnnnnnnnnnnnnnnnnnnnnnnnnnnnnnnnnnnnnnnnnnnnnnnnnnnnnnnnnnnnnnnnnnnnnnnnnnnnnnnnnnnnnnnnnnnnnnnnnnnnnnnnnnnnnnnnnnnnnnnnnnnnnnnnnnnnnnnnnnnnnnnnnnnnnnnnnnnnnnnnnnnnnnnnnnnnnnnnnnnnnnnnnnnnnnnnnnnnnnnnnnnnnnnnnnnnnnnnnnnnnnnnnnnnnnnnnnnnnnnnnnnnnnnnnnnnnnnnnnnnnnnnnnnnnnnnnnnnnnnnnnnnnnnnnnnnnnnnnnnnnnnnnnnnnnnnnnnnnnnnnnnnnnnnnnnnnnnnnnnnnnnnnnnnnnnnnnnnnnnnnnnnnnnnnnnnnnnnnnnnnnnnnnnnnnnnnnnnnnnnnnnnnnnnnnnnnnnnnnnnnnnnnnnnnnnnnnnnnnnnnnnnnnnnnnnnnnnnnnnnnnnnnnnnnnnnnnnnnnnnnnnnnnnnnnnnnnnnnnnnnnnnnnnnnnnnnnnnnnnnnnnnnnnnnnnnnnnnnnnnnnnnnnnnnnnnnnnnnnnnnnnnnnnnnnnnnnnnnnnnnnnnnnnnnnnnnnnnnnnnnnnnnnnnnnnnnnnnnnnnnnnnnnnnnnnnnnnnnnnnnnnnnnnnnnnnnnnnnnnnnnnnnnnnnnnnnnnnnnnnnnnnnnnnnnnnnnnnnnnnnnnnnnnnnnnnnnnnnnnnnnnnnnnnnnnnnnnnnnnnnnnnnnnnnnnnnnnnnnnnnnnnnnnnnnnnnnnnnnnnnnnnnnnnnnnnnnnnnnnnnnnnnnnnnnnnnnnnnnnnnnnnnnnnnnnnnnnnnnnnnnnnnnnnnnnnnnnnnnnnnnnnnnnnnnnnnnnnnnnnnnnnnnnnnnnnnnnnnnnnnnnnnnnnnnnnnnnnnnnnnnnnnnnnnnnnnnnnnnnnnnnnnnnnnnnnnnnnnnnnnnnnnnnnnnnnnnnnnnnnnnnnnnnnnnnnnnnnnnnnnnnnnnnnnnnnnnnnnnnnnnnnnnnnnnnnnnnnnnnnnnnnnnnnnnnnnnnnnnnnnnnnnnnnnnnnnnnnnnnnnnnnnnnnnnnnnnnnnnnnnnnnnnnnnnnnnnnnnnnnnnnnnnnnnnnnnnnnnnnnnnnnnnnnnnnnnnnnnnnnnnnnnnnnnnnnnnnnnnnnnnnnnnnnnnnnnnnnnnnnnnnnnnnnnnnnnnnnnnnnnnnnnnnnnnnnnnnnnnnnnnnnnnnnnnnnnnnnnnnnnnnnnnnnnnnnnnnnnnnnnnnnnnnnnnnnnnnnnnnnnnnnnnnnnnnnnnnnnnnnnnnnnnnnnnnnnnnnnnnnnnnnnnnnnnnnnnnnnnnnnnnnnnnnnnnnnnnnnnnnnnnnnnnnnnnnnnnnnnnnnnnnnnnnnnnnnnnnnnnnnnnnnnnnnnnnnnnnnnnnnnnnnnnnnnnnnnnnnnnnnnnnnnnnnnnnnnnnnnnnnnnnnnnnnnnnnnnnnnnnnnnnnnnnnnnnnnnnnnnnnnnnnnnnnnnnnnnnnnnnnnnnnnnnnnnnnnnnnnnnnnnnnnnnnnnnnnnnnnnnnnnnnnnnnnnnnnnnnnnnnnnnnnnnnnnnnnnnnnnnnnnnnnnnnnnnnnnnnnnnnnnnnnnnnnnnnnnnnnnnnnnnnnnnnnnnnnnnnnnnnnnnnnnnnnnnnnnnnnnnnnnnnnnnnnnnnnnnnnnnnnnnnnnnnnnnnnnnnnnnnnnnnnnnnnnnnnnnnnnnnnnnnnnnnnnnnnnnnnnnnnnnnnnnnnnnnnnnnnnnnnnnnnnnnnnnnnnnnnnnnnnnnnnnnnnnnnnnnnnnnnnnnnnnnnnnnnnnnnnnnnnnnnnnnnnnnnnnnnnnnnnnnnnnnnnnnnnnnnnnnnnnnnnnnnnnnnnnnnnnnnnnnnnnnnnnnnnnnnnnnnnnnnnnnnnnnnnnnnnnnnnnnnnnnnnnnnnnnnnnnnnnnnnnnnnnnnnnnnnnnnnnnnnnnnnnnnnnnnnnnnnnnnnnnnnnnnnnnnnnnnnnnnnnnnnnnnnnnnnnnnnnnnnnnnnnnnnnnnnnnnnnnnnnnnnnnnnnnnnnnnnnnnnnnnnnnnnnnnnnnnnnnnnnnnnnnnnnnnnnnnnnnnnnnnnnnnnnnnnnnnnnnnnnnnnnnnnnnnnnnnnnnnnnnnnnnnnnnnnnnnnnnnnnnnnnnnnnnnnnnnnnnnnnnnnnnnnnnnnnnnnnnnnnnnnnnnnnnnnnnnnnnnnnnnnnnnnnnnnnnnnnnnnnnnnnnnnnnnnnnnnnnnnnnnnnnnnnnnnnnnnnnnnnnnnnnnnnnnnnnnnnnnnnnnnnnnnnnnnnnnnnnnnnnnnnnnnnnnnnnnnnnnnnnnnnnnnnnnnnnnnnnnnnnnnnnnnnnnnnnnnnnnnnnnnnnnnnnnnnnnnnnnnnnnnnnnnnnnnnnnnnnnnnnnnnnnnnnnnnnnnnnnnnnnnnnnnnnnnnnnnnnnnnnnnnnnnnnnnnnnnnnnnnnnnnnnnnnnnnnnnnnnnnnnnnnnnnnnnnnnnnnnnnnnnnnnnnnnnnnnnnnnnnnnnnnnnnnnnnnnnnnnnnnnnnnnnnnnnnnnnnnnnnnnnnnnnnnnnnnnnnnnnnnnnnnnnnnnnnnnnnnnnnnnnnnnnnnnnnnnnnnnnnnnnnnnnnnnnnnnnnnnnnnnnnnnnnnnnnnnnnnnnnnnnnnnnnnnnnnnnnnnnnnnnnnnnnnnnnnnnnnnnnnnnnnnnnnnnnnnnnnnnnnnnnnnnnnnnnnnnnnnnnnnnnnnnnnnnnnnnnnnnnnnnnnnnnnnnnnnnnnnnnnnnnnnnnnnnnnnnnnnnnnnnnnnnnnnnnnnnnnnnnnnnnnnnnnnnnnnnnnnnnnnnnnnnnnnnnnnnnnnnnnnnnnnnnnnnnnnnnnnnnnnnnnnnnnnnnnnnnnnnnnnnnnnnnnnnnnnnnnnnnnnnnnnnnnnnnnnnnnnnnnnnnnnnnnnnnnnnnnnnnnnnnnnnnnnnnnnnnnnnnnnnnnnnnnnnnnnnnnnnnnnnnnnnnnnnnnnnnnnnnnnnnnnnnnnnnnnnnnnnnnnnnnnnnnnnnnnnnnnnnnnnnnnnnnnnnnnnnnnnnnnnnnnnnnnnnnnnnnnnnnnnnnnnnnnnnnnnnnnnnnnnnnnnnnnnnnnnnnnnnnnnnnnnnnnnnnnnnnnnnnnnnnnnnnnnnnnnnnnnnnnnnnnnnnnnnnnnnnnnnnnnnnnnnnnnnnnnnnnnnnnnnnnnnnnnnnnnnnnnnnnnnnnnnnnnnnnnnnnnnnnnnnnnnnnnnnnnnnnnnnnnnnnnnnnnnnnnnnnnnnnnnnnnnnnnnnnnnnnnnnnnnnnnnnnnnnnnnnnnnnnnnnnnnnnnnnnnnnnnnnnnnnnnnnnnnnnnnnnnnnnnnnnnnnnnnnnnnnnnnnnnnnnnnnnnnnnnnnnnnnnnnnnnnnnnnnnnnnnnnnnnnnnnnnnnnnnnnnnnnnnnnnnnnnnnnnnnnnnnnnnnnnnnnnnnnnnnnnnnnnnnnnnnnnnnnnnnnnnnnnnnnnnnnnnnnnnnnnnnnnnnnnnnnnnnnnnnnnnnnnnnnnnnnnnnnnnnnnnnnnnnnnnnnnnnnnnnnnnnnnnnnnnnnnnnnnnnnnnnnnnnnnnnnnnnnnnnnnnnnnnnnnnnnnnnnnnnnnnnnnnnnnnnnnnnnnnnnnnnnnnnnnnnnnnnnnnnnnnnnnnnnnnnnnnnnnnnnnnnnnnnnnnnnnnnnnnnnnnnnnnnnnnnnnnnnnnnnnnnnnnnnnnnnnnnnnnnnnnnnnnnnnnnnnnnnnnnnnnnnnnnnnnnnnnnnnnnnnnnnnnnnnnnnnnnnnnnnnnnnnnnnnnnnnnnnnnnnnnnnnnnnnnnnnnnnnnnnnnnnnnnnnnnnnnnnnnnnnnnnnnnnnnnnnnnnnnnnnnnnnnnnnnnnnnnnnnnnnnnnnnnnnnnnnnnnnnnnnnnnnnnnnnnnnnnnnnnnnnnnnnnnnnnnnnnnnnnnnnnnnnnnnnnnnnnnnnnnnnnnnnnnnnnnnnnnnnnnnnnnnnnnnnnnnnnnnnnnnnnnnnnnnnnnnnnnnnnnnnnnnnnnnnnnnnnnnnnnnnnnnnnnnnnnnnnnnnnnnnnnnnnnnnnnnnnnnnnnnnnnnnnnnnnnnnnnnnnnnnnnnnnnnnnnnnnnnnnnnnnnnnnnnnnnnnnnnnnnnnnnnnnnnnnnnnnnnnnnnnnnnnnnnnnnnnnnnnnnnnnnnnnnnnnnnnnnnnnnnnnnnnnnnnnnnnnnnnnnnnnnnnnnnnnnnnnnnnnnnnnnnnnnnnnnnnnnnnnnnnnnnnnnnnnnnnnnnnnnnnnnnnnnnnnnnnnnnnnnnnnnnnnnnnnnnnnnnnnnnnnnnnnnnnnnnnnnnnnnnnnnnnnnnnnnnnnnnnnnnnnnnnnnnnnnnnnnnnnnnnnnnnnnnnnnnnnnnnnnnnnnnnnnnnnnnnnnnnnnnnnnnnnnnnnnnnnnnnnnnnnnnnnnnnnnnnnnnnnnnnnnnnnnnnnnnnnnnnnnnnnnnnnnnnnnnnnnnnnnnnnnnnnnnnnnnnnnnnnnnnnnnnnnnnnnnnnnnnnnnnnnnnnnnnnnnnnnnnnnnnnnnnnnnnnnnnnnnnnnnnnnnnnnnnnnnnnnnnnnnnnnnnnnnnnnnnnnnnnnnnnnnnnnnnnnnnnnnnnnnnnnnnnnnnnnnnnnnnnnnnnnnnnnnnnnnnnnnnnnnnnnnnnnnnnnnnnnnnnnnnnnnnnnnnnnnnnnnnnnnnnnnnnnnnnnnnnnnnnnnnnnnnnnnnnnnnnnnnnnnnnnnnnnnnnnnnnnnnnnnnnnnnnnnnnnnnnnnnnnnnnnnnnnnnnnnnnnnnnnnnnnnnnnnnnnnnnnnnnnnnnnnnnnnnnnnnnnnnnnnnnnnnnnnnnnnnnnnnnnnnnnnnnnnnnnnnnnnnnnnnnnnnnnnnnnnnnnnnnnnnnnnnnnnnnnnnnnnnnnnnnnnnnnnnnnnnnnnnnnnnnnnnnnnnnnnnnnnnnnnnnnnnnnnnnnnnnnnnnnnnnnnnnnnnnnnnnnnnnnnnnnnnnnnnnnnnnnnnnnnnnnnnnnnnnnnnnnnnnnnnnnnnnnnnnnnnnnnnnnnnnnnnnnnnnnnnnnnnnnnnnnnnnnnnnnnnnnnnnnnnnnnnnnnnnnnnnnnnnnnnnnnnnnnnnnnnnnnnnnnnnnnnnnnnnnnnnnnnnnnnnnnnnnnnnnnnnnnnnnnnnnnnnnnnnnnnnnnnnnnnnnnnnnnnnnnnnnnnnnnnnnnnnnnnnnnnnnnnnnnnnnnnnnnnnnnnnnnnnnnnnnnnnnnnnnnnnnnnnnnnnnnnnnnnnnnnnnnnnnnnnnnnnnnnnnnnnnnnnnnnnnnnnnnnnnnnnnnnnnnnnnnnnnnnnnnnnnnnnnnnnnnnnnnnnnnnnnnnnnnnnnnnnnnnnnnnnnnnnnnnnnnnnnnnnnnnnnnnnnnnnnnnnnnnnnnnnnnnnnnnnnnnnnnnnnnnnnnnnnnnnnnnnnnnnnnnnnnnnnnnnnnnnnnnnnnnnnnnnnnnnnnnnnnnnnnnnnnnnnnnnnnnnnnnnnnnnnnnnnnnnnnnnnnnnnnnnnnnnnnnnnnnnnnnnnnnnnnnnnnnnnnnnnnnnnnnnnnnnnnnnnnnnnnnnnnnnnnnnnnnnnnnnnnnnnnnnnnnnnnnnnnnnnnnnnnnnnnnnnnnnnnnnnnnnnnnnnnnnnnnnnnnnnnnnnnnnnnnnnnnnnnnnnnnnnnnnnnnnnnnnnnnnnnnnnnnnnnnnnnnnnnnnnnnnnnnnnnnnnnnnnnnnnnnnnnnnnnnnnnnnnnnnnnnnnnnnnnnnnnnnnnnnnnnnnnnnnnnnnnnnnnnnnnnnnnnnnnnnnnnnnnnnnnnnnnnnnnnnnnnnnnnnnnnnnnnnnnnnnnnnnnnnnnnnnnnnnnnnnnnnnnnnnnnnnnnnnnnnnnnnnnnnnnnnnnnnnnnnnnnnnnnnnnnnnnnnnnnnnnnnnnnnnnnnnnnnnnnnnnnnnnnnnnnnnnnnnnnnnnnnnnnnnnnnnnnnnnnnnnnnnnnnnnnnnnnnnnnnnnnnnnnnnnnnnnnnnnnnnnnnnnnnnnnnnnnnnnnnnnnnnnnnnnnnnnnnnnnnnnnnnnnnnnnnnnnnnnnnnnnnnnnnnnnnnnnnnnnnnnnnnnnnnnnnnnnnnnnnnnnnnnnnnnnnnnnnnnnnnnnnnnnnnnnnnnnnnnnnnnnnnnnnnnnnnnnnnnnnnnnnnnnnnnnnnnnnnnnnnnnnnnnnnnnnnnnnnnnnnnnnnnnnnnnnnnnnnnnnnnnnnnnnnnnnnnnnnnnnnnnnnnnnnnnnnnnnnnnnnnnnnnnnnnnnnnnnnnnnnnnnnnnnnnnnnnnnnnnnnnnnnnnnnnnnnnnnnnnnnnnnnnnnnnnnnnnnnnnnnnnnnnnnnnnnnnnnnnnnnnnnnnnnnnnnnnnnnnnnnnnnnnnnnnnnnnnnnnnnnnnnnnnnnnnnnnnnnnnnnnnnnnnnnnnnnnnnnnnnnnnnnnnnnnnnnnnnnnnnnnnnnnnnnnnnnnnnnnnnnnnnnnnnnnnnnnnnnnnnnnnnnnnnnnnnnnnnnnnnnnnnnnnnnnnnnnnnnnnnnnnnnnnnnnnnnnnnnnnnnnnnnnnnnnnnnnnnnnnnnnnnnnnnnnnnnnnnnnnnnnnnnnnnnnnnnnnnnnnnnnnnnnnnnnnnnnnnnnnnnnnnnnnnnnnnnnnnnnnnnnnnnnnnnnnnnnnnnnnnnnnnnnnnnnnnnnnnnnnnnnnnnnnnnnnnnnnnnnnnnnnnnnnnnnnnnnnnnnnnnnnnnnnnnnnnnnnnnnnnnnnnnnnnnnnnnnnnnnnnnnnnnnnnnnnnnnnnnnnnnnnnnnnnnnnnnnnnnnnnnnnnnnnnnnnnnnnnnnnnnnnnnnnnnnnnnnnnnnnnnnnnnnnnnnnnnnnnnnnnnnnnnnnnnnnnnnnnnnnnnnnnnnnnnnnnnnnnnnnnnnnnnnnnnnnnnnnnnnnnnnnnnnnnnnnnnnnnnnnnnnnnnnnnnnnnnnnnnnnnnnnnnnnnnnnnnnnnnnnnnnnnnnnnnnnnnnnnnnnnnnnnnnnnnnnnnnnnnnnnnnnnnnnnnnnnnnnnnnnnnnnnnnnnnnnnnnnnnnnnnnnnnnnnnnnnnnnnnnnnnnnnnnnnnnnnnnnnnnnnnnnnnnnnnnnnnnnnnnnnnnnnnnnnnnnnnnnnnnnnnnnnnnnnnnnnnnnnnnnnnnnnnnnnnnnnnnnnnnnnnnnnnnnnnnnnnnnnnnnnnnnnnnnnnnnnnnnnnnnnnnnnnnnnnnnnnnnnnnnnnnnnnnnnnnnnnnnnnnnnnnnnnnnnnnnnnnnnnnnnnnnnnnnnnnnnnnnnnnnnnnnnnnnnnnnnnnnnnnnnnnnnnnnnnnnnnnnnnnnnnnnnnnnnnnnnnnnnnnnnnnnnnnnnnnnnnnnnnnnnnnnnnnnnnnnnnnnnnnnnnnnnnnnnnnnnnnnnnnnnnnnnnnnnnnnnnnnnnnnnnnnnnnnnnnnnnnnnnnnnnnnnnnnnnnnnnnnnnnnnnnnnnnnnnnnnnnnnnnnnnnnnnnnnnnnnnnnnnnnnnnnnnnnnnnnnnnnnnnnnnnnnnnnnnnnnnnnnnnnnnnnnnnnnnnnnnnnnnnnnnnnnnnnnnnnnnnnnnnnnnnnnnnnnnnnnnnnnnnnnnnnnnnnnnnnnnnnnnnnnnnnnnnnnnnnnnnnnnnnnnnnnnnnnnnnnnnnnnnnnnnnnnnnnnnnnnnnnnnnnnnnnnnnnnnnnnnnnnnnnnnnnnnnnnnnnnnnnnnnnnnnnnnnnnnnnnnnnnnnnnnnnnnnnnnnnnnnnnnnnnnnnnnnnnnnnnnnnnnnnnnnnnnnnnnnnnnnnnnnnnnnnnnnnnnnnnnnnnnnnnnnnnnnnnnnnnnnnnnnnnnnnnnnnnnnnnnnnnnnnnnnnnnnnnnnnnnnnnnnnnnnnnnnnnnnnnnnnnnnnnnnnnnnnnnnnnnnnnnnnnnnnnnnnnnnnnnnnnnnnnnnnnnnnnnnnnnnnnnnnnnnnnnnnnnnnnnnnnnnnnnnnnnnnnnnnnnnnnnnnnnnnnnnnnnnnnnnnnnnnnnnnnnnnnnnnnnnnnnnnnnnnnnnnnnnnnnnnnnnnnnnnnnnnnnnnnnnnnnnnnnnnnnnnnnnnnnnnnnnnnnnnnnnnnnnnnnnnnnnnnnnnnnnnnnnnnnnnnnnnnnnnnnnnnnnnnnnnnnnnnnnnnnnnnnnnnnnnnnnnnnnnnnnnnnnnnnnnnnnnnnnnnnnnnnnnnnnnnnnnnnnnnnnnnnnnnnnnnnnnnnnnnnnnnnnnnnnnnnnnnnnnnnnnnnnnnnnnnnnnnnnnnnnnnnnnnnnnnnnnnnnnnnnnnnnnnnnnnnnnnnnnnnnnnnnnnnnnnnnnnnnnnnnnnnnnnnnnnnnnnnnnnnnnnnnnnnnnnnnnnnnnnnnnnnnnnnnnnnnnnnnnnnnnnnnnnnnnnnnnnnnnnnnnnnnnnnnnnnnnnnnnnnnnnnnnnnnnnnnnnnnnnnnnnnnnnnnnnnnnnnnnnnnnnnnnnnnnnnnnnnnnnnnnnnnnnnnnnnnnnnnnnnnnnnnnnnnnnnnnnnnnnnnnnnnnnnnnnnnnnnnnnnnnnnnnnnnnnnnnnnnnnnnnnnnnnnnnnnnnnnnnnnnnnnnnnnnnnnnnnnnnnnnnnnnnnnnnnnnnnnnnnnnnnnnnnnnnnnnnnnnnnnnnnnnnnnnnnnnnnnnnnnnnnnnnnnnnnnnnnnnnnnnnnnnnnnnnnnnnnnnnnnnnnnnnnnnnnnnnnnnnnnnnnnnnnnnnnnnnnnnnnnnnnnnnnnnnnnnnnnnnnnnnnnnnnnnnnnnnnnnnnnnnnnnnnnnnnnnnnnnnnnnnnnnnnnnnnnnnnnnnnnnnnnnnnnnnnnnnnnnnnnnnnnnnnnnnnnnnnnnnnnnnnnnnnnnnnnnnnnnnnnnnnnnnnnnnnnnnnnnnnnnnnnnnnnnnnnnnnnnnnnnnnnnnnnnnnnnnnnnnnnnnnnnnnnnnnnnnnnnnnnnnnnnnnnnnnnnnnnnnnnnnnnnnnnnnnnnnnnnnnnnnnnnnnnnnnnnnnnnnnnnnnnnnnnnnnnnnnnnnnnnnnnnnnnnnnnnnnnnnnnnnnnnnnnnnnnnnnnnnnnnnnnnnnnnnnnnnnnnnnnnnnnnnnnnnnnnnnnnnnnnnnnnnnnnnnnnnnnnnnnnnnnnnnnnnnnnnnnnnnnnnnnnnnnnnnnnnnnnnnnnnnnnnnnnnnnnnnnnnnnnnnnnnnnnnnnnnnnnnnnnnnnnnnnnnnnnnnnnnnnnnnnnnnnnnnnnnnnnnnnnnnnnnnnnnnnnnnnnnnnnnnnnnnnnnnnnnnnnnnnnnnnnnnnnnnnnnnnnnnnnnnnnnnnnnnnnnnnnnnnnnnnnnnnnnnnnnnnnnnnnnnnnnnnnnnnnnnnnnnnnnnnnnnnnnnnnnnnnnnnnnnnnnnnnnnnnnnnnnnnnnnnnnnnnnnnnnnnnnnnnnnnnnnnnnnnnnnnnnnnnnnnnnnnnnnnnnnnnnnnnnnnnnnnnnnnnnnnnnnnnnnnnnnnnnnnnnnnnnnnnnnnnnnnnnnnnnnnnnnnnnnnnnnnnnnnnnnnnnnnnnnnnnnnnnnnnnnnnnnnnnnnnnnnnnnnnnnnnnnnnnnnnnnnnnnnnnnnnnnnnnnnnnnnnnnnnnnnnnnnnnnnnnnnnnnnnnnnnnnnnnnnnnnnnnnnnnnnnnnnnnnnnnnnnnnnnnnnnnnnnnnnnnnnnnnnnnnnnnnnnnnnnnnnnnnnnnnnnnnnnnnnnnnnnnnnnnnnnnnnnnnnnnnnnnnnnnnnnnnnnnnnnnnnnnnnnnnnnnnnnnnnnnnnnnnnnnnnnnnnnnnnnnnnnnnnnnnnnnnnnnnnnnnnnnnnnnnnnnnnnnnnnnnnnnnnnnnnnnnnnnnnnnnnnnnnnnnnnnnnnnnnnnnnnnnnnnnnnnnnnnnnnnnnnnnnnnnnnnnnnnnnnnnnnnnnnnnnnnnnnnnnnnnnnnnnnnnnnnnnnnnnnnnnnnnnnnnnnnnnnnnnnnnnnnnnnnnnnnnnnnnnnnnnnnnnnnnnnnnnnnnnnnnnnnnnnnnnnnnnnnnnnnnnnnnnnnnnnnnnnnnnnnnnnnnnnnnnnnnnnnnnnnnnnnnnnnnnnnnnnnnnnnnnnnnnnnnnnnnnnnnnnnnnnnnnnnnnnnnnnnnnnnnnnnnnnnnnnnnnnnnnnnnnnnnnnnnnnnnnnnnnnnnnnnnnnnnnnnnnnnnnnnnnnnnnnnnnnnnnnnnnnnnnnnnnnnnnnnnnnnnnnnnnnnnnnnnnnnnnnnnnnnnnnnnnnnnnnnnnnnnnnnnnnnnnnnnnnnnnnnnnnnnnnnnnnnnnnnnnnnnnnnnnnnnnnnnnnnnnnnnnnnnnnnnnnnnnnnnnnnnnnnnnnnnnnnnnnnnnnnnnnnnnnnnnnnnnnnnnnnnnnnnnnnnnnnnnnnnnnnnnnnnnnnnnnnnnnnnnnnnnnnnnnnnnnnnnnnnnnnnnnnnnnnnnnnnnnnnnnnnnnnnnnnnnnnnnnnnnnnnnnnnnnnnnnnnnnnnnnnnnnnnnnnnnnnnnnnnnnnnnnnnnnnnnnnnnnnnnnnnnnnnnnnnnnnnnnnnnnnnnnnnnnnnnnnnnnnnnnnnnnnnnnnnnnnnnnnnnnnnnnnnnnnnnnnnnnnnnnnnnnnnnnnnnnnnnnnnnnnnnnnnnnnnnnnnnnnnnnnnnnnnnnnnnnnnnnnnnnnnnnnnnnnnnnnnnnnnnnnnnnnnnnnnnnnnnnnnnnnnnnnnnnnnnnnnnnnnnnnnnnnnnnnnnnnnnnnnnnnnnnnnnnnnnnnnnnnnnnnnnnnnnnnnnnnnnnnnnnnnnnnnnnnnnnnnnnnnnnnnnnnnnnnnnnnnnnnnnnnnnnnnnnnnnnnnnnnnnnnnnnnnnnnnnnnnnnnnnnnnnnnnnnnnnnnnnnnnnnnnnnnnnnnnnnnnnnnnnnnnnnnnnnnnnnnnnnnnnnnnnnnnnnnnnnnnnnnnnnnnnnnnnnnnnnnnnnnnnnnnnnnnnnnnnnnnnnnnnnnnnnnnnnnnnnnnnnnnnnnnnnnnnnnnnnnnnnnnnnnnnnnnnnnnnnnnnnnnnnnnnnnnnnnnnnnnnnnnnnnnnnnnnnnnnnnnnnnnnnnnnnnnnnnnnnnnnnnnnnnnnnnnnnnnnnnnnnnnnnnnnnnnnnnnnnnnnnnnnnnnnnnnnnnnnnnnnnnnnnnnnnnnnnnnnnnnnnnnnnnnnnnnnnnnnnnnnnnnnnnnnnnnnnnnnnnnnnnnnnnnnnnnnnnnnnnnnnnnnnnnnnnnnnnnnnnnnnnnnnnnnnnnnnnnnnnnnnnnnnnnnnnnnnnnnnnnnnnnnnnnnnnnnnnnnnnnnnnnnnnnnnnnnnnnnnnnnnnnnnnnnnnnnnnnnnnnnnnnnnnnnnnnnnnnnnnnnnnnnnnnnnnnnnnnnnnnnnnnnnnnnnnnnnnnnnnnnnnnnnnnnnnnnnnnnnnnnnnnnnnnnnnnnnnnnnnnnnnnnnnnnnnnnnnnnnnnnnnnnnnnnnnnnnnnnnnnnnnnnnnnnnnnnnnnnnnnnnnnnnnnnnnnnnnnnnnnnnnnnnnnnnnnnnnnnnnnnnnnnnnnnnnnnnnnnnnnnnnnnnnnnnnnnnnnnnnnnnnnnnnnnnnnnnnnnnnnnnnnnnnnnnnnnnnnnnnnnnnnnnnnnnnnnnnnnnnnnnnnnnnnnnnnnnnnnnnnnnnnnnnnnnnnnnnnnnnnnnnnnnnnnnnnnnnnnnnnnnnnnnnnnnnnnnnnnnnnnnnnnnnnnnnnnnnnnnnnnnnnnnnnnnnnnnnnnnnnnnnnnnnnnnnnnnnnnnnnnnnnnnnnnnnnnnnnnnnnnnnnnnnnnnnnnnnnnnnnnnnnnnnnnnnnnnnnnnnnnnnnnnnnnnnnnnnnnnnnnnnnnnnnnnnnnnnnnnnnnnnnnnnnnnnnnnnnnnnnnnnnnnnnnnnnnnnnnnnnnnnnnnnnnnnnnnnnnnnnnnnnnnnnnnnnnnnnnnnnnnnnnnnnnnnnnnnnnnnnnnnnnnnnnnnnnnnnnnnnnnnnnnnnnnnnnnnnnnnnnnnnnnnnnnnnnnnnnnnnnnnnnnnnnnnnnnnnnnnnnnnnnnnnnnnnnnnnnnnnnnnnnnnnnnnnnnnnnnnnnnnnnnnnnnnnnnnnnnnnnnnnnnnnnnnnnnnnnnnnnnnnnnnnnnnnnnnnnnnnnnnnnnnnnnnnnnnnnnnnnnnnnnnnnnnnnnnnnnnnnnnnnnnnnnnnnnnnnnnnnnnnnnnnnnnnnnnnnnnnnnnnnnnnnnnnnnnnnnnnnnnnnnnnnnnnnnnnnnnnnnnnnnnnnnnnnnnnnnnnnnnnnnnnnnnnnnnnnnnnnnnnnnnnnnnnnnnnnnnnnnnnnnnnnnnnnnnnnnnnnnnnnnnnnnnnnnnnnnnnnnnnnnnnnnnnnnnnnnnnnnnnnnnnnnnnnnnnnnnnnnnnnnnnnnnnnnnnnnnnnnnnnnnnnnnnnnnnnnnnnnnnnnnnnnnnnnnnnnnnnnnnnnnnnnnnnnnnnnnnnnnnnnnnnnnnnnnnnnnnnnnnnnnnnnnnnnnnnnnnnnnnnnnnnnnnnnnnnnnnnnnnnnnnnnnnnnnnnnnnnnnnnnnnnnnnnnnnnnnnnnnnnnnnnnnnnnnnnnnnnnnnnnnnnnnnnnnnnnnnnnnnnnnnnnnnnnnnnnnnnnnnnnnnnnnnnnnnnnnnnnnnnnnnnnnnnnnnnnnnnnnnnnnnnnnnnnnnnnnnnnnnnnnnnnnnnnnnnnnnnnnnnnnnnnnnnnnnnnnnnnnnnnnnnnnnnnnnnnnnnnnnnnnnnnnnnnnnnnnnnnnnnnnnnnnnnnnnnnnnnnnnnnnnnnnnnnnnnnnnnnnnnnnnnnnnnnnnnnnnnnnnnnnnnnnnnnnnnnnnnnnnnnnnnnnnnnnnnnnnnnnnnnnnnnnnnnnnnnnnnnnnnnnnnnnnnnnnnnnnnnnnnnnnnnnnnnnnnnnnnnnnnnnnnnnnnnnnnnnnnnnnnnnnnnnnnnnnnnnnnnnnnnnnnnnnnnnnnnnnnnnnnnnnnnnnnnnnnnnnnnnnnnnnnnnnnnnnnnnnnnnnnnnnnnnnnnnnnnnnnnnnnnnnnnnnnnnnnnnnnnnnnnnnnnnnnnnnnnnnnnnnnnnnnnnnnnnnnnnnnnnnnnnnnnnnnnnnnnnnnnnnnnnnnnnnnnnnnnnnnnnnnnnnnnnnnnnnnnnnnnnnnnnnnnnnnnnnnnnnnnnnnnnnnnnnnnnnnnnnnnnnnnnnnnnnnnnnnnnnnnnnnnnnnnnnnnnnnnnnnnnnnnnnnnnnnnnnnnnnnnnnnnnnnnnnnnnnnnnnnnnnnnnnnnnnnnnnnnnnnnnnnnnnnnnnnnnnnnnnnnnnnnnnnnnnnnnnnnnnnnnnnnnnnnnnnnnnnnnnnnnnnnnnnnnnnnnnnnnnnnnnnnnnnnnnnnnnnnnnnnnnnnnnnnnnnnnnnnnnnnnnnnnnnnnnnnnnnnnnnnnnnnnnnnnnnnnnnnnnnnnnnnnnnnnnnnnnnnnnnnnnnnnnnnnnnnnnnnnnnnnnnnnnnnnnnnnnnnnnnnnnnnnnnnnnnnnnnnnnnnnnnnnnnnnnnnnnnnnnnnnnnnnnnnnnnnnnnnnnnnnnnnnnnnnnnnnnnnnnnnnnnnnnnnnnnnnnnnnnnnnnnnnnnnnnnnnnnnnnnnnnnnnnnnnnnnnnnnnnnnnnnnnnnnnnnnnnnnnnnnnnnnnnnnnnnnnnnnnnnnnnnnnnnnnnnnnnnnnnnnnnnnnnnnnnnnnnnnnnnnnnnnnnnnnnnnnnnnnnnnnnnnnnnnnnnnnnnnnnnnnnnnnnnnnnnnnnnnnnnnnnnnnnnnnnnnnnnnnnnnnnnnnnnnnnnnnnnnnnnnnnnnnnnnnnnnnnnnnnnnnnnnnnnnnnnnnnnnnnnnnnnnnnnnnnnnnnnnnnnnnnnnnnnnnnnnnnnnnnnnnnnnnnnnnnnnnnnnnnnnnnnnnnnnnnnnnnnnnnnnnnnnnnnnnnnnnnnnnnnnnnnnnnnnnnnnnnnnnnnnnnnnnnnnnnnnnnnnnnnnnnnnnnnnnnnnnnnnnnnnnnnnnnnnnnnnnnnnnnnnnnnnnnnnnnnnnnnnnnnnnnnnnnnnnnnnnnnnnnnnnnnnnnnnnnnnnnnnnnnnnnnnnnnnnnnnnnnnnnnnnnnnnnnnnnnnnnnnnnnnnnnnnnnnnnnnnnnnnnnnnnnnnnnnnnnnnnnnnnnnnnnnnnnnnnnnnnnnnnnnnnnnnnnnnnnnnnnnnnnnnnnnnnnnnnnnnnnnnnnnnnnnnnnnnnnnnnnnnnnnnnnnnnnnnnnnnnnnnnnnnnnnnnnnnnnnnnnnnnnnnnnnnnnnnnnnnnnnnnnnnnnnnnnnnnnnnnnnnnnnnnnnnnnnnnnnnnnnnnnnnnnnnnnnnnnnnnnnnnnnnnnnnnnnnnnnnnnnnnnnnnnnnnnnnnnnnnnnnnnnnnnnnnnnnnnnnnnnnnnnnnnnnnnnnnnnnnnnnnnnnnnnnnnnnnnnnnnnnnnnnnnnnnnnnnnnnnnnnnnnnnnnnnnnnnnnnnnnnnnnnnnnnnnnnnnnnnnnnnnnnnnnnnnnnnnnnnnnnnnnnnnnnnnnnnnnnnnnnnnnnnnnnnnnnnnnnnnnnnnnnnnnnnnnnnnnnnnnnnnnnnnnnnnnnnnnnnnnnnnnnnnnnnnnnnnnnnnnnnnnnnnnnnnnnnnnnnnnnnnnnnnnnnnnnnnnnnnnnnnnnnnnnnnnnnnnnnnnnnnnnnnnnnnnnnnnnnnnnnnnnnnnnnnnnnnnnnnnnnnnnnnnnnnnnnnnnnnnnnnnnnnnnnnnnnnnnnnnnnnnnnnnnnnnnnnnnnnnnnnnnnnnnnnnnnnnnnnnnnnnnnnnnnnnnnnnnnnnnnnnnnnnnnnnnnnnnnnnnnnnnnnnnnnnnnnnnnnnnnnnnnnnnnnnnnnnnnnnnnnnnnnnnnnnnnnnnnnnnnnnnnnnnnnnnnnnnnnnnnnnnnnnnnnnnnnnnnnnnnnnnnnnnnnnnnnnnnnnnnnnnnnnnnnnnnnnnnnnnnnnnnnnnnnnnnnnnnnnnnnnnnnnnnnnnnnnnnnnnnnnnnnnnnnnnnnnnnnnnnnnnnnnnnnnnnnnnnnnnnnnnnnnnnnnnnnnnnnnnnnnnnnnnnnnnnnnnnnnnnnnnnnnnnnnnnnnnnnnnnnnnnnnnnnnnnnnnnnnnnnnnnnnnnnnnnnnnnnnnnnnnnnnnnnnnnnnnnnnnnnnnnnnnnnnnnnnnnnnnnnnnnnnnnnnnnnnnnnnnnnnnnnnnnnnnnnnnnnnnnnnnnnnnnnnnnnnnnnnnnnnnnnnnnnnnnnnnnnnnnnnnnnnnnnnnnnnnnnnnnnnnnnnnnnnnnnnnnnnnnnnnnnnnnnnnnnnnnnnnnnnnnnnnnnnnnnnnnnnnnnnnnnnnnnnnnnnnnnnnnnnnnnnnnnnnnnnnnnnnnnnnnnnnnnnnnnnnnnnnnnnnnnnnnnnnnnnnnnnnnnnnnnnnnnnnnnnnnnnnnnnnnnnnnnnnnnnnnnnnnnnnnnnnnnnnnnnnnnnnnnnnnnnnnnnnnnnnnnnnnnnnnnnnnnnnnnnnnnnnnnnnnnnnnnnnnnnnnnnnnnnnnnnnnnnnnnnnnnnnnnnnnnnnnnnnnnnnnnnnnnnnnnnnnnnnnnnnnnnnnnnnnnnnnnnnnnnnnnnnnnnnnnnnnnnnnnnnnnnnnnnnnnnnnnnnnnnnnnnnnnnnnnnnnnnnnnnnnnnnnnnnnnnnnnnnnnnnnnnnnnnnnnnnnnnnnnnnnnnnnnnnnnnnnnnnnnnnnnnnnnnnnnnnnnnnnnnnnnnnnnnnnnnnnnnnnnnnnnnnnnnnnnnnnnnnnnnnnnnnnnnnnnnnnnnnnnnnnnnnnnnnnnnnnnnnnnnnnnnnnnnnnnnnnnnnnnnnnnnnnnnnnnnnnnnnnnnnnnnnnnnnnnnnnnnnnnnnnnnnnnnnnnnnnnnnnnnnnnnnnnnnnnnnnnnnnnnnnnnnnnnnnnnnnnnnnnnnnnnnnnnnnnnnnnnnnnnnnnnnnnnnnnnnnnnnnnnnnnnnnnnnnnnnnnnnnnnnnnnnnnnnnnnnnnnnnnnnnnnnnnnnnnnnnnnnnnnnnnnnnnnnnnnnnnnnnnnnnnnnnnnnnnnnnnnnnnnnnnnnnnnnnnnnnnnnnnnnnnnnnnnnnnnnnnnnnnnnnnnnnnnnnnnnnnnnnnnnnnnnnnnnnnnnnnnnnnnnnnnnnnnnnnnnnnnnnnnnnnnnnnnnnnnnnnnnnnnnnnnnnnnnnnnnnnnnnnnnnnnnnnnnnnnnnnnnnnnnnnnnnnnnnnnnnnnnnnnnnnnnnnnnnnnnnnnnnnnnnnnnnnnnnnnnnnnnnnnnnnnnnnnnnnnnnnnnnnnnnnnnnnnnnnnnnnnnnnnnnnnnnnnnnnnnnnnnnnnnnnnnnnnnnnnnnnnnnnnnnnnnnnnnnnnnnnnnnnnnnnnnnnnnnnnnnnnnnnnnnnnnnnnnnnnnnnnnnnnnnnnnnnnnnnnnnnnnnnnnnnnnnnnnnnnnnnnnnnnnnnnnnnnnnnnnnnnnnnnnnnnnnnnnnnnnnnnnnnnnnnnnnnnnnnnnnnnnnnnnnnnnnnnnnnnnnnnnnnnnnnnnnnnnnnnnnnnnnnnnnnnnnnnnnnnnnnnnnnnnnnnnnnnnnnnnnnnnnnnnnnnnnnnnnnnnnnnnnnnnnnnnnnnnnnnnnnnnnnnnnnnnnnnnnnnnnnnnnnnnnnnnnnnnnnnnnnnnnnnnnnnnnnnnnnnnnnnnnnnnnnnnnnnnnnnnnnnnnnnnnnnnnnnnnnnnnnnnnnnnnnnnnnnnnnnnnnnnnnnnnnnnnnnnnnnnnnnnnnnnnnnnnnnnnnnnnnnnnnnnnnnnnnnnnnnnnnnnnnnnnnnnnnnnnnnnnnnnnnnnnnnnnnnnnnnnnnnnnnnnnnnnnnnnnnnnnnnnnnnnnnnnnnnnnnnnnnnnnnnnnnnnnnnnnnnnnnnnnnnnnnnnnnnnnnnnnnnnnnnnnnnnnnnnnnnnnnnnnnnnnnnnnnnnnnnnnnnnnnnnnnnnnnnnnnnnnnnnnnnnnnnnnnnnnnnnnnnnnnnnnnnnnnnnnnnnnnnnnnnnnnnnnnnnnnnnnnnnnnnnnnnnnnnnnnnnnnnnnnnnnnnnnnnnnnnnnnnnnnnnnnnnnnnnnnnnnnnnnnnnnnnnnnnnnnnnnnnnnnnnnnnnnnnnnnnnnnnnnnnnnnnnnnnnnnnnnnnnnnnnnnnnnnnnnnnnnnnnnnnnnnnnnnnnnnnnnnnnnnnnnnnnnnnnnnnnnnnnnnnnnnnnnnnnnnnnnnnnnnnnnnnnnnnnnnnnnnnnnnnnnnnnnnnnnnnnnnnnnnnnnnnnnnnnnnnnnnnnnnnnnnnnnnnnnnnnnnnnnnnnnnnnnnnnnnnnnnnnnnnnnnnnnnnnnnnnnnnnnnnnnnnnnnnnnnnnnnnnnnnnnnnnnnnnnnnnnnnnnnnnnnnnnnnnnnnnnnnnnnnnnnnnnnnnnnnnnnnnnnnnnnnnnnnnnnnnnnnnnnnnnnnnnnnnnnnnnnnnnnnnnnnnnnnnnnnnnnnnnnnnnnnnnnnnnnnnnnnnnnnnnnnnnnnnnnnnnnnnnnnnnnnnnnnnnnnnnnnnnnnnnnnnnnnnnnnnnnnnnnnnnnnnnnnnnnnnnnnnnnnnnnnnnnnnnnnnnnnnnnnnnnnnnnnnnnnnnnnnnnnnnnnnnnnnnnnnnnnnnnnnnnnnnnnnnnnnnnnnnnnnnnnnnnnnnnnnnnnnnnnnnnnnnnnnnnnnnnnnnnnnnnnnnnnnnnnnnnnnnnnnnnnnnnnnnnnnnnnnnnnnnnnnnnnnnnnnnnnnnnnnnnnnnnnnnnnnnnnnnnnnnnnnnnnnnnnnnnnnnnnnnnnnnnnnnnnnnnnnnnnnnnnnnnnnnnnnnnnnnnnnnnnnnnnnnnnnnnnnnnnnnnnnnnnnnnnnnnnnnnnnnnnnnnnnnnnnnnnnnnnnnnnnnnnnnnnnnnnnnnnnnnnnnnnnnnnnnnnnnnnnnnnnnnnnnnnnnnnnnnnnnnnnnnnnnnnnnnnnnnnnnnnnnnnnnnnnnnnnnnnnnnnnnnnnnnnnnnnnnnnnnnnnnnnnnnnnnnnnnnnnnnnnnnnnnnnnnnnnnnnnnnnnnnnnnnnnnnnnnnnnnnnnnnnnnnnnnnnnnnnnnnnnnnnnnnnnnnnnnnnnnnnnnnnnnnnnnnnnnnnnnnnnnnnnnnnnnnnnnnnnnnnnnnnnnnnnnnnnnnnnnnnnnnnnnnnnnnnnnnnnnnnnnnnnnnnnnnnnnnnnnnnnnnnnnnnnnnnnnnnnnnnnnnnnnnnnnnnnnnnnnnnnnnnnnnnnnnnnnnnnnnnnnnnnnnnnnnnnnnnnnnnnnnnnnnnnnnnnnnnnnnnnnnnnnnnnnnnnnnnnnnnnnnnnnnnnnnnnnnnnnnnnnnnnnnnnnnnnnnnnnnnnnnnnnnnnnnnnnnnnnnnnnnnnnnnnnnnnnnnnnnnnnnnnnnnnnnnnnnnnnnnnnnnnnnnnnnnnnnnnnnnnnnnnnnnnnnnnnnnnnnnnnnnnnnnnnnnnnnnnnnnnnnnnnnnnnnnnnnnnnnnnnnnnnnnnnnnnnnnnnnnnnnnnnnnnnnnnnnnnnnnnnnnnnnnnnnnnnnnnnnnnnnnnnnnnnnnnnnnnnnnnnnnnnnnnnnnnnnnnnnnnnnnnnnnnnnnnnnnnnnnnnnnnnnnnnnnnnnnnnnnnnnnnnnnnnnnnnnnnnnnnnnnnnnnnnnnnnnnnnnnnnnnnnnnnnnnnnnnnnnnnnnnnnnnnnnnnnnnnnnnnnnnnnnnnnnnnnnnnnnnnnnnnnnnnnnnnnnnnnnnnnnnnnnnnnnnnnnnnnnnnnnnnnnnnnnnnnnnnnnnnnnnnnnnnnnnnnnnnnnnnnnnnnnnnnnnnnnnnnnnnnnnnnnnnnnnnnnnnnnnnnnnnnnnnnnnnnnnnnnnnnnnnnnnnnnnnnnnnnnnnnnnnnnnnnnnnnnnnnnnnnnnnnnnnnnnnnnnnnnnnnnnnnnnnnnnnnnnnnnnnnnnnnnnnnnnnnnnnnnnnnnnnnnnnnnnnnnnnnnnnnnnnnnnnnnnnnnnnnnnnnnnnnnnnnnnnnnnnnnnnnnnnnnnnnnnnnnnnnnnnnnnnnnnnnnnnnnnnnnnnnnnnnnnnnnnnnnnnnnnnnnnnnnnnnnnnnnnnnnnnnnnnnnnnnnnnnnnnnnnnnnnnnnnnnnnnnnnnnnnnnnnnnnnnnnnnnnnnnnnnnnnnnnnnnnnnnnnnnnnnnnnnnnnnnnnnnnnnnnnnnnnnnnnnnnnnnnnnnnnnnnnnnnnnnnnnnnnnnnnnnnnnnnnnnnnnnnnnnnnnnnnnnnnnnnnnnnnnnnnnnnnnnnnnnnnnnnnnnnnnnnnnnnnnnnnnnnnnnnnnnnnnnnnnnnnnnnnnnnnnnnnnnnnnnnnnnnnnnnnnnnnnnnnnnnnnnnnnnnnnnnnnnnnnnnnnnnnnnnnnnnnnnnnnnnnnnnnnnnnnnnnnnnnnnnnnnnnnnnnnnnnnnnnnnnnnnnnnnnnnnnnnnnnnnnnnnnnnnnnnnnnnnnnnnnnnnnnnnnnnnnnnnnnnnnnnnnnnnnnnnnnnnnnnnnnnnnnnnnnnnnnnnnnnnnnnnnnnnnnnnnnnnnnnnnnnnnnnnnnnnnnnnnnnnnnnnnnnnnnnnnnnnnnnnnnnnnnnnnnnnnnnnnnnnnnnnnnnnnnnnnnnnnnnnnnnnnnnnnnnnnnnnnnnnnnnnnnnnnnnnnnnnnnnnnnnnnnnnnnnnnnnnnnnnnnnnnnnnnnnnnnnnnnnnnnnnnnnnnnnnnnnnnnnnnnnnnnnnnnnnnnnnnnnnnnnnnnnnnnnnnnnnnnnnnnnnnnnnnnnnnnnnnnnnnnnnnnnnnnnnnnnnnnnnnnnnnnnnnnnnnnnnnnnnnnnnnnnnnnnnnnnnnnnnnnnnnnnnnnnnnnnnnnnnnnnnnnnnnnnnnnnnnnnnnnnnnnnnnnnnnnnnnnnnnnnnnnnnnnnnnnnnnnnnnnnnnnnnnnnnnnnnnnnnnnnnnnnnnnnnnnnnnnnnnnnnnnnnnnnnnnnnnnnnnnnnnnnnnnnnnnnnnnnnnnnnnnnnnnnnnnnnnnnnnnnnnnnnnnnnnnnnnnnnnnnnnnnnnnnnnnnnnnnnnnnnnnnnnnnnnnnnnnnnnnnnnnnnnnnnnnnnnnnnnnnnnnnnnnnnnnnnnnnnnnnnnnnnnnnnnnnnnnnnnnnnnnnnnnnnnnnnnnnnnnnnnnnnnnnnnnnnnnnnnnnnnnnnnnnnnnnnnnnnnnnnnnnnnnnnnnnnnnnnnnnnnnnnnnnnnnnnnnnnnnnnnnnnnnnnnnnnnnnnnnnnnnnnnnnnnnnnnnnnnnnnnnnnnnnnnnnnnnnnnnnnnnnnnnnnnnnnnnnnnnnnnnnnnnnnnnnnnnnnnnnnnnnnnnnnnnnnnnnnnnnnnnnnnnnnnnnnnnnnnnnnnnnnnnnnnnnnnnnnnnnnnnnnnnnnnnnnnnnnnnnnnnnnnnnnnnnnnnnnnnnnnnnnnnnnnnnnnnnnnnnnnnnnnnnnnnnnnnnnnnnnnnnnnnnnnnnnnnnnnnnnnnnnnnnnnnnnnnnnnnnnnnnnnnnnnnnnnnnnnnnnnnnnnnnnnnnnnnnnnnnnnnnnnnnnnnnnnnnnnnnnnnnnnnnnnnnnnnnnnnnnnnnnnnnnnnnnnnnnnnnnnnnnnnnnnnnnnnnnnnnnnnnnnnnnnnnnnnnnnnnnnnnnnnnnnnnnnnnnnnnnnnnnnnnnnnnnnnnnnnnnnnnnnnnnnnnnnnnnnnnnnnnnnnnnnnnnnnnnnnnnnnnnnnnnnnnnnnnnnnnnnnnnnnnnnnnnnnnnnnnnnnnnnnnnnnnnnnnnnnnnnnnnnnnnnnnnnnnnnnnnnnnnnnnnnnnnnnnnnnnnnnnnnnnnnnnnnnnnnnnnnnnnnnnnnnnnnnnnnnnnnnnnnnnnnnnnnnnnnnnnnnnnnnnnnnnnnnnnnnnnnnnnnnnnnnnnnnnnnnnnnnnnnnnnnnnnnnnnnnnnnnnnnnnnnnnnnnnnnnnnnnnnnnnnnnnnnnnnnnnnnnnnnnnnnnnnnnnnnnnnnnnnnnnnnnnnnnnnnnnnnnnnnnnnnnnnnnnnnnnnnnnnnnnnnnnnnnnnnnnnnnnnnnnnnnnnnnnnnnnnnnnnnnnnnnnnnnnnnnnnnnnnnnnnnnnnnnnnnnnnnnnnnnnnnnnnnnnnnnnnnnnnnnnnnnnnnnnnnnnnnnnnnnnnnnnnnnnnnnnnnnnnnnnnnnnnnnnnnnnnnnnnnnnnnnnnnnnnnnnnnnnnnnnnnnnnnnnnnnnnnnnnnnnnnnnnnnnnnnnnnnnnnnnnnnnnnnnnnnnnnnnnnnnnnnnnnnnnnnnnnnnnnnnnnnnnnnnnnnnnnnnnnnnnnnnnnnnnnnnnnnnnnnnnnnnnnnnnnnnnnnnnnnnnnnnnnnnnnnnnnnnnnnnnnnnnnnnnnnnnnnnnnnnnnnnnnnnnnnnnnnnnnnnnnnnnnnnnnnnnnnnnnnnnnnnnnnnnnnnnnnnnnnnnnnnnnnnnnnnnnnnnnnnnnnnnnnnnnnnnnnnnnnnnnnnnnnnnnnnnnnnnnnnnnnnnnnnnnnnnnnnnnnnnnnnnnnnnnnnnnnnnnnnnnnnnnnnnnnnnnnnnnnnnnnnnnnnnnnnnnnnnnnnnnnnnnnnnnnnnnnnnnnnnnnnnnnnnnnnnnnnnnnnnnnnnnnnnnnnnnnnnnnnnnnnnnnnnnnnnnnnnnnnnnnnnnnnnnnnnnnnnnnnnnnnnnnnnnnnnnnnnnnnnnnnnnnnnnnnnnnnnnnnnnnnnnnnnnnnnnnnnnnnnnnnnnnnnnnnnnnnnnnnnnnnnnnnnnnnnnnnnnnnnnnnnnnnnnnnnnnnnnnnnnnnnnnnnnnnnnnnnnnnnnnnnnnnnnnnnnnnnnnnnnnnnnnnnnnnnnnnnnnnnnnnnnnnnnnnnnnnnnnnnnnnnnnnnnnnnnnnnnnnnnnnnnnnnnnnnnnnnnnnnnnnnnnnnnnnnnnnnnnnnnnnnnnnnnnnnnnnnnnnnnnnnnnnnnnnnnnnnnnnnnnnnnnnnnnnnnnnnnnnnnnnnnnnnnnnnnnnnnnnnnnnnnnnnnnnnnnnnnnnnnnnnnnnnnnnnnnnnnnnnnnnnnnnnnnnnnnnnnnnnnnnnnnnnnnnnnnnnnnnnnnnnnnnnnnnnnnnnnnnnnnnnnnnnnnnnnnnnnnnnnnnnnnnnnnnnnnnnnnnnnnnnnnnnnnnnnnnnnnnnnnnnnnnnnnnnnnnnnnnnnnnnnnnnnnnnnnnnnnnnnnnnnnnnnnnnnnnnnnnnnnnnnnnnnnnnnnnnnnnnnnnnnnnnnnnnnnnnnnnnnnnnnnnnnnnnnnnnnnnnnnnnnnnnnnnnnnnnnnnnnnnnnnnnnnnnnnnnnnnnnnnnnnnnnnnnnnnnnnnnnnnnnnnnnnnnnnnnnnnnnnnnnnnnnnnnnnnnnnnnnnnnnnnnnnnnnnnnnnnnnnnnnnnnnnnnnnnnnnnnnnnnnnnnnnnnnnnnnnnnnnnnnnnnnnnnnnnnnnnnnnnnnnnnnnnnnnnnnnnnnnnnnnnnnnnnnnnnnnnnnnnnnnnnnnnnnnnnnnnnnnnnnnnnnnnnnnnnnnnnnnnnnnnnnnnnnnnnnnnnnnnnnnnnnnnnnnnnnnnnnnnnnnnnnnnnnnnnnnnnnnnnnnnnnnnnnnnnnnnnnnnnnnnnnnnnnnnnnnnnnnnnnnnnnnnnnnnnnnnnnnnnnnnnnnnnnnnnnnnnnnnnnnnnnnnnnnnnnnnnnnnnnnnnnnnnnnnnnnnnnnnnnnnnnnnnnnnnnnnnnnnnnnnnnnnnnnnnnnnnnnnnnnnnnnnnnnnnnnnnnnnnnnnnnnnnnnnnnnnnnnnnnnnnnnnnnnnnnnnnnnnnnnnnnnnnnnnnnnnnnnnnnnnnnnnnnnnnnnnnnnnnnnnnnnnnnnnnnnnnnnnnnnnnnnnnnnnnnnnnnnnnnnnnnnnnnnnnnnnnnnnnnnnnnnnnnnnnnnnnnnnnnnnnnnnnnnnnnnnnnnnnnnnnnnnnnnnnnnnnnnnnnnnnnnnnnnnnnnnnnnnnnnnnnnnnnnnnnnnnnnnnnnnnnnnnnnnnnnnnnnnnnnnnnnnnnnnnnnnnnnnnnnnnnnnnnnnnnnnnnnnnnnnnnnnnnnnnnnnnnnnnnnnnnnnnnnnnnnnnnnnnnnnnnnnnnnnnnnnnnnnnnnnnnnnnnnnnnnnnnnnnnnnnnnnnnnnnnnnnnnnnnnnnnnnnnnnnnnnnnnnnnnnnnnnnnnnnnnnnnnnnnnnnnnnnnnnnnnnnnnnnnnnnnnnnnnnnnnnnnnnnnnnnnnnnnnnnnnnnnnnnnnnnnnnnnnnnnnnnnnnnnnnnnnnnnnnnnnnnnnnnnnnnnnnnnnnnnnnnnnnnnnnnnnnnnnnnnnnnnnnnnnnnnnnnnnnnnnnnnnnnnnnnnnnnnnnnnnnnnnnnnnnnnnnnnnnnnnnnnnnnnnnnnnnnnnnnnnnnnnnnnnnnnnnnnnnnnnnnnnnnnnnnnnnnnnnnnnnnnnnnnnnnnnnnnnnnnnnnnnnnnnnnnnnnnnnnnnnnnnnnnnnnnnnnnnnnnnnnnnnnnnnnnnnnnnnnnnnnnnnnnnnnnnnnnnnnnnnnnnnnnnnnnnnnnnnnnnnnnnnnnnnnnnnnnnnnnnnnnnnnnnnnnnnnnnnnnnnnnnnnnnnnnnnnnnnnnnnnnnnnnnnnnnnnnnnnnnnnnnnnnnnnnnnnnnnnnnnnnnnnnnnnnnnnnnnnnnnnnnnnnnnnnnnnnnnnnnnnnnnnnnnnnnnnnnnnnnnnnnnnnnnnnnnnnnnnnnnnnnnnnnnnnnnnnnnnnnnnnnnnnnnnnnnnnnnnnnnnnnnnnnnnnnnnnnnnnnnnnnnnnnnnnnnnnnnnnnnnnnnnnnnnnnnnnnnnnnnnnnnnnnnnnnnnnnnnnnnnnnnnnnnnnnnnnnnnnnnnnnnnnnnnnnnnnnnnnnnnnnnnnnnnnnnnnnnnnnnnnnnnnnnnnnnnnnnnnnnnnnnnnnnnnnnnnnnnnnnnnnnnnnnnnnnnnnnnnnnnnnnnnnnnnnnnnnnnnnnnnnnnnnnnnnnnnnnnnnnnnnnnnnnnnnnnnnnnnnnnnnnnnnnnnnnnnnnnnnnnnnnnnnnnnnnnnnnnnnnnnnnnnnnnnnnnnnnnnnnnnnnnnnnnnnnnnnnnnnnnnnnnnnnnnnnnnnnnnnnnnnnnnnnnnnnnnnnnnnnnnnnnnnnnnnnnnnnnnnnnnnnnnnnnnnnnnnnnnnnnnnnnnnnnnnnnnnnnnnnnnnnnnnnnnnnnnnnnnnnnnnnnnnnnnnnnnnnnnnnnnnnnnnnnnnnnnnnnnnnnnnnnnnnnnnnnnnnnnnnnnnnnnnnnnnnnnnnnnnnnnnnnnnnnnnnnnnnnnnnnnnnnnnnnnnnnnnnnnnnnnnnnnnnnnnnnnnnnnnnnnnnnnnnnnnnnnnnnnnnnnnnnnnnnnnnnnnnnnnnnnnnnnnnnnnnnnnnnnnnnnnnnnnnnnnnnnnnnnnnnnnnnnnnnnnnnnnnnnnnnnnnnnnnnnnnnnnnnnnnnnnnnnnnnnnnnnnnnnnnnnnnnnnnnnnnnnnnnnnnnnnnnnnnnnnnnnnnnnnnnnnnnnnnnnnnnnnnnnnnnnnnnnnnnnnnnnnnnnnnnnnnnnnnnnnnnnnnnnnnnnnnnnnnnnnnnnnnnnnnnnnnnnnnnnnnnnnnnnnnnnnnnnnnnnnnnnnnnnnnnnnnnnnnnnnnnnnnnnnnnnnnnnnnnnnnnnnnnnnnnnnnnnnnnnnnnnnnnnnnnnnnnnnnnnnnnnnnnnnnnnnnnnnnnnnnnnnnnnnnnnnnnnnnnnnnnnnnnnnnnnnnnnnnnnnnnnnnnnnnnnnnnnnnnnnnnnnnnnnnnnnnnnnnnnnnnnnnnnnnnnnnnnnnnnnnnnnnnnnnnnnnnnnnnnnnnnnnnnnnnnnnnnnnnnnnnnnnnnnnnnnnnnnnnnnnnnnnnnnnnnnnnnnnnnnnnnnnnnnnnnnnnnnnnnnnnnnnnnnnnnnnnnnnnnnnnnnnnnnnnnnnnnnnnnnnnnnnnnnnnnnnnnnnnnnnnnnnnnnnnnnnnnnnnnnnnnnnnnnnnnnnnnnnnnnnnnnnnnnnnnnnnnnnnnnnnnnnnnnnnnnnnnnnnnnnnnnnnnnnnnnnnnnnnnnnnnnnnnnnnnnnnnnnnnnnnnnnnnnnnnnnnnnnnnnnnnnnnnnnnnnnnnnnnnnnnnnnnnnnnnnnnnnnnnnnnnnnnnnnnnnnnnnnnnnnnnnnnnnnnnnnnnnnnnnnnnnnnnnnnnnnnnnnnnnnnnnnnnnnnnnnnnnnnnnnnnnnnnnnnnnnnnnnnnnnnnnnnnnnnnnnnnnnnnnnnnnnnnnnnnnnnnnnnnnnnnnnnnnnnnnnnnnnnnnnnnnnnnnnnnnnnnnnnnnnnnnnnnnnnnnnnnnnnnnnnnnnnnnnnnnnnnnnnnnnnnnnnnnnnnnnnnnnnnnnnnnnnnnnnnnnnnnnnnnnnnnnnnnnnnnnnnnnnnnnnnnnnnnnnnnnnnnnnnnnnnnnnnnnnnnnnnnnnnnnnnnnnnnnnnnnnnnnnnnnnnnnnnnnnnnnnnnnnnnnnnnnnnnnnnnnnnnnnnnnnnnnnnnnnnnnnnnnnnnnnnnnnnnnnnnnnnnnnnnnnnnnnnnnnnnnnnnnnnnnnnnnnnnnnnnnnnnnnnnnnnnnnnnnnnnnnnnnnnnnnnnnnnnnnnnnnnnnnnnnnnnnnnnnnnnnnnnnnnnnnnnnnnnnnnnnnnnnnnnnnnnnnnnnnnnnnnnnnnnnnnnnnnnnnnnnnnnnnnnnnnnnnnnnnnnnnnnnnnnnnnnnnnnnnnnnnnnnnnnnnnnnnnnnnnnnnnnnnnnnnnnnnnnnnnnnnnnnnnnnnnnnnnnnnnnnnnnnnnnnnnnnnnnnnnnnnnnnnnnnnnnnnnnnnnnnnnnnnnnnnnnnnnnnnnnnnnnnnnnnnnnnnnnnnnnnnnnnnnnnnnnnnnnnnnnnnnnnnnnnnnnnnnnnnnnnnnnnnnnnnnnnnnnnnnnnnnnnnnnnnnnnnnnnnnnnnnnnnnnnnnnnnnnnnnnnnnnnnnnnnnnnnnnnnnnnnnnnnnnnnnnnnnnnnnnnnnnnnnnnnnnnnnnnnnnnnnnnnnnnnnnnnnnnnnnnnnnnnnnnnnnnnnnnnnnnnnnnnnnnnnnnnnnnnnnnnnnnnnnnnnnnnnnnnnnnnnnnnnnnnnnnnnnnnnnnnnnnnnnnnnnnnnnnnnnnnnnnnnnnnnnnnnnnnnnnnnnnnnnnnnnnnnnnnnnnnnnnnnnnnnnnnnnnnnnnnnnnnnnnnnnnnnnnnnnnnnnnnnnnnnnnnnnnnnnnnnnnnnnnnnnnnnnnnnnnnnnnnnnnnnnnnnnnnnnnnnnnnnnnnnnnnnnnnnnnnnnnnnnnnnnnnnnnnnnnnnnnnnnnnnnnnnnnnnnnnnnnnnnnnnnnnnnnnnnnnnnnnnnnnnnnnnnnnnnnnnnnnnnnnnnnnnnnnnnnnnnnnnnnnnnnnnnnnnnnnnnnnnnnnnnnnnnnnnnnnnnnnnnnnnnnnnnnnnnnnnnnnnnnnnnnnnnnnnnnnnnnnnnnnnnnnnnnnnnnnnnnnnnnnnnnnnnnnnnnnnnnnnnnnnnnnnnnnnnnnnnnnnnnnnnnnnnnnnnnnnnnnnnnnnnnnnnnnnnnnnnnnnnnnnnnnnnnnnnnnnnnnnnnnnnnnnnnnnnnnnnnnnnnnnnnnnnnnnnnnnnnnnnnnnnnnnnnnnnnnnnnnnnnnnnnnnnnnnnnnnnnnnnnnnnnnnnnnnnnnnnnnnnnnnnnnnnnnnnnnnnnnnnnnnnnnnnnnnnnnnnnnnnnnnnnnnnnnnnnnnnnnnnnnnnnnnnnnnnnnnnnnnnnnnnnnnnnnnnnnnnnnnnnnnnnnnnnnnnnnnnnnnnnnnnnnnnnnnnnnnnnnnnnnnnnnnnnnnnnnnnnnnnnnnnnnnnnnnnnnnnnnnnnnnnnnnnnnnnnnnnnnnnnnnnnnnnnnnnnnnnnnnnnnnnnnnnnnnnnnnnnnnnnnnnnnnnnnnnnnnnnnnnnnnnnnnnnnnnnnnnnnnnnnnnnnnnnnnnnnnnnnnnnnnnnnnnnnnnnnnnnnnnnnnnnnnnnnnnnnnnnnnnnnnnnnnnnnnnnnnnnnnnnnnnnnnnnnnnnnnnnnnnnnnnnnnnnnnnnnnnnnnnnnnnnnnnnnnnnnnnnnnnnnnnnnnnnnnnnnnnnnnnnnnnnnnnnnnnnnnnnnnnnnnnnnnnnnnnnnnnnnnnnnnnnnnnnnnnnnnnnnnnnnnnnnnnnnnnnnnnnnnnnnnnnnnnnnnnnnnnnnnnnnnnnnnnnnnnnnnnnnnnnnnnnnnnnnnnnnnnnnnnnnnnnnnnnnnnnnnnnnnnnnnnnnnnnnnnnnnnnnnnnnnnnnnnnnnnnnnnnnnnnnnnnnnnnnnnnnnnnnnnnnnnnnnnnnnnnnnnnnnnnnnnnnnnnnnnnnnnnnnnnnnnnnnnnnnnnnnnnnnnnnnnnnnnnnnnnnnnnnnnnnnnnnnnnnnnnnnnnnnnnnnnnnnnnnnnnnnnnnnnnnnnnnnnnnnnnnnnnnnnnnnnnnnnnnnnnnnnnnnnnnnnnnnnnnnnnnnnnnnnnnnnnnnnnnnnnnnnnnnnnnnnnnnnnnnnnnnnnnnnnnnnnnnnnnnnnnnnnnnnnnnnnnnnnnnnnnnnnnnnnnnnnnnnnnnnnnnnnnnnnnnnnnnnnnnnnnnnnnnnnnnnnnnnnnnnnnnnnnnnnnnnnnnnnnnnnnnnnnnnnnnnnnnnnnnnnnnnnnnnnnnnnnnnnnnnnnnnnnnnnnnnnnnnnnnnnnnnnnnnnnnnnnnnnnnnnnnnnnnnnnnnnnnnnnnnnnnnnnnnnnnnnnnnnnnnnnnnnnnnnnnnnnnnnnnnnnnnnnnnnnnnnnnnnnnnnnnnnnnnnnnnnnnnnnnnnnnnnnnnnnnnnnnnnnnnnnnnnnnnnnnnnnnnnnnnnnnnnnnnnnnnnnnnnnnnnnnnnnnnnnnnnnnnnnnnnnnnnnnnnnnnnnnnnnnnnnnnnnnnnnnnnnnnnnnnnnnnnnnnnnnnnnnnnnnnnnnnnnnnnnnnnnnnnnnnnnnnnnnnnnnnnnnnnnnnnnnnnnnnnnnnnnnnnnnnnnnnnnnnnnnnnnnnnnnnnnnnnnnnnnnnnnnnnnnnnnnnnnnnnnnnnnnnnnnnnnnnnnnnnnnnnnnnnnnnnnnnnnnnnnnnnnnnnnnnnnnnnnnnnnnnnnnnnnnnnnnnnnnnnnnnnnnnnnnnnnnnnnnnnnnnnnnnnnnnnnnnnnnnnnnnnnnnnnnnnnnnnnnnnnnnnnnnnnnnnnnnnnnnnnnnnnnnnnnnnnnnnnnnnnnnnnnnnnnnnnnnnnnnnnnnnnnnnnnnnnnnnnnnnnnnnnnnnnnnnnnnnnnnnnnnnnnnnnnnnnnnnnnnnnnnnnnnnnnnnnnnnnnnnnnnnnnnnnnnnnnnnnnnnnnnnnnnnnnnnnnnnnnnnnnnnnnnnnnnnnnnnnnnnnnnnnnnnnnnnnnnnnnnnnnnnnnnnnnnnnnnnnnnnnnnnnnnnnnnnnnnnnnnnnnnnnnnnnnnnnnnnnnnnnnnnnnnnnnnnnnnnnnnnnnnnnnnnnnnnnnnnnnnnnnnnnnnnnnnnnnnnnnnnnnnnnnnnnnnnnnnnnnnnnnnnnnnnnnnnnnnnnnnnnnnnnnnnnnnnnnnnnnnnnnnnnnnnnnnnnnnnnnnnnnnnnnnnnnnnnnnnnnnnnnnnnnnnnnnnnnnnnnnnnnnnnnnnnnnnnnnnnnnnnnnnnnnnnnnnnnnnnnnnnnnnnnnnnnnnnnnnnnnnnnnnnnnnnnnnnnnnnnnnnnnnnnnnnnnnnnnnnnnnnnnnnnnnnnnnnnnnnnnnnnnnnnnnnnnnnnnnnnnnnnnnnnnnnnnnnnnnnnnnnnnnnnnnnnnnnnnnnnnnnnnnnnnnnnnnnnnnnnnnnnnnnnnnnnnnnnnnnnnnnnnnnnnnnnnnnnnnnnnnnnnnnnnnnnnnnnnnnnnnnnnnnnnnnnnnnnnnnnnnnnnnnnnnnnnnnnnnnnnnnnnnnnnnnnnnnnnnnnnnnnnnnnnnnnnnnnnnnnnnnnnnnnnnnnnnnnnnnnnnnnnnnnnnnnnnnnnnnnnnnnnnnnnnnnnnnnnnnnnnnnnnnnnnnnnnnnnnnnnnnnnnnnnnnnnnnnnnnnnnnnnnnnnnnnnnnnnnnnnnnnnnnnnnnnnnnnnnnnnnnnnnnnnnnnnnnnnnnnnnnnnnnnnnnnnnnnnnnnnnnnnnnnnnnnnnnnnnnnnnnnnnnnnnnnnnnnnnnnnnnnnnnnnnnnnnnnnnnnnnnnnnnnnnnnnnnnnnnnnnnnnnnnnnnnnnnnnnnnnnnnnnnnnnnnnnnnnnnnnnnnnnnnnnnnnnnnnnnnnnnnnnnnnnnnnnnnnnnnnnnnnnnnnnnnnnnnnnnnnnnnnnnnnnnnnnnnnnnnnnnnnnnnnnnnnnnnnnnnnnnnnnnnnnnnnnnnnnnnnnnnnnnnnnnnnnnnnnnnnnnnnnnnnnnnnnnnnnnnnnnnnnnnnnnnnnnnnnnnnnnnnnnnnnnnnnnnnnnnnnnnnnnnnnnnnnnnnnnnnnnnnnnnnnnnnnnnnnnnnnnnnnnnnnnnnnnnnnnnnnnnnnnnnnnnnnnnnnnnnnnnnnnnnnnnnnnnnnnnnnnnnnnnnnnnnnnnnnnnnnnnnnnnnnnnnnnnnnnnnnnnnnnnnnnnnnnnnnnnnnnnnnnnnnnnnnnnnnnnnnnnnnnnnnnnnnnnnnnnnnnnnnnnnnnnnnnnnnnnnnnnnnnnnnnnnnnnnnnnnnnnnnnnnnnnnnnnnnnnnnnnnnnnnnnnnnnnnnnnnnnnnnnnnnnnnnnnnnnnnnnnnnnnnnnnnnnnnnnnnnnnnnnnnnnnnnnnnnnnnnnnnnnnnnnnnnnnnnnnnnnnnnnnnnnnnnnnnnnnnnnnnnnnnnnnnnnnnnnnnnnnnnnnnnnnnnnnnnnnnnnnnnnnnnnnnnnnnnnnnnnnnnnnnnnnnnnnnnnnnnnnnnnnnnnnnnnnnnnnnnnnnnnnnnnnnnnnnnnnnnnnnnnnnnnnnnnnnnnnnnnnnnnnnnnnnnnnnnnnnnnnnnnnnnnnnnnnnnnnnnnnnnnnnnnnnnnnnnnnnnnnnnnnnnnnnnnnnnnnnnnnnnnnnnnnnnnnnnnnnnnnnnnnnnnnnnnnnnnnnnnnnnnnnnnnnnnnnnnnnnnnnnnnnnnnnnnnnnnnnnnnnnnnnnnnnnnnnnnnnnnnnnnnnnnnnnnnnnnnnnnnnnnnnnnnnnnnnnnnnnnnnnnnnnnnnnnnnnnnnnnnnnnnnnnnnnnnnnnnnnnnnnnnnnnnnnnnnnnnnnnnnnnnnnnnnnnnnnnnnnnnnnnnnnnnnnnnnnnnnnnnnnnnnnnnnnnnnnnnnnnnnnnnnnnnnnnnnnnnnnnnnnnnnnnnnnnnnnnnnnnnnnnnnnnnnnnnnnnnnnnnnnnnnnnnnnnnnnnnnnnnnnnnnnnnnnnnnnnnnnnnnnnnnnnnnnnnnnnnnnnnnnnnnnnnnnnnnnnnnnnnnnnnnnnnnnnnnnnnnnnnnnnnnnnnnnnnnnnnnnnnnnnnnnnnnnnnnnnnnnnnnnnnnnnnnnnnnnnnnnnnnnnnnnnnnnnnnnnnnnnnnnnnnnnnnnnnnnnnnnnnnnnnnnnnnnnnnnnnnnnnnnnnnnnnnnnnnnnnnnnnnnnnnnnnnnnnnnnnnnnnnnnnnnnnnnnnnnnnnnnnnnnnnnnnnnnnnnnnnnnnnnnnnnnnnnnnnnnnnnnnnnnnnnnnnnnnnnnnnnnnnnnnnnnnnnnnnnnnnnnnnnnnnnnnnnnnnnnnnnnnnnnnnnnnnnnnnnnnnnnnnnnnnnnnnnnnnnnnnnnnnnnnnnnnnnnnnnnnnnnnnnnnnnnnnnnnnnnnnnnnnnnnnnnnnnnnnnnnnnnnnnnnnnnnnnnnnnnnnnnnnnnnnnnnnnnnnnnnnnnnnnnnnnnnnnnnnnnnnnnnnnnnnnnnnnnnnnnnnnnnnnnnnnnnnnnnnnnnnnnnnnnnnnnnnnnnnnnnnnnnnnnnnnnnnnnnnnnnnnnnnnnnnnnnnnnnnnnnnnnnnnnnnnnnnnnnnnnnnnnnnnnnnnnnnnnnnnnnnnnnnnnnnnnnnnnnnnnnnnnnnnnnnnnnnnnnnnnnnnnnnnnnnnnnnnnnnnnnnnnnnnnnnnnnnnnnnnnnnnnnnnnnnnnnnnnnnnnnnnnnnnnnnnnnnnnnnnnnnnnnnnnnnnnnnnnnnnnnnnnnnnnnnnnnnnnnnnnnnnnnnnnnnnnnnnnnnnnnnnnnnnnnnnnnnnnnnnnnnnnnnnnnnnnnnnnnnnnnnnnnnnnnnnnnnnnnnnnnnnnnnnnnnnnnnnnnnnnnnnnnnnnnnnnnnnnnnnnnnnnnnnnnnnnnnnnnnnnnnnnnnnnnnnnnnnnnnnnnnnnnnnnnnnnnnnnnnnnnnnnnnnnnnnnnnnnnnnnnnnnnnnnnnnnnnnnnnnnnnnnnnnnnnnnnnnnnnnnnnnnnnnnnnnnnnnnnnnnnnnnnnnnnnnnnnnnnnnnnnnnnnnnnnnnnnnnnnnnnnnnnnnnnnnnnnnnnnnnnnnnnnnnnnnnnnnnnnnnnnnnnnnnnnnnnnnnnnnnnnnnnnnnnnnnnnnnnnnnnnnnnnnnnnnnnnnnnnnnnnnnnnnnnnnnnnnnnnnnnnnnnnnnnnnnnnnnnnnnnnnnnnnnnnnnnnnnnnnnnnnnnnnnnnnnnnnnnnnnnnnnnnnnnnnnnnnnnnnnnnnnnnnnnnnnnnnnnnnnnnnnnnnnnnnnnnnnnnnnnnnnnnnnnnnnnnnnnnnnnnnnnnnnnnnnnnnnnnnnnnnnnnnnnnnnnnnnnnnnnnnnnnnnnnnnnnnnnnnnnnnnnnnnnnnnnnnnnnnnnnnnnnnnnnnnnnnnnnnnnnnnnnnnnnnnnnnnnnnnnnnnnnnnnnnnnnnnnnnnnnnnnnnnnnnnnnnnnnnnnnnnnnnnnnnnnnnnnnnnnnnnnnnnnnnnnnnnnnnnnnnnnnnnnnnnnnnnnnnnnnnnnnnnnnnnnnnnnnnnnnnnnnnnnnnnnnnnnnnnnnnnnnnnnnnnnnnnnnnnnnnnnnnnnnnnnnnnnnnnnnnnnnnnnnnnnnnnnnnnnnnnnnnnnnnnnnnnnnnnnnnnnnnnnnnnnnnnnnnnnnnnnnnnnnnnnnnnnnnnnnnnnnnnnnnnnnnnnnnnnnnnnnnnnnnnnnnnnnnnnnnnnnnnnnnnnnnnnnnnnnnnnnnnnnnnnnnnnnnnnnnnnnnnnnnnnnnnnnnnnnnnnnnnnnnnnnnnnnnnnnnnnnnnnnnnnnnnnnnnnnnnnnnnnnnnnnnnnnnnnnnnnnnnnnnnnnnnnnnnnnnnnnnnnnnnnnnnnnnnnnnnnnnnnnnnnnnnnnnnnnnnnnnnnnnnnnnnnnnnnnnnnnnnnnnnnnnnnnnnnnnnnnnnnnnnnnnnnnnnnnnnnnnnnnnnnnnnnnnnnnnnnnnnnnnnnnnnnnnnnnnnnnnnnnnnnnnnnnnnnnnnnnnnnnnnnnnnnnnnnnnnnnnnnnnnnnnnnnnnnnnnnnnnnnnnnnnnnnnnnnnnnnnnnnnnnnnnnnnnnnnnnnnnnnnnnnnnnnnnnnnnnnnnnnnnnnnnnnnnnnnnnnnnnnnnnnnnnnnnnnnnnnnnnnnnnnnnnnnnnnnnnnnnnnnnnnnnnnnnnnnnnnnnnnnnnnnnnnnnnnnnnnnnnnnnnnnnnnnnnnnnnnnnnnnnnnnnnnnnnnnnnnnnnnnnnnnnnnnnnnnnnnnnnnnnnnnnnnnnnnnnnnnnnnnnnnnnnnnnnnnnnnnnnnnnnnnnnnnnnnnnnnnnnnnnnnnnnnnnnnnnnnnnnnnnnnnnnnnnnnnnnnnnnnnnnnnnnnnnnnnnnnnnnnnnnnnnnnnnnnnnnnnnnnnnnnnnnnnnnnnnnnnnnnnnnnnnnnnnnnnnnnnnnnnnnnnnnnnnnnnnnnnnnnnnnnnnnnnnnnnnnnnnnnnnnnnnnnnnnnnnnnnnnnnnnnnnnnnnnnnnnnnnnnnnnnnnnnnnnnnnnnnnnnnnnnnnnnnnnnnnnnnnnnnnnnnnnnnnnnnnnnnnnnnnnnnnnnnnnnnnnnnnnnnnnnnnnnnnnnnnnnnnnnnnnnnnnnnnnnnnnnnnnnnnnnnnnnnnnnnnnnnnnnnnnnnnnnnnnnnnnnnnnnnnnnnnnnnnnnnnnnnnnnnnnnnnnnnnnnnnnnnnnnnnnnnnnnnnnnnnnnnnnnnnnnnnnnnnnnnnnnnnnnnnnnnnnnnnnnnnnnnnnnnnnnnnnnnnnnnnnnnnnnnnnnnnnnnnnnnnnnnnnnnnnnnnnnnnnnnnnnnnnnnnnnnnnnnnnnnnnnnnnnnnnnnnnnnnnnnnnnnnnnnnnnnnnnnnnnnnnnnnnnnnnnnnnnnnnnnnnnnnnnnnnnnnnnnnnnnnnnnnnnnnnnnnnnnnnnnnnnnnnnnnnnnnnnnnnnnnnnnnnnnnnnnnnnnnnnnnnnnnnnnnnnnnnnnnnnnnnnnnnnnnnnnnnnnnnnnnnnnnnnnnnnnnnnnnnnnnnnnnnnnnnnnnnnnnnnnnnnnnnnnnnnnnnnnnnnnnnnnnnnnnnnnnnnnnnnnnnnnnnnnnnnnnnnnnnnnnnnnnnnnnnnnnnnnnnnnnnnnnnnnnnnnnnnnnnnnnnnnnnnnnnnnnnnnnnnnnnnnnnnnnnnnnnnnnnnnnnnnnnnnnnnnnnnnnnnnnnnnnnnnnnnnnnnnnnnnnnnnnnnnnnnnnnnnnnnnnnnnnnnnnnnnnnnnnnnnnnnnnnnnnnnnnnnnnnnnnnnnnnnnnnnnnnnnnnnnnnnnnnnnnnnnnnnnnnnnnnnnnnnnnnnnnnnnnnnnnnnnnnnnnnnnnnnnnnnnnnnnnnnnnnnnnnnnnnnnnnnnnnnnnnnnnnnnnnnnnnnnnnnnnnnnnnnnnnnnnnnnnnnnnnnnnnnnnnnnnnnnnnnnnnnnnnnnnnnnnnnnnnnnnnnnnnnnnnnnnnnnnnnnnnnnnnnnnnnnnnnnnnnnnnnnnnnnnnnnnnnnnnnnnnnnnnnnnnnnnnnnnnnnnnnnnnnnnnnnnnnnnnnnnnnnnnnnnnnnnnnnnnnnnnnnnnnnnnnnnnnnnnnnnnnnnnnnnnnnnnnnnnnnnnnnnnnnnnnnnnnnnnnnnnnnnnnnnnnnnnnnnnnnnnnnnnnnnnnnnnnnnnnnnnnnnnnnnnnnnnnnnnnnnnnnnnnnnnnnnnnnnnnnnnnnnnnnnnnnnnnnnnnnnnnnnnnnnnnnnnnnnnnnnnnnnnnnnnnnnnnnnnnnnnnnnnnnnnnnnnnnnnnnnnnnnnnnnnnnnnnnnnnnnnnnnnnnnnnnnnnnnnnnnnnnnnnnnnnnnnnnnnnnnnnnnnnnnnnnnnnnnnnnnnnnnnnnnnnnnnnnnnnnnnnnnnnnnnnnnnnnnnnnnnnnnnnnnnnnnnnnnnnnnnnnnnnnnnnnnnnnnnnnnnnnnnnnnnnnnnnnnnnnnnnnnnnnnnnnnnnnnnnnnnnnnnnnnnnnnnnnnnnnnnnnnnnnnnnnnnnnnnnnnnnnnnnnnnnnnnnnnnnnnnnnnnnnnnnnnnnnnnnnnnnnnnnnnnnnnnnnnnnnnnnnnnnnnnnnnnnnnnnnnnnnnnnnnnnnnnnnnnnnnnnnnnnnnnnnnnnnnnnnnnnnnnnnnnnnnnnnnnnnnnnnnnnnnnnnnnnnnnnnnnnnnnnnnnnnnnnnnnnnnnnnnnnnnnnnnnnnnnnnnnnnnnnnnnnnnnnnnnnnnnnnnnnnnnnnnnnnnnnnnnnnnnnnnnnnnnnnnnnnnnnnnnnnnnnnnnnnnnnnnnnnnnnnnnnnnnnnnnnnnnnnnnnnnnnnnnnnnnnnnnnnnnnnnnnnnnnnnnnnnnnnnnnnnnnnnnnnnnnnnnnnnnnnnnnnnnnnnnnnnnnnnnnnnnnnnnnnnnnnnnnnnnnnnnnnnnnnnnnnnnnnnnnnnnnnnnnnnnnnnnnnnnnnnnnnnnnnnnnnnnnnnnnnnnnnnnnnnnnnnnnnnnnnnnnnnnnnnnnnnnnnnnnnnnnnnnnnnnnnnnnnnnnnnnnnnnnnnnnnnnnnnnnnnnnnnnnnnnnnnnnnnnnnnnnnnnnnnnnnnnnnnnnnnnnnnnnnnnnnnnnnnnnnnnnnnnnnnnnnnnnnnnnnnnnnnnnnnnnnnnnnnnnnnnnnnnnnnnnnnnnnnnnnnnnnnnnnnnnnnnnnnnnnnnnnnnnnnnnnnnnnnnnnnnnnnnnnnnnnnnnnnnnnnnnnnnnnnnnnnnnnnnnnnnnnnnnnnnnnnnnnnnnnnnnnnnnnnnnnnnnnnnnnnnnnnnnnnnnnnnnnnnnnnnnnnnnnnnnnnnnnnnnnnnnnnnnnnnnnnnnnnnnnnnnnnnnnnnnnnnnnnnnnnnnnnnnnnnnnnnnnnnnnnnnnnnnnnnnnnnnnnnnnnnnnnnnnnnnnnnnnnnnnnnnnnnnnnnnnnnnnnnnnnnnnnnnnnnnnnnnnnnnnnnnnnnnnnnnnnnnnnnnnnnnnnnnnnnnnnnnnnnnnnnnnnnnnnnnnnnnnnnnnnnnnnnnnnnnnnnnnnnnnnnnnnnnnnnnnnnnnnnnnnnnnnnnnnnnnnnnnnnnnnnnnnnnnnnnnnnnnnnnnnnnnnnnnnnnnnnnnnnnnnnnnnnnnnnnnnnnnnnnnnnnnnnnnnnnnnnnnnnnnnnnnnnnnnnnnnnnnnnnnnnnnnnnnnnnnnnnnnnnnnnnnnnnnnnnnnnnnnnnnnnnnnnnnnnnnnnnnnnnnnnnnnnnnnnnnnnnnnnnnnnnnnnnnnnnnnnnnnnnnnnnnnnnnnnnnnnnnnnnnnnnnnnnnnnnnnnnnnnnnnnnnnnnnnnnnnnnnnnnnnnnnnnnnnnnnnnnnnnnnnnnnnnnnnnnnnnnnnnnnnnnnnnnnnnnnnnnnnnnnnnnnnnnnnnnnnnnnnnnnnnnnnnnnnnnnnnnnnnnnnnnnnnnnnnnnnnnnnnnnnnnnnnnnnnnnnnnnnnnnnnnnnnnnnnnnnnnnnnnnnnnnnnnnnnnnnnnnnnnnnnnnnnnnnnnnnnnnnnnnnnnnnnnnnnnnnnnnnnnnnnnnnnnnnnnnnnnnnnnnnnnnnnnnnnnnnnnnnnnnnnnnnnnnnnnnnnnnnnnnnnnnnnnnnnnnnnnnnnnnnnnnnnnnnnnnnnnnnnnnnnnnnnnnnnnnnnnnnnnnnnnnnnnnnnnnnnnnnnnnnnnnnnnnnnnnnnnnnnnnnnnnnnnnnnnnnnnnnnnnnnnnnnnnnnnnnnnnnnnnnnnnnnnnnnnnnnnnnnnnnnnnnnnnnnnnnnnnnnnnnnnnnnnnnnnnnnnnnnnnnnnnnnnnnnnnnnnnnnnnnnnnnnnnnnnnnnnnnnnnnnnnnnnnnnnnnnnnnnnnnnnnnnnnnnnnnnnnnnnnnnnnnnnnnnnnnnnnnnnnnnnnnnnnnnnnnnnnnnnnnnnnnnnnnnnnnnnnnnnnnnnnnnnnnnnnnnnnnnnnnnnnnnnnnnnnnnnnnnnnnnnnnnnnnnnnnnnnnnnnnnnnnnnnnnnnnnnnnnnnnnnnnnnnnnnnnnnnnnnnnnnnnnnnnnnnnnnnnnnnnnnnnnnnnnnnnnnnnnnnnnnnnnnnnnnnnnnnnnnnnnnnnnnnnnnnnnnnnnnnnnnnnnnnnnnnnnnnnnnnnnnnnnnnnnnnnnnnnnnnnnnnnnnnnnnnnnnnnnnnnnnnnnnnnnnnnnnnnnnnnnnnnnnnnnnnnnnnnnnnnnnnnnnnnnnnnnnnnnnnnnnnnnnnnnnnnnnnnnnnnnnnnnnnnnnnnnnnnnnnnnnnnnnnnnnnnnnnnnnnnnnnnnnnnnnnnnnnnnnnnnnnnnnnnnnnnnnnnnnnnnnnnnnnnnnnnnnnnnnnnnnnnnnnnnnnnnnnnnnnnnnnnnnnnnnnnnnnnnnnnnnnnnnnnnnnnnnnnnnnnnnnnnnnnnnnnnnnnnnnnnnnnnnnnnnnnnnnnnnnnnnnnnnnnnnnnnnnnnnnnnnnnnnnnnnnnnnnnnnnnnnnnnnnnnnnnnnnnnnnnnnnnnnnnnnnnnnnnnnnnnnnnnnnnnnnnnnnnnnnnnnnnnnnnnnnnnnnnnnnnnnnnnnnnnnnnnnnnnnnnnnnnnnnnnnnnnnnnnnnnnnnnnnnnnnnnnnnnnnnnnnnnnnnnnnnnnnnnnnnnnnnnnnnnnnnnnnnnnnnnnnnnnnnnnnnnnnnnnnnnnnnnnnnnnnnnnnnnnnnnnnnnnnnnnnnnnnnnnnnnnnnnnnnnnnnnnnnnnnnnnnnnnnnnnnnnnnnnnnnnnnnnnnnnnnnnnnnnnnnnnnnnnnnnnnnnnnnnnnnnnnnnnnnnnnnnnnnnnnnnnnnnnnnnnnnnnnnnnnnnnnnnnnnnnnnnnnnnnnnnnnnnnnnnnnnnnnnnnnnnnnnnnnnnnnnnnnnnnnnnnnnnnnnnnnnnnnnnnnnnnnnnnnnnnnnnnnnnnnnnnnnnnnnnnnnnnnnnnnnnnnnnnnnnnnnnnnnnnnnnnnnnnnnnnnnnnnnnnnnnnnnnnnnnnnnnnnnnnnnnnnnnnnnnnnnnnnnnnnnnnnnnnnnnnnnnnnnnnnnnnnnnnnnnnnnnnnnnnnnnnnnnnnnnnnnnnnnnnnnnnnnnnnnnnnnnnnnnnnnnnnnnnnnnnnnnnnnnnnnnnnnnnnnnnnnnnnnnnnnnnnnnnnnnnnnnnnnnnnnnnnnnnnnnnnnnnnnnnnnnnnnnnnnnnnnnnnnnnnnnnnnnnnnnnnnnnnnnnnnnnnnnnnnnnnnnnnnnnnnnnnnnnnnnnnnnnnnnnnnnnnnnnnnnnnnnnnnnnnnnnnnnnnnnnnnnnnnnnnnnnnnnnnnnnnnnnnnnnnnnnnnnnnnnnnnnnnnnnnnnnnnnnnnnnnnnnnnnnnnnnnnnnnnnnnnnnnnnnnnnnnnnnnnnnnnnnnnnnnnnnnnnnnnnnnnnnnnnnnnnnnnnnnnnnnnnnnnnnnnnnnnnnnnnnnnnnnnnnnnnnnnnnnnnnnnnnnnnnnnnnnnnnnnnnnnnnnnnnnnnnnnnnnnnnnnnnnnnnnnnnnnnnnnnnnnnnnnnnnnnnnnnnnnnnnnnnnnnnnnnnnnnnnnnnnnnnnnnnnnnnnnnnnnnnnnnnnnnnnnnnnnnnnnnnnnnnnnnnnnnnnnnnnnnnnnnnnnnnnnnnnnnnnnnnnnnnnnnnnnnnnnnnnnnnnnnnnnnnnnnnnnnnnnnnnnnnnnnnnnnnnnnnnnnnnnnnnnnnnnnnnnnnnnnnnnnnnnnnnnnnnnnnnnnnnnnnnnnnnnnnnnnnnnnnnnnnnnnnnnnnnnnnnnnnnnnnnnnnnnnnnnnnnnnnnnnnnnnnnnnnnnnnnnnnnnnnnnnnnnnnnnnnnnnnnnnnnnnnnnnnnnnnnnnnnnnnnnnnnnnnnnnnnnnnnnnnnnnnnnnnnnnnnnnnnnnnnnnnnnnnnnnnnnnnnnnnnnnnnnnnnnnnnnnnnnnnnnnnnnnnnnnnnnnnnnnnnnnnnnnnnnnnnnnnnnnnnnnnnnnnnnnnnnnnnnnnnnnnnnnnnnnnnnnnnnnnnnnnnnnnnnnnnnnnnnnnnnnnnnnnnnnnnnnnnnnnnnnnnnnnnnnnnnnnnnnnnnnnnnnnnnnnnnnnnnnnnnnnnnnnnnnnnnnnnnnnnnnnnnnnnnnnnnnnnnnnnnnnnnnnnnnnnnnnnnnnnnnnnnnnnnnnnnnnnnnnnnnnnnnnnnnnnnnnnnnnnnnnnnnnnnnnnnnnnnnnnnnnnnnnnnnnnnnnnnnnnnnnnnnnnnnnnnnnnnnnnnnnnnnnnnnnnnnnnnnnnnnnnnnnnnnnnnnnnnnnnnnnnnnnnnnnnnnnnnnnnnnnnnnnnnnnnnnnnnnnnnnnnnnnnnnnnnnnnnnnnnnnnnnnnnnnnnnnnnnnnnnnnnnnnnnnnnnnnnnnnnnnnnnnnnnnnnnnnnnnnnnnnnnnnnnnnnnnnnnnnnnnnnnnnnnnnnnnnnnnnnnnnnnnnnnnnnnnnnnnnnnnnnnnnnnnnnnnnnnnnnnnnnnnnnnnnnnnnnnnnnnnnnnnnnnnnnnnnnnnnnnnnnnnnnnnnnnnnnnnnnnnnnnnnnnnnnnnnnnnnnnnnnnnnnnnnnnnnnnnnnnnnnnnnnnnnnnnnnnnnnnnnnnnnnnnnnnnnnnnnnnnnnnnnnnnnnnnnnnnnnnnnnnnnnnnnnnnnnnnnnnnnnnnnnnnnnnnnnnnnnnnnnnnnnnnnnnnnnnnnnnnnnnnnnnnnnnnnnnnnnnnnnnnnnnnnnnnnnnnnnnnnnnnnnnnnnnnnnnnnnnnnnnnnnnnnnnnnnnnnnnnnnnnnnnnnnnnnnnnnnnnnnnnnnnnnnnnnnnnnnnnnnnnnnnnnnnnnnnnnnnnnnnnnnnnnnnnnnnnnnnnnnnnnnnnnnnnnnnnnnnnnnnnnnnnnnnnnnnnnnnnnnnnnnnnnnnnnnnnnnnnnnnnnnnnnnnnnnnnnnnnnnnnnnnnnnnnnnnnnnnnnnnnnnnnnnnnnnnnnnnnnnnnnnnnnnnnnnnnnnnnnnnnnnnnnnnnnnnnnnnnnnnnnnnnnnnnnnnnnnnnnnnnnnnnnnnnnnnnnnnnnnnnnnnnnnnnnnnnnnnnnnnnnnnnnnnnnnnnnnnnnnnnnnnnnnnnnnnnnnnnnnnnnnnnnnnnnnnnnnnnnnnnnnnnnnnnnnnnnnnnnnnnnnnnnnnnnnnnnnnnnnnnnnnnnnnnnnnnnnnnnnnnnnnnnnnnnnnnnnnnnnnnnnnnnnnnnnnnnnnnnnnnnnnnnnnnnnnnnnnnnnnnnnnnnnnnnnnnnnnnnnnnnnnnnnnnnnnnnnnnnnnnnnnnnnnnnnnnnnnnnnnnnnnnnnnnnnnnnnnnnnnnnnnnnnnnnnnnnnnnnnnnnnnnnnnnnnnnnnnnnnnnnnnnnnnnnnnnnnnnnnnnnnnnnnnnnnnnnnnnnnnnnnnnnnnnnnnnnnnnnnnnnnnnnnnnnnnnnnnnnnnnnnnnnnnnnnnnnnnnnnnnnnnnnnnnnnnnnnnnnnnnnnnnnnnnnnnnnnnnnnnnnnnnnnnnnnnnnnnnnnnnnnnnnnnnnnnnnnnnnnnnnnnnnnnnnnnnnnnnnnnnnnnnnnnnnnnnnnnnnnnnnnnnnnnnnnnnnnnnnnnnnnnnnnnnnnnnnnnnnnnnnnnnnnnnnnnnnnnnnnnnnnnnnnnnnnnnnnnnnnnnnnnnnnnnnnnnnnnnnnnnnnnnnnnnnnnnnnnnnnnnnnnnnnnnnnnnnnnnnnnnnnnnnnnnnnnnnnnnnnnnnnnnnnnnnnnnnnnnnnnnnnnnnnnnnnnnnnnnnnnnnnnnnnnnnnnnnnnnnnnnnnnnnnnnnnnnnnnnnnnnnnnnnnnnnnnnnnnnnnnnnnnnnnnnnnnnnnnnnnnnnnnnnnnnnnnnnnnnnnnnnnnnnnnnnnnnnnnnnnnnnnnnnnnnnnnnnnnnnnnnnnnnnnnnnnnnnnnnnnnnnnnnnnnnnnnnnnnnnnnnnnnnnnnnnnnnnnnnnnnnnnnnnnnnnnnnnnnnnnnnnnnnnnnnnnnnnnnnnnnnnnnnnnnnnnnnnnnnnnnnnnnnnnnnnnnnnnnnnnnnnnnnnnnnnnnnnnnnnnnnnnnnnnnnnnnnnnnnnnnnnnnnnnnnnnnnnnnnnnnnnnnnnnnnnnnnnnnnnnnnnnnnnnnnnnnnnnnnnnnnnnnnnnnnnnnnnnnnnnnnnnnnnnnnnnnnnnnnnnnnnnnnnnnnnnnnnnnnnnnnnnnnnnnnnnnnnnnnnnnnnnnnnnnnnnnnnnnnnnnnnnnnnnnnnnnnnnnnnnnnnnnnnnnnnnnnnnnnnnnnnnnnnnnnnnnnnnnnnnnnnnnnnnnnnnnnnnnnnnnnnnnnnnnnnnnnnnnnnnnnnnnnnnnnnnnnnnnnnnnnnnnnnnnnnnnnnnnnnnnnnnnnnnnnnnnnnnnnnnnnnnnnnnnnnnnnnnnnnnnnnnnnnnnnnnnnnnnnnnnnnnnnnnnnnnnnnnnnnnnnnnnnnnnnnnnnnnnnnnnnnnnnnnnnnnnnnnnnnnnnnnnnnnnnnnnnnnnnnnnnnnnnnnnnnnnnnnnnnnnnnnnnnnnnnnnnnnnnnnnnnnnnnnnnnnnnnnnnnnnnnnnnnnnnnnnnnnnnnnnnnnnnnnnnnnnnnnnnnnnnnnnnnnnnnnnnnnnnnnnnnnnnnnnnnnnnnnnnnnnnnnnnnnnnnnnnnnnnnnnnnnnnnnnnnnnnnnnnnnnnnnnnnnnnnnnnnnnnnnnnnnnnnnnnnnnnnnnnnnnnnnnnnnnnnnnnnnnnnnnnnnnnnnnnnnnnnnnnnnnnnnnnnnnnnnnnnnnnnnnnnnnnnnnnnnnnnnnnnnnnnnnnnnnnnnnnnnnnnnnnnnnnnnnnnnnnnnnnnnnnnnnnnnnnnnnnnnnnnnnnnnnnnnnnnnnnnnnnnnnnnnnnnnnnnnnnnnnnnnnnnnnnnnnnnnnnnnnnnnnnnnnnnnnnnnnnnnnnnnnnnnnnnnnnnnnnnnnnnnnnnnnnnnnnnnnnnnnnnnnnnnnnnnnnnnnnnnnnnnnnnnnnnnnnnnnnnnnnnnnnnnnnnnnnnnnnnnnnnnnnnnnnnnnnnnnnnnnnnnnnnnnnnnnnnnnnnnnnnnnnnnnnnnnnnnnnnnnnnnnnnnnnnnnnnnnnnnnnnnnnnnnnnnnnnnnnnnnnnnnnnnnnnnnnnnnnnnnnnnnnnnnnnnnnnnnnnnnnnnnnnnnnnnnnnnnnnnnnnnnnnnnnnnnnnnnnnnnnnnnnnnnnnnnnnnnnnnnnnnnnnnnnnnnnnnnnnnnnnnnnnnnnnnnnnnnnnnnnnnnnnnnnnnnnnnnnnnnnnnnnnnnnnnnnnnnnnnnnnnnnnnnnnnnnnnnnnnnnnnnnnnnnnnnnnnnnnnnnnnnnnnnnnnnnnnnnnnnnnnnnnnnnnnnnnnnnnnnnnnnnnnnnnnnnnnnnnnnnnnnnnnnnnnnnnnnnnnnnnnnnnnnnnnnnnnnnnnnnnnnnnnnnnnnnnnnnnnnnnnnnnnnnnnnnnnnnnnnnnnnnnnnnnnnnnnnnnnnnnnnnnnnnnnnnnnnnnnnnnnnnnnnnnnnnnnnnnnnnnnnnnnnnnnnnnnnnnnnnnnnnnnnnnnnnnnnnnnnnnnnnnnnnnnnnnnnnnnnnnnnnnnnnnnnnnnnnnnnnnnnnnnnnnnnnnnnnnnnnnnnnnnnnnnnnnnnnnnnnnnnnnnnnnnnnnnnnnnnnnnnnnnnnnnnnnnnnnnnnnnnnnnnnnnnnnnnnnnnnnnnnnnnnnnnnnnnnnnnnnnnnnnnnnnnnnnnnnnnnnnnnnnnnnnnnnnnnnnnnnnnnnnnnnnnnnnnnnnnnnnnnnnnnnnnnnnnnnnnnnnnnnnnnnnnnnnnnnnnnnnnnnnnnnnnnnnnnnnnnnnnnnnnnnnnnnnnnnnnnnnnnnnnnnnnnnnnnnnnnnnnnnnnnnnnnnnnnnnnnnnnnnnnnnnnnnnnnnnnnnnnnnnnnnnnnnnnnnnnnnnnnnnnnnnnnnnnnnnnnnnnnnnnnnnnnnnnnnnnnnnnnnnnnnnnnnnnnnnnnnnnnnnnnnnnnnnnnnnnnnnnnnnnnnnnnnnnnnnnnnnnnnnnnnnnnnnnnnnnnnnnnnnnnnnnnnnnnnnnnnnnnnnnnnnnnnnnnnnnnnnnnnnnnnnnnnnnnnnnnnnnnnnnnnnnnnnnnnnnnnnnnnnnnnnnnnnnnnnnnnnnnnnnnnnnnnnnnnnnnnnnnnnnnnnnnnnnnnnnnnnnnnnnnnnnnnnnnnnnnnnnnnnnnnnnnnnnnnnnnnnnnnnnnnnnnnnnnnnnnnnnnnnnnnnnnnnnnnnnnnnnnnnnnnnnnnnnnnnnnnnnnnnnnnnnnnnnnnnnnnnnnnnnnnnnnnnnnnnnnnnnnnnnnnnnnnnnnnnnnnnnnnnnnnnnnnnnnnnnnnnnnnnnnnnnnnnnnnnnnnnnnnnnnnnnnnnnnnnnnnnnnnnnnnnnnnnnnnnnnnnnnnnnnnnnnnnnnnnnnnnnnnnnnnnnnnnnnnnnnnnnnnnnnnnnnnnnnnnnnnnnnnnnnnnnnnnnnnnnnnnnnnnnnnnnnnnnnnnnnnnnnnnnnnnnnnnnnnnnnnnnnnnnnnnnnnnnnnnnnnnnnnnnnnnnnnnnnnnnnnnnnnnnnnnnnnnnnnnnnnnnnnnnnnnnnnnnnnnnnnnnnnnnnnnnnnnnnnnnnnnnnnnnnnnnnnnnnnnnnnnnnnnnnnnnnnnnnnnnnnnnnnnnnnnnnnnnnnnnnnnnnnnnnnnnnnnnnnnnnnnnnnnnnnnnnnnnnnnnnnnnnnnnnnnnnnnnnnnnnnnnnnnnnnnnnnnnnnnnnnnnnnnnnnnnnnnnnnnnnnnnnnnnnnnnnnnnnnnnnnnnnnnnnnnnnnnnnnnnnnnnnnnnnnnnnnnnnnnnnnnnnnnnnnnnnnnnnnnnnnnnnnnnnnnnnnnnnnnnnnnnnnnnnnnnnnnnnnnnnnnnnnnnnnnnnnnnnnnnnnnnnnnnnnnnnnnnnnnnnnnnnnnnnnnnnnnnnnnnnnnnnnnnnnnnnnnnnnnnnnnnnnnnnnnnnnnnnnnnnnnnnnnnnnnnnnnnnnnnnnnnnnnnnnnnnnnnnnnnnnnnnnnnnnnnnnnnnnnnnnnnnnnnnnnnnnnnnnnnnnnnnnnnnnnnnnnnnnnnnnnnnnnnnnnnnnnnnnnnnnnnnnnnnnnnnnnnnnnnnnnnnnnnnnnnnnnnnnnnnnnnnnnnnnnnnnnnnnnnnnnnnnnnnnnnnnnnnnnnnnnnnnnnnnnnnnnnnnnnnnnnnnnnnnnnnnnnnnnnnnnnnnnnnnnnnnnnnnnnnnnnnnnnnnnnnnnnnnnnnnnnnnnnnnnnnnnnnnnnnnnnnnnnnnnnnnnnnnnnnnnnnnnnnnnnnnnnnnnnnnnnnnnnnnnnnnnnnnnnnnnnnnnnnnnnnnnnnnnnnnnnnnnnnnnnnnnnnnnnnnnnnnnnnnnnnnnnnnnnnnnnnnnnnnnnnnnnnnnnnnnnnnnnnnnnnnnnnnnnnnnnnnnnnnnnnnnnnnnnnnnnnnnnnnnnnnnnnnnnnnnnnnnnnnnnnnnnnnnnnnnnnnnnnnnnnnnnnnnnnnnnnnnnnnnnnnnnnnnnnnnnnnnnnnnnnnnnnnnnnnnnnnnnnnnnnnnnnnnnnnnnnnnnnnnnnnnnnnnnnnnnnnnnnnnnnnnnnnnnnnnnnnnnnnnnnnnnnnnnnnnnnnnnnnnnnnnnnnnnnnnnnnnnnnnnnnnnnnnnnnnnnnnnnnnnnnnnnnnnnnnnnnnnnnnnnnnnnnnnnnnnnnnnnnnnnnnnnnnnnnnnnnnnnnnnnnnnnnnnnnnnnnnnnnnnnnnnnnnnnnnnnnnnnnnnnnnnnnnnnnnnnnnnnnnnnnnnnnnnnnnnnnnnnnnnnnnnnnnnnnnnnnnnnnnnnnnnnnnnnnnnnnnnnnnnnnnnnnnnnnnnnnnnnnnnnnnnnnnnnnnnnnnnnnnnnnnnnnnnnnnnnnnnnnnnnnnnnnnnnnnnnnnnnnnnnnnnnnnnnnnnnnnnnnnnnnnnnnnnnnnnnnnnnnnnnnnnnnnnnnnnnnnnnnnnnnnnnnnnnnnnnnnnnnnnnnnnnnnnnnnnnnnnnnnnnnnnnnnnnnnnnnnnnnnnnnnnnnnnnnnnnnnnnnnnnnnnnnnnnnnnnnnnnnnnnnnnnnnnnnnnnnnnnnnnnnnnnnnnnnnnnnnnnnnnnnnnnnnnnnnnnnnnnnnnnnnnnnnnnnnnnnnnnnnnnnnnnnnnnnnnnnnnnnnnnnnnnnnnnnnnnnnnnnnnnnnnnnnnnnnnnnnnnnnnnnnnnnnnnnnnnnnnnnnnnnnnnnnnnnnnnnnnnnnnnnnnnnnnnnnnnnnnnnnnnnnnnnnnnnnnnnnnnnnnnnnnnnnnnnnnnnnnnnnnnnnnnnnnnnnnnnnnnnnnnnnnnnnnnnnnnnnnnnnnnnnnnnnnnnnnnnnnnnnnnnnnnnnnnnnnnnnnnnnnnnnnnnnnnnnnnnnnnnnnnnnnnnnnnnnnnnnnnnnnnnnnnnnnnnnnnnnnnnnnnnnnnnnnnnnnnnnnnnnnnnnnnnnnnnnnnnnnnnnnnnnnnnnnnnnnnnnnnnnnnnnnnnnnnnnnnnnnnnnnnnnnnnnnnnnnnnnnnnnnnnnnnnnnnnnnnnnnnnnnnnnnnnnnnnnnnnnnnnnnnnnnnnnnnnnnnnnnnnnnnnnnnnnnnnnnnnnnnnnnnnnnnnnnnnnnnnnnnnnnnnnnnnnnnnnnnnnnnnnnnnnnnnnnnnnnnnnnnnnnnnnnnnnnnnnnnnnnnnnnnnnnnnnnnnnnnnnnnnnnnnnnnnnnnnnnnnnnnnnnnnnnnnnnnnnnnnnnnnnnnnnnnnnnnnnnnnnnnnnnnnnnnnnnnnnnnnnnnnnnnnnnnnnnnnnnnnnnnnnnnnnnnnnnnnnnnnnnnnnnnnnnnnnnnnnnnnnnnnnnnnnnnnnnnnnnnnnnnnnnnnnnnnnnnnnnnnnnnnnnnnnnnnnnnnnnnnnnnnnnnnnnnnnnnnnnnnnnnnnnnnnnnnnnnnnnnnnnnnnnnnnnnnnnnnnnnnnnnnnnnnnnnnnnnnnnnnnnnnnnnnnnnnnnnnnnnnnnnnnnnnnnnnnnnnnnnnnnnnnnnnnnnnnnnnnnnnnnnnnnnnnnnnnnnnnnnnnnnnnnnnnnnnnnnnnnnnnnnnnnnnnnnnnnnnnnnnnnnnnnnnnnnnnnnnnnnnnnnnnnnnnnnnnnnnnnnnnnnnnnnnnnnnnnnnnnnnnnnnnnnnnnnnnnnnnnnnnnnnnnnnnnnnnnnnnnnnnnnnnnnnnnnnnnnnnnnnnnnnnnnnnnnnnnnnnnnnnnnnnnnnnnnnnnnnnnnnnnnnnnnnnnnnnnnnnnnnnnnnnnnnnnnnnnnnnnnnnnnnnnnnnnnnnnnnnnnnnnnnnnnnnnnnnnnnnnnnnnnnnnnnnnnnnnnnnnnnnnnnnnnnnnnnnnnnnnnnnnnnnnnnnnnnnnnnnnnnnnnnnnnnnnnnnnnnnnnnnnnnnnnnnnnnnnnnnnnnnnnnnnnnnnnnnnnnnnnnnnnnnnnnnnnnnnnnnnnnnnnnnnnnnnnnnnnnnnnnnnnnnnnnnnnnnnnnnnnnnnnnnnnnnnnnnnnnnnnnnnnnnnnnnnnnnnnnnnnnnnnnnnnnnnnnnnnnnnnnnnnnnnnnnnnnnnnnnnnnnnnnnnnnnnnnnnnnnnnnnnnnnnnnnnnnnnnnnnnnnnnnnnnnnnnnnnnnnnnnnnnnnnnnnnnnnnnnnnnnnnnnnnnnnnnnnnnnnnnnnnnnnnnnnnnnnnnnnnnnnnnnnnnnnnnnnnnnnnnnnnnnnnnnnnnnnnnnnnnnnnnnnnnnnnnnnnnnnnnnnnnnnnnnnnnnnnnnnnnnnnnnnnnnnnnnnnnnnnnnnnnnnnnnnnnnnnnnnnnnnnnnnnnnnnnnnnnnnnnnnnnnnnnnnnnnnnnnnnnnnnnnnnnnnnnnnnnnnnnnnnnnnnnnnnnnnnnnnnnnnnnnnnnnnnnnnnnnnnnnnnnnnnnnnnnnnnnnnnnnnnnnnnnnnnnnnnnnnnnnnnnnnnnnnnnnnnnnnnnnnnnnnnnnnnnnnnnnnnnnnnnnnnnnnnnnnnnnnnnnnnnnnnnnnnnnnnnnnnnnnnnnnnnnnnnnnnnnnnnnnnnnnnnnnnnnnnnnnnnnnnnnnnnnnnnnnnnnnnnnnnnnnnnnnnnnnnnnnnnnnnnnnnnnnnnnnnnnnnnnnnnnnnnnnnnnnnnnnnnnnnnnnnnnnnnnnnnnnnnnnnnnnnnnnnnnnnnnnnnnnnnnnnnnnnnnnnnnnnnnnnnnnnnnnnnnnnnnnnnnnnnnnnnnnnnnnnnnnnnnnnnnnnnnnnnnnnnnnnnnnnnnnnnnnnnnnnnnnnnnnnnnnnnnnnnnnnnnnnnnnnnnnnnnnnnnnnnnnnnnnnnnnnnnnnnnnnnnnnnnnnnnnnnnnnnnnnnnnnnnnnnnnnnnnnnnnnnnnnnnnnnnnnnnnnnnnnnnnnnnnnnnnnnnnnnnnnnnnnnnnnnnnnnnnnnnnnnnnnnnnnnnnnnnnnnnnnnnnnnnnnnnnnnnnnnnnnnnnnnnnnnnnnnnnnnnnnnnnnnnnnnnnnnnnnnnnnnnnnnnnnnnnnnnnnnnnnnnnnnnnnnnnnnnnnnnnnnnnnnnnnnnnnnnnnnnnnnnnnnnnnnnnnnnnnnnnnnnnnnnnnnnnnnnnnnnnnnnnnnnnnnnnnnnnnnnnnnnnnnnnnnnnnnnnnnnnnnnnnnnnnnnnnnnnnnnnnnnnnnnnnnnnnnnnnnnnnnnnnnnnnnnnnnnnnnnnnnnnnnnnnnnnnnnnnnnnnnnnnnnnnnnnnnnnnnnnnnnnnnnnnnnnnnnnnnnnnnnnnnnnnnnnnnnnnnnnnnnnnnnnnnnnnnnnnnnnnnnnnnnnnnnnnnnnnnnnnnnnnnnnnnnnnnnnnnnnnnnnnnnnnnnnnnnnnnnnnnnnnnnnnnnnnnnnnnnnnnnnnnnnnnnnnnnnnnnnnnnnnnnnnnnnnnnnnnnnnnnnnnnnnnnnnnnnnnnnnnnnnnnnnnnnnnnnnnnnnnnnnnnnnnnnnnnnnnnnnnnnnnnnnnnnnnnnnnnnnnnnnnnnnnnnnnnnnnnnnnnnnnnnnnnnnnnnnnnnnnnnnnnnnnnnnnnnnnnnnnnnnnnnnnnnnnnnnnnnnnnnnnnnnnnnnnnnnnnnnnnnnnnnnnnnnnnnnnnnnnnnnnnnnnnnnnnnnnnnnnnnnnnnnnnnnnnnnnnnnnnnnnnnnnnnnnnnnnnnnnnnnnnnnnnnnnnnnnnnnnnnnnnnnnnnnnnnnnnnnnnnnnnnnnnnnnnnnnnnnnnnnnnnnnnnnnnnnnnnnnnnnnnnnnnnnnnnnnnnnnnnnnnnnnnnnnnnnnnnnnnnnnnnnnnnnnnnnnnnnnnnnnnnnnnnnnnnnnnnnnnnnnnnnnnnnnnnnnnnnnnnnnnnnnnnnnnnnnnnnnnnnnnnnnnnnnnnnnnnnnnnnnnnnnnnnnnnnnnnnnnnnnnnnnnnnnnnnnnnnnnnnnnnnnnnnnnnnnnnnnnnnnnnnnnnnnnnnnnnnnnnnnnnnnnnnnnnnnnnnnnnnnnnnnnnnnnnnnnnnnnnnnnnnnnnnnnnnnnnnnnnnnnnnnnnnnnnnnnnnnnnnnnnnnnnnnnnnnnnnnnnnnnnnnnnnnnnnnnnnnnnnnnnnnnnnnnnnnnnnnnnnnnnnnnnnnnnnnnnnnnnnnnnnnnnnnnnnnnnnnnnnnnnnnnnnnnnnnnnnnnnnnnnnnnnnnnnnnnnnnnnnnnnnnnnnnnnnnnnnnnnnnnnnnnnnnnnnnnnnnnnnnnnnnnnnnnnnnnnnnnnnnnnnnnnnnnnnnnnnnnnnnnnnnnnnnnnnnnnnnnnnnnnnnnnnnnnnnnnnnnnnnnnnnnnnnnnnnnnnnnnnnnnnnnnnnnnnnnnnnnnnnnnnnnnnnnnnnnnnnnnnnnnnnnnnnnnnnnnnnnnnnnnnnnnnnnnnnnnnnnnnnnnnnnnnnnnnnnnnnnnnnnnnnnnnnnnnnnnnnnnnnnnnnnnnnnnnnnnnnnnnnnnnnnnnnnnnnnnnnnnnnnnnnnnnnnnnnnnnnnnnnnnnnnnnnnnnnnnnnnnnnnnnnnnnnnnnnnnnnnnnnnnnnnnnnnnnnnnnnnnnnnnnnnnnnnnnnnnnnnnnnnnnnnnnnnnnnnnnnnnnnnnnnnnnnnnnnnnnnnnnnnnnnnnnnnnnnnnnnnnnnnnnnnnnnnnnnnnnnnnnnnnnnnnnnnnnnnnnnnnnnnnnnnnnnnnnnnnnnnnnnnnnnnnnnnnnnnnnnnnnnnnnnnnnnnnnnnnnnnnnnnnnnnnnnnnnnnnnnnnnnnnnnnnnnnnnnnnnnnnnnnnnnnnnnnnnnnnnnnnnnnnnnnnnnnnnnnnnnnnnnnnnnnnnnnnnnnnnnnnnnnnnnnnnnnnnnnnnnnnnnnnnnnnnnnnnnnnnnnnnnnnnnnnnnnnnnnnnnnnnnnnnnnnnnnnnnnnnnnnnnnnnnnnnnnnnnnnnnnnnnnnnnnnnnnnnnnnnnnnnnnnnnnnnnnnnnnnnnnnnnnnnnnnnnnnnnnnnnnnnnnnnnnnnnnnnnnnnnnnnnnnnnnnnnnnnnnnnnnnnnnnnnnnnnnnnnnnnnnnnnnnnnnnnnnnnnnnnnnnnnnnnnnnnnnnnnnnnnnnnnnnnnnnnnnnnnnnnnnnnnnnnnnnnnnnnnnnnnnnnnnnnnnnnnnnnnnnnnnnnnnnnnnnnnnnnnnnnnnnnnnnnnnnnnnnnnnnnnnnnnnnnnnnnnnnnnnnnnnnnnnnnnnnnnnnnnnnnnnnnnnnnnnnnnnnnnnnnnnnnnnnnnnnnnnnnnnnnnnnnnnnnnnnnnnnnnnnnnnnnnnnnnnnnnnnnnnnnnnnnnnnnnnnnnnnnnnnnnnnnnnnnnnnnnnnnnnnnnnnnnnnnnnnnnnnnnnnnnnnnnnnnnnnnnnnnnnnnnnnnnnnnnnnnnnnnnnnnnnnnnnnnnnnnnnnnnnnnnnnnnnnnnnnnnnnnnnnnnnnnnnnnnnnnnnnnnnnnnnnnnnnnnnnnnnnnnnnnnnnnnnnnnnnnnnnnnnnnnnnnnnnnnnnnnnnnnnnnnnnnnnnnnnnnnnnnnnnnnnnnnnnnnnnnnnnnnnnnnnnnnnnnnnnnnnnnnnnnnnnnnnnnnnnnnnnnnnnnnnnnnnnnnnnnnnnnnnnnnnnnnnnnnnnnnnnnnnnnnnnnnnnnnnnnnnnnnnnnnnnnnnnnnnnnnnnnnnnnnnnnnnnnnnnnnnnnnnnnnnnnnnnnnnnnnnnnnnnnnnnnnnnnnnnnnnnnnnnnnnnnnnnnnnnnnnnnnnnnnnnnnnnnnnnnnnnnnnnnnnnnnnnnnnnnnnnnnnnnnnnnnnnnnnnnnnnnnnnnnnnnnnnnnnnnnnnnnnnnnnnnnnnnnnnnnnnnnnnnnnnnnnnnnnnnnnnnnnnnnnnnnnnnnnnnnnnnnnnnnnnnnnnnnnnnnnnnnnnnnnnnnnnnnnnnnnnnnnnnnnnnnnnnnnnnnnnnnnnnnnnnnnnnnnnnnnnnnnnnnnnnnnnnnnnnnnnnnnnnnnnnnnnnnnnnnnnnnnnnnnnnnnnnnnnnnnnnnnnnnnnnnnnnnnnnnnnnnnnnnnnnnnnnnnnnnnnnnnnnnnnnnnnnnnnnnnnnnnnnnnnnnnnnnnnnnnnnnnnnnnnnnnnnnnnnnnnnnnnnnnnnnnnnnnnnnnnnnnnnnnnnnnnnnnnnnnnnnnnnnnnnnnnnnnnnnnnnnnnnnnnnnnnnnnnnnnnnnnnnnnnnnnnnnnnnnnnnnnnnnnnnnnnnnnnnnnnnnnnnnnnnnnnnnnnnnnnnnnnnnnnnnnnnnnnnnnnnnnnnnnnnnnnnnnnnnnnnnnnnnnnnnnnnnnnnnnnnnnnnnnnnnnnnnnnnnnnnnnnnnnnnnnnnnnnnnnnnnnnnnnnnnnnnnnnnnnnnnnnnnnnnnnnnnnnnnnnnnnnnnnnnnnnnnnnnnnnnnnnnnnnnnnnnnnnnnnnnnnnnnnnnnnnnnnnnnnnnnnnnnnnnnnnnnnnnnnnnnnnnnnnnnnnnnnnnnnnnnnnnnnnnnnnnnnnnnnnnnnnnnnnnnnnnnnnnnnnnnnnnnnnnnnnnnnnnnnnnnnnnnnnnnnnnnnnnnnnnnnnnnnnnnnnnnnnnnnnnnnnnnnnnnnnnnnnnnnnnnnnnnnnnnnnnnnnnnnnnnnnnnnnnnnnnnnnnnnnnnnnnnnnnnnnnnnnnnnnnnnnnnnnnnnnnnnnnnnnnnnnnnnnnnnnnnnnnnnnnnnnnnnnnnnnnnnnnnnnnnnnnnnnnnnnnnnnnnnnnnnnnnnnnnnnnnnnnnnnnnnnnnnnnnnnnnnnnnnnnnnnnnnnnnnnnnnnnnnnnnnnnnnnnnnnnnnnnnnnnnnnnnnnnnnnnnnnnnnnnnnnnnnnnnnnnnnnnnnnnnnnnnnnnnnnnnnnnnnnnnnnnnnnnnnnnnnnnnnnnnnnnnnnnnnnnnnnnnnnnnnnnnnnnnnnnnnnnnnnnnnnnnnnnnnnnnnnnnnnnnnnnnnnnnnnnnnnnnnnnnnnnnnnnnnnnnnnnnnnnnnnnnnnnnnnnnnnnnnnnnnnnnnnnnnnnnnnnnnnnnnnnnnnnnnnnnnnnnnnnnnnnnnnnnnnnnnnnnnnnnnnnnnnnnnnnnnnnnnnnnnnnnnnnnnnnnnnnnnnnnnnnnnnnnnnnnnnnnnnnnnnnnnnnnnnnnnnnnnnnnnnnnnnnnnnnnnnnnnnnnnnnnnnnnnnnnnnnnnnnnnnnnnnnnnnnnnnnnnnnnnnnnnnnnnnnnnnnnnnnnnnnnnnnnnnnnnnnnnnnnnnnnnnnnnnnnnnnnnnnnnnnnnnnnnnnnnnnnnnnnnnnnnnnnnnnnnnnnnnnnnnnnnnnnnnnnnnnnnnnnnnnnnnnnnnnnnnnnnnnnnnnnnnnnnnnnnnnnnnnnnnnnnnnnnnnnnnnnnnnnnnnnnnnnnnnnnnnnnnnnnnnnnnnnnnnnnnnnnnnnnnnnnnnnnnnnnnnnnnnnnnnnnnnnnnnnnnnnnnnnnnnnnnnnnnnnnnnnnnnnnnnnnnnnnnnnnnnnnnnnnnnnnnnnnnnnnnnnnnnnnnnnnnnnnnnnnnnnnnnnnnnnnnnnnnnnnnnnnnnnnnnnnnnnnnnnnnnnnnnnnnnnnnnnnnnnnnnnnnnnnnnnnnnnnnnnnnnnnnnnnnnnnnnnnnnnnnnnnnnnnnnnnnnnnnnnnnnnnnnnnnnnnnnnnnnnnnnnnnnnnnnnnnnnnnnnnnnnnnnnnnnnnnnnnnnnnnnnnnnnnnnnnnnnnnnnnnnnnnnnnnnnnnnnnnnnnnnnnnnnnnnnnnnnnnnnnnnnnnnnnnnnnnnnnnnnnnnnnnnnnnnnnnnnnnnnnnnnnnnnnnnnnnnnnnnnnnnnnnnnnnnnnnnnnnnnnnnnnnnnnnnnnnnnnnnnnnnnnnnnnnnnnnnnnnnnnnnnnnnnnnnnnnnnnnnnnnnnnnnnnnnnnnnnnnnnnnnnnnnnnnnnnnnnnnnnnnnnnnnnnnnnnnnnnnnnnnnnnnnnnnnnnnnnnnnnnnnnnnnnnnnnnnnnnnnnnnnnnnnnnnnnnnnnnnnnnnnnnnnnnnnnnnnnnnnnnnnnnnnnnnnnnnnnnnnnnnnnnnnnnnnnnnnnnnnnnnnnnnnnnnnnnnnnnnnnnnnnnnnnnnnnnnnnnnnnnnnnnnnnnnnnnnnnnnnnnnnnnnnnnnnnnnnnnnnnnnnnnnnnnnnnnnnnnnnnnnnnnnnnnnnnnnnnnnnnnnnnnnnnnnnnnnnnnnnnnnnnnnnnnnnnnnnnnnnnnnnnnnnnnnnnnnnnnnnnnnnnnnnnnnnnnnnnnnnnnnnnnnnnnnnnnnnnnnnnnnnnnnnnnnnnnnnnnnnnnnnnnnnnnnnnnnnnnnnnnnnnnnnnnnnnnnnnnnnnnnnnnnnnnnnnnnnnnnnnnnnnnnnnnnnnnnnnnnnnnnnnnnnnnnnnnnnnnnnnnnnnnnnnnnnnnnnnnnnnnnnnnnnnnnnnnnnnnnnnnnnnnnnnnnnnnnnnnnnnnnnnnnnnnnnnnnnnnnnnnnnnnnnnnnnnnnnnnnnnnnnnnnnnnnnnnnnnnnnnnnnnnnnnnnnnnnnnnnnnnnnnnnnnnnnnnnnnnnnnnnnnnnnnnnnnnnnnnnnnnnnnnnnnnnnnnnnnnnnnnnnnnnnnnnnnnnnnnnnnnnnnnnnnnnnnnnnnnnnnnnnnnnnnnnnnnnnnnnnnnnnnnnnnnnnnnnnnnnnnnnnnnnnnnnnnnnnnnnnnnnnnnnnnnnnnnnnnnnnnnnnnnnnnnnnnnnnnnnnnnnnnnnnnnnnnnnnnnnnnnnnnnnnnnnnnnnnnnnnnnnnnnnnnnnnnnnnnnnnnnnnnnnnnnnnnnnnnnnnnnnnnnnnnnnnnnnnnnnnnnnnnnnnnnnnnnnnnnnnnnnnnnnnnnnnnnnnnnnnnnnnnnnnnnnnnnnnnnnnnnnnnnnnnnnnnnnnnnnnnnnnnnnnnnnnnnnnnnnnnnnnnnnnnnnnnnnnnnnnnnnnnnnnnnnnnnnnnnnnnnnnnnnnnnnnnnnnnnnnnnnnnnnnnnnnnnnnnnnnnnnnnnnnnnnnnnnnnnnnnnnnnnnnnnnnnnnnnnnnnnnnnnnnnnnnnnnnnnnnnnnnnnnnnnnnnnnnnnnnnnnnnnnnnnnnnnnnnnnnnnnnnnnnnnnnnnnnnnnnnnnnnnnnnnnnnnnnnnnnnnnnnnnnnnnnnnnnnnnnnnnnnnnnnnnnnnnnnnnnnnnnnnnnnnnnnnnnnnnnnnnnnnnnnnnnnnnnnnnnnnnnnnnnnnnnnnnnnnnnnnnnnnnnnnnnnnnnnnnnnnnnnnnnnnnnnnnnnnnnnnnnnnnnnnnnnnnnnnnnnnnnnnnnnnnnnnnnnnnnnnnnnnnnnnnnnnnnnnnnnnnnnnnnnnnnnnnnnnnnnnnnnnnnnnnnnnnnnnnnnnnnnnnnnnnnnnnnnnnnnnnnnnnnnnnnnnnnnnnnnnnnnnnnnnnnnnnnnnnnnnnnnnnnnnnnnnnnnnnnnnnnnnnnnnnnnnnnnnnnnnnnnnnnnnnnnnnnnnnnnnnnnnnnnnnnnnnnnnnnnnnnnnnnnnnnnnnnnnnnnnnnnnnnnnnnnnnnnnnnnnnnnnnnnnnnnnnnnnnnnnnnnnnnnnnnnnnnnnnnnnnnnnnnnnnnnnnnnnnnnnnnnnnnnnnnnnnnnnnnnnnnnnnnnnnnnnnnnnnnnnnnnnnnnnnnnnnnnnnnnnnnnnnnnnnnnnnnnnnnnnnnnnnnnnnnnnnnnnnnnnnnnnnnnnnnnnnnnnnnnnnnnnnnnnnnnnnnnnnnnnnnnnnnnnnnnnnnnnnnnnnnnnnnnnnnnnnnnnnnnnnnnnnnnnnnnnnnnnnnnnnnnnnnnnnnnnnnnnnnnnnnnnnnnnnnnnnnnnnnnnnnnnnnnnnnnnnnnnnnnnnnnnnnnnnnnnnnnnnnnnnnnnnnnnnnnnnnnnnnnnnnnnnnnnnnnnnnnnnnnnnnnnnnnnnnnnnnnnnnnnnnnnnnnnnnnnnnnnnnnnnnnnnnnnnnnnnnnnnnnnnnnnnnnnnnnnnnnnnnnnnnnnnnnnnnnnnnnnnnnnnnnnnnnnnnnnnnnnnnnnnnnnnnnnnnnnnnnnnnnnnnnnnnnnnnnnnnnnnnnnnnnnnnnnnnnnnnnnnnnnnnnnnnnnnnnnnnnnnnnnnnnnnnnnnnnnnnnnnnnnnnnnnnnnnnnnnnnnnnnnnnnnnnnnnnnnnnnnnnnnnnnnnnnnnnnnnnnnnnnnnnnnnnnnnnnnnnnnnnnnnnnnnnnnnnnnnnnnnnnnnnnnnnnnnnnnnnnnnnnnnnnnnnnnnnnnnnnnnnnnnnnnnnnnnnnnnnnnnnnnnnnnnnnnnnnnnnnnnnnnnnnnnnnnnnnnnnnnnnnnnnnnnnnnnnnnnnnnnnnnnnnnnnnnnnnnnnnnnnnnnnnnnnnnnnnnnnnnnnnnnnnnnnnnnnnnnnnnnnnnnnnnnnnnnnnnnnnnnnnnnnnnnnnnnnnnnnnnnnnnnnnnnnnnnnnnnnnnnnnnnnnnnnnnnnnnnnnnnnnnnnnnnnnnnnnnnnnnnnnnnnnnnnnnnnnnnnnnnnnnnnnnnnnnnnnnnnnnnnnnnnnnnnnnnnnnnnnnnnnnnnnnnnnnnnnnnnnnnnnnnnnnnnnnnnnnnnnnnnnnnnnnnnnnnnnnnnnnnnnnnnnnnnnnnnnnnnnnnnnnnnnnnnnnnnnnnnnnnnnnnnnnnnnnnnnnnnnnnnnnnnnnnnnnnnnnnnnnnnnnnnnnnnnnnnnnnnnnnnnnnnnnnnnnnnnnnnnnnnnnnnnnnnnnnnnnnnnnnnnnnnnnnnnnnnnnnnnnnnnnnnnnnnnnnnnnnnnnnnnnnnnnnnnnnnnnnnnnnnnnnnnnnnnnnnnnnnnnnnnnnnnnnnnnnnnnnnnnnnnnnnnnnnnnnnnnnnnnnnnnnnnnnnnnnnnnnnnnnnnnnnnnnnnnnnnnnnnnnnnnnnnnnnnnnnnnnnnnnnnnnnnnnnnnnnnnnnnnnnnnnnnnnnnnnnnnnnnnnnnnnnnnnnnnnnnnnnnnnnnnnnnnnnnnnnnnnnnnnnnnnnnnnnnnnnnnnnnnnnnnnnnnnnnnnnnnnnnnnnnnnnnnnnnnnnnnnnnnnnnnnnnnnnnnnnnnnnnnnnnnnnnnnnnnnnnnnnnnnnnnnnnnnnnnnnnnnnnnnnnnnnnnnnnnnnnnnnnnnnnnnnnnnnnnnnnnnnnnnnnnnnnnnnnnnnnnnnnnnnnnnnnnnnnnnnnnnnnnnnnnnnnnnnnnnnnnnnnnnnnnnnnnnnnnnnnnnnnnnnnnnnnnnnnnnnnnnnnnnnnnnnnnnnnnnnnnnnnnnnnnnnnnnnnnnnnnnnnnnnnnnnnnnnnnnnnnnnnnnnnnnnnnnnnnnnnnnnnnnnnnnnnnnnnnnnnnnnnnnnnnnnnnnnnnnnnnnnnnnnnnnnnnnnnnnnnnnnnnnnnnnnnnnnnnnnnnnnnnnnnnnnnnnnnnnnnnnnnnnnnnnnnnnnnnnnnnnnnnnnnnnnnnnnnnnnnnnnnnnnnnnnnnnnnnnnnnnnnnnnnnnnnnnnnnnnnnnnnnnnnnnnnnnnnnnnnnnnnnnnnnnnnnnnnnnnnnnnnnnnnnnnnnnnnnnnnnnnnnnnnnnnnnnnnnnnnnnnnnnnnnnnnnnnnnnnnnnnnnnnnnnnnnnnnnnnnnnnnnnnnnnnnnnnnnnnnnnnnnnnnnnnnnnnnnnnnnnnnnnnnnnnnnnnnnnnnnnnnnnnnnnnnnnnnnnnnnnnnnnnnnnnnnnnnnnnnnnnnnnnnnnnnnnnnnnnnnnnnnnnnnnnnnnnnnnnnnnnnnnnnnnnnnnnnnnnnnnnnnnnnnnnnnnnnnnnnnnnnnnnnnnnnnnnnnnnnnnnnnnnnnnnnnnnnnnnnnnnnnnnnnnnnnnnnnnnnnnnnnnnnnnnnnnnnnnnnnnnnnnnnnnnnnnnnnnnnnnnnnnnnnnnnnnnnnnnnnnnnnnnnnnnnnnnnnnnnnnnnnnnnnnnnnnnnnnnnnnnnnnnnnnnnnnnnnnnnnnnnnnnnnnnnnnnnnnnnnnnnnnnnnnnnnnnnnnnnnnnnnnnnnnnnnnnnnnnnnnnnnnnnnnnnnnnnnnnnnnnnnnnnnnnnnnnnnnnnnnnnnnnnnnnnnnnnnnnnnnnnnnnnnnnnnnnnnnnnnnnnnnnnnnnnnnnnnnnnnnnnnnnnnnnnnnnnnnnnnnnnnnnnnnnnnnnnnnnnnnnnnnnnnnnnnnnnnnnnnnnnnnnnnnnnnnnnnnnnnnnnnnnnnnnnnnnnnnnnnnnnnnnnnnnnnnnnnnnnnnnnnnnnnnnnnnnnnnnnnnnnnnnnnnnnnnnnnnnnnnnnnnnnnnnnnnnnnnnnnnnnnnnnnnnnnnnnnnnnnnnnnnnnnnnnnnnnnnnnnnnnnnnnnnnnnnnnnnnnnnnnnnnnnnnnnnnnnnnnnnnnnnnnnnnnnnnnnnnnnnnnnnnnnnnnnnnnnnnnnnnnnnnnnnnnnnnnnnnnnnnnnnnnnnnnnnnnnnnnnnnnnnnnnnnnnnnnnnnnnnnnnnnnnnnnnnnnnnnnnnnnnnnnnnnnnnnnnnnnnnnnnnnnnnnnnnnnnnnnnnnnnnnnnnnnnnnnnnnnnnnnnnnnnnnnnnnnnnnnnnnnnnnnnnnnnnnnnnnnnnnnnnnnnnnnnnnnnnnnnnnnnnnnnnnnnnnnnnnnnnnnnnnnnnnnnnnnnnnnnnnnnnnnnnnnnnnnnnnnnnnnnnnnnnnnnnnnnnnnnnnnnnnnnnnnnnnnnnnnnnnnnnnnnnnnnnnnnnnnnnnnnnnnnnnnnnnnnnnnnnnnnnnnnnnnnnnnnnnnnnnnnnnnnnnnnnnnnnnnnnnnnnnnnnnnnnnnnnnnnnnnnnnnnnnnnnnnnnnnnnnnnnnnnnnnnnnnnnnnnnnnnnnnnnnnnnnnnnnnnnnnnnnnnnnnnnnnnnnnnnnnnnnnnnnnnnnnnnnnnnnnnnnnnnnnnnnnnnnnnnnnnnnnnnnnnnnnnnnnnnnnnnnnnnnnnnnnnnnnnnnnnnnnnnnnnnnnnnnnnnnnnnnnnnnnnnnnnnnnnnnnnnnnnnnnnnnnnnnnnnnnnnnnnnnnnnnnnnnnnnnnnnnnnnnnnnnnnnnnnnnnnnnnnnnnnnnnnnnnnnnnnnnnnnnnnnnnnnnnnnnnnnnnnnnnnnnnnnnnnnnnnnnnnnnnnnnnnnnnnnnnnnnnnnnnnnnnnnnnnnnnnnnnnnnnnnnnnnnnnnnnnnnnnnnnnnnnnnnnnnnnnnnnnnnnnnnnnnnnnnnnnnnnnnnnnnnnnnnnnnnnnnnnnnnnnnnnnnnnnnnnnnnnnnnnnnnnnnnnnnnnnnnnnnnnnnnnnnnnnnnnnnnnnnnnnnnnnnnnnnnnnnnnnnnnnnnnnnnnnnnnnnnnnnnnnnnnnnnnnnnnnnnnnnnnnnnnnnnnnnnnnnnnnnnnnnnnnnnnnnnnnnnnnnnnnnnnnnnnnnnnnnnnnnnnnnnnnnnnnnnnnnnnnnnnnnnnnnnnnnnnnnnnnnnnnnnnnnnnnnnnnnnnnnnnnnnnnnnnnnnnnnnnnnnnnnnnnnnnnnnnnnnnnnnnnnnnnnnnnnnnnnnnnnnnnnnnnnnnnnnnnnnnnnnnnnnnnnnnnnnnnnnnnnnnnnnnnnnnnnnnnnnnnnnnnnnnnnnnnnnnnnnnnnnnnnnnnnnnnnnnnnnnnnnnnnnnnnnnnnnnnnnnnnnnnnnnnnnnnnnnnnnnnnnnnnnnnnnnnnnnnnnnnnnnnnnnnnnnnnnnnnnnnnnnnnnnnnnnnnnnnnnnnnnnnnnnnnnnnnnnnnnnnnnnnnnnnnnnnnnnnnnnnnnnnnnnnnnnnnnnnnnnnnnnnnnnnnnnnnnnnnnnnnnnnnnnnnnnnnnnnnnnnnnnnnnnnnnnnnnnnnnnnnnnnnnnnnnnnnnnnnnnnnnnnnnnnnnnnnnnnnnnnnnnnnnnnnnnnnnnnnnnnnnnnnnnnnnnnnnnnnnnnnnnnnnnnnnnnnnnnnnnnnnnnnnnnnnnnnnnnnnnnnnnnnnnnnnnnnnnnnnnnnnnnnnnnnnnnnnnnnnnnnnnnnnnnnnnnnnnnnnnnnnnnnnnnnnnnnnnnnnnnnnnnnnnnnnnnnnnnnnnnnnnnnnnnnnnnnnnnnnnnnnnnnnnnnnnnnnnnnnnnnnnnnnnnnnnnnnnnnnnnnnnnnnnnnnnnnnnnnnnnnnnnnnnnnnnnnnnnnnnnnnnnnnnnnnnnnnnnnnnnnnnnnnnnnnnnnnnnnnnnnnnnnnnnnnnnnnnnnnnnnnnnnnnnnnnnnnnnnnnnnnnnnnnnnnnnnnnnnnnnnnnnnnnnnnnnnnnnnnnnnnnnnnnnnnnnnnnnnnnnnnnnnnnnnnnnnnnnnnnnnnnnnnnnnnnnnnnnnnnnnnnnnnnnnnnnnnnnnnnnnnnnnnnnnnnnnnnnnnnnnnnnnnnnnnnnnnnnnnnnnnnnnnnnnnnnnnnnnnnnnnnnnnnnnnnnnnnnnnnnnnnnnnnnnnnnnnnnnnnnnnnnnnnnnnnnnnnnnnnnnnnnnnnnnnnnnnnnnnnnnnnnnnnnnnnnnnnnnnnnnnnnnnnnnnnnnnnnnnnnnnnnnnnnnnnnnnnnnnnnnnnnnnnnnnnnnnnnnnnnnnnnnnnnnnnnnnnnnnnnnnnnnnnnnnnnnnnnnnnnnnnnnnnnnnnnnnnnnnnnnnnnnnnnnnnnnnnnnnnnnnnnnnnnnnnnnnnnnnnnnnnnnnnnnnnnnnnnnnnnnnnnnnnnnnnnnnnnnnnnnnnnnnnnnnnnnnnnnnnnnnnnnnnnnnnnnnnnnnnnnnnnnnnnnnnnnnnnnnnnnnnnnnnnnnnnnnnnnnnnnnnnnnnnnnnnnnnnnnnnnnnnnnnnnnnnnnnnnnnnnnnnnnnnnnnnnnnnnnnnnnnnnnnnnnnnnnnnnnnnnnnnnnnnnnnnnnnnnnnnnnnnnnnnnnnnnnnnnnnnnnnnnnnnnnnnnnnnnnnnnnnnnnnnnnnnnnnnnnnnnnnnnnnnnnnnnnnnnnnnnnnnnnnnnnnnnnnnnnnnnnnnnnnnnnnnnnnnnnnnnnnnnnnnnnnnnnnnnnnnnnnnnnnnnnnnnnnnnnnnnnnnnnnnnnnnnnnnnnnnnnnnnnnnnnnnnnnnnnnnnnnnnnnnnnnnnnnnnnnnnnnnnnnnnnnnnnnnnnnnnnnnnnnnnnnnnnnnnnnnnnnnnnnnnnnnnnnnnnnnnnnnnnnnnnnnnnnnnnnnnnnnnnnnnnnnnnnnnnnnnnnnnnnnnnnnnnnnnnnnnnnnnnnnnnnnnnnnnnnnnnnnnnnnnnnnnnnnnnnnnnnnnnnnnnnnnnnnnnnnnnnnnnnnnnnnnnnnnnnnnnnnnnnnnnnnnnnnnnnnnnnnnnnnnnnnnnnnnnnnnnnnnnnnnnnnnnnnnnnnnnnnnnnnnnnnnnnnnnnnnnnnnnnnnnnnnnnnnnnnnnnnnnnnnnnnnnnnnnnnnnnnnnnnnnnnnnnnnnnnnnnnnnnnnnnnnnnnnnnnnnnnnnnnnnnnnnnnnnnnnnnnnnnnnnnnnnnnnnnnnnnnnnnnnnnnnnnnnnnnnnnnnnnnnnnnnnnnnnnnnnnnnnnnnnnnnnnnnnnnnnnnnnnnnnnnnnnnnnnnnnnnnnnnnnnnnnnnnnnnnnnnnnnnnnnnnnnnnnnnnnnnnnnnnnnnnnnnnnnnnnnnnnnnnnnnnnnnnnnnnnnnnnnnnnnnnnnnnnnnnnnnnnnnnnnnnnnnnnnnnnnnnnnnnnnnnnnnnnnnnnnnnnnnnnnnnnnnnnnnnnnnnnnnnnnnnnnnnnnnnnnnnnnnnnnnnnnnnnnnnnnnnnnnnnnnnnnnnnnnnnnnnnnnnnnnnnnnnnnnnnnnnnnnnnnnnnnnnnnnnnnnnnnnnnnnnnnnnnnnnnnnnnnnnnnnnnnnnnnnnnnnnnnnnnnnnnnnnnnnnnnnnnnnnnnnnnnnnnnnnnnnnnnnnnnnnnnnnnnnnnnnnnnnnnnnnnnnnnnnnnnnnnnnnnnnnnnnnnnnnnnnnnnnnnnnnnnnnnnnnnnnnnnnnnnnnnnnnnnnnnnnnnnnnnnnnnnnnnnnnnnnnnnnnnnnnnnnnnnnnnnnnnnnnnnnnnnnnnnnnnnnnnnnnnnnnnnnnnnnnnnnnnnnnnnnnnnnnnnnnnnnnnnnnnnnnnnnnnnnnnnnnnnnnnnnnnnnnnnnnnnnnnnnnnnnnnnnnnnnnnnnnnnnnnnnnnnnnnnnnnnnnnnnnnnnnnnnntataccacgccaggcgggccgggttaccggcgcgccacgccatccaccacattatggcaccatgatgggtggtgacgggacgcgtcgaccagaggcggcggcaaggtatgataagtttctgatgcgcgttcgcgtctcaggagaaccacggcagtgatcacggaaacggtgtacggaaagcaggccgtccgggcctgcctggcggccggcaagcggcagatctaccggctgcgcgccctcgcggacagccgggacgtggaagacatcctccgcctggcagaccggaccggggtgccggtagagcgggtatccaaggacgcgctgaaccggctctcagccaacggcgcgcaccagggcgtcctgctggaagccgccccggttccccgggtgtcgctggaagcctggctggacggcctgcgcgccccccggcaggtcgcggtggccctggacggtatcgaggatccccggaatttcggggcgatcatccgctcggccgcggcattcggcgcggcgggggtgttgttcaccgaacgacggcaggcgccgttgtccccggcggccgtcaaagccgccgcggggggggtggaatacgttccgctggtgacggtgaagaatcttcctgacgccctgggtcgcctgcgggacgcgggcttctggtcgacaggcctcgacatggccggggatcgggacctctggtccgcggacctttccggacgggtcctgctggtcgcggggggagaggggcgcggactgcgcaggctggtgcgggaacgctgcgatttcctggcgcggattcccctgtggccgggggttgaaagcctcaacgtgtcggtggccacggcgatcgcgctggcggccgcgcggcggggagaatcacccgcccccccctacaggccataggcgcgcaacttgtaaatcaggctgcgtcggctgatacccagcagctgggcggccttcgtccggtttcccccggttttttccagggcttcccggatcgcgcgccgctgggcttcttccataaggggccgccccggggcatcgggcctgtccgaacggggcgcgttccgcagggcatcgggcaggtcctcgggtaagatcatgtcgccatcggccagaatggccgcccgttccaccacgttgcgcagttcgcgcgcgttgcccggccaggaccaggccgccaggagacgggccgccgcgggggataacctctttttccagggccccaggaacagttccgcgaggggaataatgtcttctcgccgttcgcgcaaaggcggaatccgcaaagggaacacgttgagccggtaaaacaggtcttcccgaaaccggcccgccgtaacttcccgctccaggtcccggttggtggcggcgatcacccggacattcgcccgccggtccgtggtgcccccaatccgccggaattcacccgtctccagcacgcgcaacagtttcggctgcagggacaggggcagttccccaatttcatccaggaacagcgtgccgccgtcggcctcttcgaacctgcccgcgcggctggtatccgcgccggtaaacgcccctttctcgtggccgaacaactcgctttcggccagttgctcaggcaccgcccccatgttcaccgtgaccatgggaccgctggcccggttgcttcgggcatggatcagccgggcgaagatttccttgcccgtgccgctttcgccggtgagcaggacggcggcagacgtgggggccacccggaaggcctggcgaaacagattacgcagggtctcgctttcggccacgatcccggggggaaggtcgagggcatcctggtcgcgaggaccaaggccaaggcaatcctcgatcaccgtgagcagttcgtccaggtcgacgggtttctccaggtagtccgccgcgcccattttgatggcggccacggcatcccgcacgtcgatataggccgtcagcaagacgaccaccggcggccgcggcagttgccggatcttgtccagcgcctccaggccactcatgccgggcatgcgcacgtccagcagcatgagatcacatcggggagcgagttccacggcctgcctgccgtcttccccacacagcacgcgccacccggctcgctggagggtttcctccagtaaccgacgctgcgccggttcgtcgtctacgaccccgatcacggggggtatggtcatttcaccttttccgatcacgattccccgcgctccgggggttccatcgcgttcatgggtaacgaaacccgctttacgccgcacaaccggacctcggtgccctgtccgggcacagatcgaatcgagaggcgccaaccatgggcgcgggcgatttcctggacgatacttaaccccaggccggtaccctgttcaaatttaccaaaaaagggctccgtcaccctcggcaggtcttcaggatcaatgcccgtcccagtatccaccaccgcgagcgccaccgtgtcccgggtttccggctccaccttcaggataatcgaatctcccggctttccacacgctttcagcgcgttcaaaagaaggttcatcaacgcccgtcgcaacaggtcggcatccgccagcacgcccccctccaactgaacggttaaccgcacctgttgccgcgccgcttcatcccgtaacaggcgttccagggtctggcccagttccccgaggttcacgggttcaggccggggctcgggggggcgggcatatcggaggaaaagattgatccggcgggcggcgcgatcggtttcatccatcagggccgcggccttctccgccaggggagatcccaggggcgcgctgtccagaatggattgcgccagtccacgggccacgccaaggggattcttgatctcgtgggcgagtcccgcgcccagccgggccaggcgggcctgacgcgccacttcctcctgggcctggaccagatcctgacgcatccgtcgctggcggcgcgacgcggcaacagccaacacggccacggcggctgccagcatacccccaagggcgatcagccagccatcccgacgtacctgccacacgtagttatcctcgccccggtccagccagagttcaacgatcaacggtcccggtggtaaaggacgccagggagtatccggccccctggattccatccatcttggaccatgccccggtccccggggcgcgccacgtccaggcatgcccgccgcgggcaaatctgtgatgtcgcgggtaaaccgctccaggtcgggcgaagggtgaggccctggcgtctcaggcacgcccgtggacaataacgtagtccccgcggcatcaaccagccgtaagccagccacttccggcaggctatgcaacgcctcgaataccgtctccacgcccggcacaatcagcgatgggccaggccgcatgtgggcccgtaccccctgctcggcaaggtccagcaggatttcgacccgggcctgctggataaacgcggcctgccgcaagcggtagcgggtgatcccggccgccatgaacagcaccatggcctgcagcagcaacgttaccacaagccacggaagcgcgcgtcgccaagccgtgttcataccaacccgtacctcatcttcccattatccacgcccggaaccattcgaacctatagaccggcgcggacggcctccatggaccgcccgcgcccgatgccgttcggccgcgtgccactcagaaccggccacgtccccagggaccgccatagccccggcctggaccccggaacccccgggccggcggaccagccgggcggttgtcactccagccgtcgccgttctcgtcccggaagttgtcgcaacggccgtctccatccgcgtccgcgtaacccgggcatcccggcgggcatccccgcgccccacggccggcaccggtaccatgccacgccggtggcggtgaaggcgtgccatcaggaccccagccctggccccggaatccccgggccggcggaccagcagggcggttgtcacaccagccgttgccgttctcgtcccggaagttatcacaacggccgtctccatccgcgtccgcgtaacccggacatcccggcgggcatcctcgcaccccacggccggcacccgtgccatgccaaggcggcgggggtggaggcgtgccatcagaaccccagccctggcctcggaatccccggactggcggaccagccgggcggttgtcacaccagccgtcgccgttctcgtcccggaagttgtcacaacggccgtctccatccgcgtccgcgtaatccgggcatcccggggggcaaccccgggtaccccgaccggcacccatgccatgccaaggcggcgggggtgggggcggtggagtgccctgatccacgttctcccggggaggagccggcgctccggaatcggccgggcttggcgcctgctgggcccacgccgtcaccatcaacccggccgccaacaagacggcaccccctattccaaggatccacaatgttttacgtgtcttcatggtcgcgctccttctggtcgcgccatctcgtcccgaaatggcttccagagaacagggggcaattaccgtgccggagtcaacttcgtgaaaacagcgacttttcaggtgatttccggtccctggcttgccgggccgcgcagattttgcgcggtgccgcgcaaatcacaaccgcgccgcggtcatatccggcggcggcacaagatcccggttccgtacccgttcctccggcagcaccgcgcgcaagtccctgaccgatggataggtaatcagcacggtgcgtcgcttcccgtagaacacgacaaacgccccgcaggccgccgcagccgcgcctccccggagcaccacctccgcgatatgctccacagaccccgcgcccccacccgcaatcaccggaatgttcaccgcgtcaaccaccctgcgcacgagatctacatcgtaaccgctcatggtgccgtcgcggtggatcgctgtaaccagcagttcccccgcgcccgcggcttcggcgatccgggccgcttccacgggatcaatgccggcgggccgggttccgcacgccgtgaatacctcgtaacgcccgtctggatgacgcagcgcgtcaatggagaccagcatgcactggctgccgaagcgggacgcgcccgattctatgaggcagggattctccacggcggcggtgttgagcaccacccggtcagcgcccgcttccagcaggcgacgcatgtcatccagcgatcgcacgcccccgcccgcggcgaacggcatcgtggtttcacgggcgatttcctggacatagtccacccgcgtggggcggcagttgggggtagccacgatgtccaccagcaccagttcatccacccggtgcgcgttgaacacccgggccgcgtttcggggacagcccacgtatacccggttgcggaatcccacgcccttttccaggccgcgcgcgccgagcagcaggacgggaatgacccgcgtcttatgcatacgtcctcctcccggcgaattccagaaagttccggagcagacgcaagccgttgacgtaactcttttcagggtgaaactggacccccaggatatggtcccgtgccacggccgccgcgaaagataccccatgtgaactccggcagaggacgcgatcttccggcaaggcgtccacgtgataggaatgggcgaaataaaatgtggctccggcaggaatcccggcgaaaatcgggtgttccccgcgatcgataaggtcgttccagccgatatgcggcaggcgcgcgccgctttcgggtggaggacacagccgtcggaccacgcccccgtccagccagttcaggcccggcgtgtttcctccttcttctccccgggtagccatgagttgcatgcccaggcagatgcccagtacgggaacccggcgctccagcacggcttcacgcaacggccccagccatccgccccgatccagaaacatcatcgcctcggcgaaggcccccacgccgggtaaaaccagcgcgtccgccccagccagcgaaacgggatccctgccgaggatcacctccgttccgagcgattcgaaggcccgggtgacggatcccaggttcccggccccgtagtcgatgatggtcactttcatggttgccccgccgcttcctcgcgcgattgaagcagccgcgtctcacccaggcgcacctgcaagggaaacgaatccttccggctccagctgaacgcgtcatccagcaggtcgcgggtatcggcgaaacggcccaggttcacgatccgccgtcccgacgcgccggcgtgaatagccagcaggtcacccgcggcgaacacggtatcgaaactggttccgtcttccgcctgaacgagcatgggctgttccaggatgctcagcagttcggccagcagggatacggtaatctccggcgtgacgatgagcacggaggtccatccgtctggctggggcttgacggccacgcaaacctttcccccatccacgtaatgggccaacgcgtccgcgtccgggtcttccaccgcgaagcggggagcccagggtgtcgcgtcgccccaggtcgcgtcccgcttgagataggttccgtcaagcacataacgggcggccgtgccccccggccccgcgtccacgacccggatacccgtgatctccgtgatacccgccacagcagaaccctgttcatcgaaatatcccggcgcgtacagccagatcgcgcaggcaccttcccgggctaggcgcgcccgcagcgcccggcgttccgactgggtgagacgaaaagcattggcgaacaggtatactggggtcggcgtgttgacatcctcaaacaagtcctgcagcagaacggtccgggcgggcgcgccactgcggtacacggcatcccgggctgccgccacggtccgggcgtaaagggaggtaccggcgcgcgtcacgaacgccgcgcgttcgctgacgaccagcgtgaccccgggaagaggttccgctggcggaggttccgtccgggggcgtacccgctggtagatcccggcaagccgtcccagctcctgccactggtcgggatcgacaagccagccacgggccagcggatccgaccaggtcaggccgaatccataaacaagggcctgcgcgaagtttcgacgccgcacgtccagcacatcttccagccggatccccttatcccgctcgaacgcgccggtttcggcgttccgttccatgcccgagcggatatcatccaccacgacgtagcgcatgccgcggtcggtgagactctgggccggggccgcgaggtgccccgcgccccccaggccgcgatccccctgggccaggggtgcgatgatgccgctcaagtcgctgtggagcagggcgcccagggcgaaatgtcccgacgcggcgtccgatgcttcgagggtatacccgtacggggcgagaatcagcggcgcgatcaacgagaccgcgcgggtatgggccaccagggcggccagggcgtccgctaccgaatctgaactgtatcgcaggaaatcgctcagcgggcgatcctggggaaacaccatgaacacgccttcgtccggcccgggacccgggggggcgggaatgctaacgctgctcacgtcgaattccggcatgtgccacacctgggcgacgcgcgtctcggtctggtactggcgcaccagccagtcccggaaaccctggcggttgacttccgaccggtcaaatccagctggcaggcgccactggtgatccagcagcccacacagcgcgtagcccaggatccgggaactgaccgcgctgccttccaccgcgccaagcagggcggtcaggccgtccttggccgcgttgatccatgcctgagacgccgccgacggcaaagcgaggggatcggccgtacccaccatcgcctcggcgggattcgcgctcagccactccggcggcgggttcacgtccaccgtcagcagaaaggtcgcttccggatccagtacgatcacctggttgacccgttccacggggtcgggcggctccggcgcgccttcccagcgcagggagaccggtaacaggtactggtgaactcccgcggcagcggccagccggatctcttcggccgcgatgggccaggtctctgccgaaaacccgggaatgctcaggcacaagaggggcgcgtctggattcgcttccaccaccggtttgccgccggccggggtcgttcccgactctgcaaccggcacgccacccggagcctggggcaggtcatccggcaccgaccaccgcgcgaccagaattcccagcactaccgcgacacccagcatgcctgccaggagcaggcccgccagcgcgagtttcacctttgtcatctatcccaactccttgccggaagaatggtctttcccactccgtccatgactacgcctcgagaaatcgcgccaccgggtcaggctccagcgtcacccacgcgcccgtgtcccatggcagcccggattcctcggcccgtgccatgccggacgcctcgagtcggatccgcttagcggactcctggagagcgtacgtctcgcccggcctggccagcaccgcggatggcgtgtcatcctgccagatcgtcacaggacccggaaaaacaccccttaacggggcttccagccggatccgcagccctgccggtggatcttccagccacgcggcgcgactgatcgcccgggctgatcccgtcaccggcgggcgcaggggataaaacccccggactggtaggaccacctcggggccaaaaaggggttcccggcgcgtcaaccgtccatgccgggcgcgatccaaccccaggcgatccatggctcgccggtgcgcgatcgtctcccttgtcgcgagaaggacgtcgtaccatgcccggccatgggccagccatttccaccagtccccatcccgcgcggccgcgcccaacgagcggagttccgccgcgagcgtcgcccatgccgcaccgggcagtgccgaaaccggcgtgttgcgcgccagcagcaagagccgattccgggttgcaagaaaatatttccgccgcgcgcctggcccatggcccatcgacgcactgaacttatgttctaccacggcttcggggcaggtgaccacccgccagccgtcatcccacaggcgcaggcacaggtccaggtcgtccaggtaaatgccgaaccgttcgggaaacagccccacccgttccagggcgtccagccgcagcaggcaggcccctccgcacgcgcctgccacctcttcaggtggaagcaccatgccgtccagccgtcccgcgccgatatcccagcccgcccccgcccggctcatggcgatccccaggctgttcaccacccatggctggtcgaacagtaccattttcagggctaccgcgcccatgcgtggatccgattcggcccggtccacggcgcgcgacaacgcgtccggcgcaatgcgggtatcgttattcagcagcagggcgtaccgcgcgccggcatccatggcccgacgcaggcccgcgttgttaccgccgctccacccccggtttcggtccagtgccagcaaggcacaccgcggatccccaccccatcgttcccggaaaaacgtcaccgaaccgtccgtgctcccgttatccaccagaacggcctcgaaatccgggtaatccgacgccagcaggctgtcaaagcacgcttcgaggtgctcccgcccgttccagttgatgaccagtacatgtacccgcggcgtgtcacccatgggccagagtataccagttcaggtaacccggagatgctttcagggaaccaggcttgctgttcagggacatctgtcgaacaataggacaaaaaatttttttgaatccgccttatgtttccgtacaccggaattttacggaggtatgatcaacataaagacgcactcatacctctttgggaggtcaggacacgacgtatgatcagcattcccggcaagccggattattggccatggctctcggtcattttatccttccgtttgttaacatacccgcttggtatcgccttgcgtgtaaagtcccggcctgaaatcggcagaaggagaaaacgccatgagtgaaacatttcgtttcaacctgctcgatgatccctggattccgctcgtgtatcgggatggaacctgtcagcgcgtcggaatactgcaagccatgaaggatgcccaccttgcctggcgggtcgatacgggcaatcccctggacactttcgccattacccgactgttgctggccgtcctgtactggtgtcgcggcaacccaccggatgatctgctcaccaccctcgacgcgccctttccgggcaactggtttgataaagcgcgcgacaacgcaaggttcttcgaactgctcgcggatgacgccccccgattctttcaggatcaaaatcttcgttcgccaaagaaatatcatcccgtgatgaacctcattcatgagataccgtccggacgcaactatccccattttttccacgtggcagacggtgaaaactggctgtcgccggcggcttgtgccattggcctggttcgcttgcctgtcttcactaccgtgggcggacaaggaaaaagttatggtatcaacaagacgccccccgtgtacctgctgcccgaggctttttcgctagccgggacgttgcggctctcctgggcggttttacgtgatcggcaagcaggttctccggcttgggaaatcccccttcaaacacttcagggagaagtgccattactgactggtctgacgtggttacctcgccgggtctggctgcttcccatacccgcggagaacggtgcccggtgcgtgtttaccggtgacctggtcaaggtgggcattcagcagatggcctttgaggggcgtgaaaagagcgatgtaaacgaggggtatcagtggacagatccgcatgcgatcggaaatctgcagaccatcgacttgttcaatctgtcaaaatatccggacgctctttcccggcaatggcaggacaacctgctcaaaattcacgatgccatctctcatatcgcgccgtggcgcgaccaccggaaatggctcctggtcgatttcaacaccaaccaggcaaagttccaggacgcgcgggccatccggatcgaccttggagcaccagggacaattccggacgacgtgaatccggaggcatccaccccaaccctgaagatcctgttgacaaaatggaaccaagaacggaaaaaacacctgtatgacttccagtgtgcaatcgtccaggcccaggcaagggatgaagaggccaagaaaaaaagggccggtcaggtcaaaaaatcgggcctggcaaaattcgcgctggtacaggccggttatccatcggaggtggggcgcattgccgactggcgcgaactgctggaacagcaacccgccgcgctgtacagggttcccgagcggtccatggcgcctgtctttttccctggggtttccgttcgtgacgtgatcagccagcgcgacctgcagtctcgcccctttctggacatgaaggagtacacccgcgaagcctccgcgggcgtgaagaaattcgtttcccgcctcgtagatcgcaagaatgggatcatctcgctgttgcgtagcagcgcgggcaccggcatcgatcgcgatgccatcgcttttgacctgttcacgggactctggtggcccatacggcagcaccacaaggatacgcctcgccggcatgtcgcctggctggtgtgcaaactttacggctggacgcccctgccccagcaaaacggaaaccgcctgccccgtcaactcgcccgcgcggtcgtgcaacaggcccgcgagaatgcgaaacggggaaacgaaatccgcgaatcgatcatggatcgtttcgatctcttgctgaacacccccgtggaacgaatcgagcctgagttggaatgggcccttgccaccgtggccgatgccctcgacaatcccggtatcgactggaacaagctcatcgatcacctgtcggtctggcatcgccattccgtccggcttttctgggcccaggaattcgcgaacaccttgcccggggaggcccgtgacgccaacccggaggaagaagaaaccttgccagttgaagaaaccggatcatgaaccgagcccaaccggccagaaccaagggagaacaagccatgctgatccagatccacctcatccagaaccacgccccggccaacctgaaccgcgatgacctcggcgcgcccaaaacctgctactttggcggcgtgctgcgttcgcggatttcgagccagtgcctcaagcggtccatccgcttgagtgacgagttcagcgccctgctcggcggcgtccgcacccggcgcctgagccagttgctccggcaggaactggagcgcctggggaaaagggatgcggacatctccgaagtgctgaacgcctgcggcctcgagcagaggaccaggggaggcaaaaaaaacaaggccggggaagaggctgaagacgccgaatcccaggaagaaggcaagatgctcgtgtacaccacgagggaagccatccgcgaaatggcgaaggtcctggcggaaacttcgggcagcaaggatgagaaggcccggaaagtggctgaaatcatcagtaaaaacaccgccgtgcccgacatggccttgtttggccgcatgctcgaagccaaggctgactcgggggcctggaaagacctgaacaacacggtcgaagccgccctgcaggctgcccacgccctctccacgcacaccgcgcgcaaggagatcgactactacgtggctgccgatgacgtgcccggggccgaggaccgcggcgcgggatacgtggacgaggccttgtttgcctccgcctgttattacaagtacttctctatctcctggccgcaactgctcaagaatctccgggacaaccgcgaactggccgcccacacggtcggggcgtttctgcggggcgccgcgctggtgaaccccacgggcaagcagaacagtttcgccgcgcacaacccgccgctgggcattctcgtggagttgcgcaagtaccccgtcaactatgccaacgccttcgtgcaacccgtcgacgtggaggaccgcgaagacctcgtcgccgaatccattgcccggctggccatgcacgtgcaagacctggatacaggctacggagcaccagagaaacgcttctggttctcgccgaacctgcggtatcccctccagtacaacgggaccccggtggtcgacgacaatgcctcgttcagcagcctcaacgacctggtaaacgccctcgttcccgccattgatcccggcctgacctgggcccaggcgcaggcggcggtagtgaaccattcgccggtgggggaggcctgagccatggccgagcacaacaccctgctgatccgcctcgagggacctttccaggcgtgggggctcgcggagtcccgcttcgcgattcggcgcgtggcccccgcgcccaccaagtctggcgtgattggcctgctgtgcgccgcccggggcattccccggtccgaggccaccccggaagtcatgaaacccatggccagtctcaagatggccgtccgggtggatcgccccggtagccgctggctcgactatcacacggtcggcgcgggcggcatctcccggcgatccgcggaaggcgggctccgtcatggcgaaacgatgctgacccttcgcgagtaccttggcgatgcctcgttcctggtggccctgtggggagagccctcgctcatccggcagttacatgacgccctgctcgagcctgtgtggcccctgtaccttggccgaaagtcctgcgtcccctcggtacccctcttcctgaaagaccagggatcgttgcgaaccacagccaacccgatcgaggccctgctctccgtgccgtgggaacagcgttacgctttcgagaaaaaaccggatgtgcttaccgtgtacacggactggcccctgggtaacgtggcgtttgagccttgtgacctggacaccgcccacgacgtgcccgtgcacttcattccccccgcgcccgcctatacgtcgcgggtcgtcgcgcgcaggtttctggaatgtggaacaggggagggacaggtaagactgaccaacaaaaccgaagatgaacttcctaaatcaccccccaggccaagggcggactacaccaacgccgaataccggaatatccgggcaaggcgcctcgagcaggaccatggcctgtgcgtcttctgcaaggccccggccaccacggtacagcacatcacctaccgccacgcagggggtaacgaacgggtcgacgagttacgctccctgtgcaggctctgtcacgacgcgtgcacgatgatcgagtacggccataacatgggcatggaccggattaatccggaagatcccttctggcgcgacctggtcattcagcgccgaagagagattatccggttccgatcccgggaaacccgcgcgcgcctgctgggcgaaaaggtcaaggaataggaggatccgggcatgtacctgtctaccttgctgatcgacgccgggaaggatccggaccggatccgcccgggaagaaactggctgcgtaacgtgtaccgggtgcatcagcggctgagcatggctttccccgcgccggcgcgcaaaaccaccgatccccagtttctccagcccttccggccggaagacttcggcgaacacctgcatataccccggtcggggcaggcgggttttctcttccggatcgatccccagcctggcggtaatccggtcattctggtgcagtccgccatcgagccagactgggattacgcctttcataacgcggattacctgctggcagccccccctgaagtgcgatcctggaacccggtgttccagtccggacaacgctaccgcttccggctcatggccaatgccacgagaaaggtcggcaccctcacggcggcgcaacgcagggaaaacccggacagcgtgatcctcgagccccccggggatctctccgggccttggcgacgcgaccgtcgcacccgcaatggcacgcgcgtgcctgtaccacgggaacagttgcccgactggctgatccggcggggggagaccggaggcttcaaggtcgtgcccggcccggaagctctgaatatccaggtaaattactactacgtgaaccgcgcgggtttcgcgaatgccaacggatcggaacagccaggcagggcctgtattccccagttgttctgcgcgcgctatgaaggcctgctggaagtaacggatccgcgggcattttacgccaccatcgcctcgggaatcgggccagcccgggccttcggttgtggactactcaccatcgcgaaaccgtgaaacctctccccggcgggggcgggatccgtcccgcccccgccggctcatccggttagtgcctcgagcaggatgcatgccttggggtaactggccgtccggcccgtacgtggacggtacgtaacgtatcgggaaaggaacaggtacgaatggcgccttccgatgacctgcgggccctgccccgcttcaccgattcctggtcatacgcttacctggaacacgtcatcgtcgaacgggacgagcacgccatcgtcctgatcgacgccagtgggaaaaccgccgtgccctgcgccggcatcaacctgctcctgttcgggccgggagtcagcgtaacccatgccgccatgagccttctgattgaacatggcgtcctggttgcgtggacgggagaggatgccgtgcgctgctacgccttcggacactccaaggcccgtcacgcgcggaacctgtatcaccaggcgaccctgtgggccaatccacagacccgtttcgaggtagccgtgcgcctgtacggcgtgcgtttccccgatcctgtgccgccgggcatctccatggcccagttgcgcgccatggaaggacgccgcgtccgtcgggtgtacgagtcctgggcacagcagaccggcgtgaactggacggggcgtaactataaggtcgacaactggaatgatgcggatccgataaaccgggccctctctgtcgccaactcgtgtttatatggactctgtcatgccgctattcttgcggggggcttctcgcccgccctcggtttcatccacgtcggcaacatgctctccttcgtctatgacgtcgccgatctttacaagacagagtatactattcccatcgccttccaggtcggcgcgcagaatccctcggaactcgaacgcgtggtccgcatgacctgccggcaatggttctatcagaccaggctgctgagccgggtcatccccgacatccgggccgccctcggcatgtcccggaaaggagaccccgccgccgacattgccgacgctcccctggccctgtgggatcccgacgagggcgaatgccccgccgcccagaactatgatcccgaactcatggaacaacagcccccctctgataccgggtcgtcaaccccgccccctcccccgggagaaactacaccatgacggtcatcatcctcgtctccgcgccacccgccttgcggggcgaagtctcccggtgggccatcgaaccccatcccggcgtattcgtcgccgaaatctccgccctcgtccgtgaaaaactctgggaacgctgctgtaaaaaaatccgtaacggcggcgtgattttcatttatcccgacgccaacgaacagggttataccatccgttctttcggtaacaccaggcgcgatttcatcgacttcgacggtatcgtcctctcgcgacagcccaacgaaaaatgaccttatccggaagaatcaggtataatggatgcgattctactgaaaataactttagccttttccccacgcccgtgggggtgaaccgcgggtcctgggtagccgtgacgccgtgcgggccttttccccacgcccgtgggggtgaacccatccgccgatcgtcgctcgcgatccacgagcccttttccccacgcccgtgggggtgaacctggttcggggaaaccctcgatttccccgatcccttttccccacgcccgtgggggtgaaccggctcccgggcgacgtgtggctttctgtcgagccttttccccacgcccgtgggggtgaaccatcgaacctcctctgggtccgcgcccaaacgtcc

SEQ ID NO: 995 - DNA, 103356 bp, Artificial Sequence
  Synthetic Oligonucleotide
  misc_feature (1)..(86280): n is a, c, g, or t
nnnnnnnnnnnnnnnnnnnnnnnnnnnnnnnnnnnnnnnnnnnnnnnnnnnnnnnnnnnnnnnnnnnnnnnnnnnnnnnnnnnnnnnnnnnnnnnnnnnnnnnnnnnnnnnnnnnnnnnnnnnnnnnnnnnnnnnnnnnnnnnnnnnnnnnnnnnnnnnnnnnnnnnnnnnnnnnnnnnnnnnnnnnnnnnnnnnnnnnnnnnnnnnnnnnnnnnnnnnnnnnnnnnnnnnnnnnnnnnnnnnnnnnnnnnnnnnnnnnnnnnnnnnnnnnnnnnnnnnnnnnnnnnnnnnnnnnnnnnnnnnnnnnnnnnnnnnnnnnnnnnnnnnnnnnnnnnnnnnnnnnnnnnnnnnnnnnnnnnnnnnnnnnnnnnnnnnnnnnnnnnnnnnnnnnnnnnnnnnnnnnnnnnnnnnnnnnnnnnnnnnnnnnnnnnnnnnnnnnnnnnnnnnnnnnnnnnnnnnnnnnnnnnnnnnnnnnnnnnnnnnnnnnnnnnnnnnnnnnnnnnnnnnnnnnnnnnnnnnnnnnnnnnnnnnnnnnnnnnnnnnnnnnnnnnnnnnnnnnnnnnnnnnnnnnnnnnnnnnnnnnnnnnnnnnnnnnnnnnnnnnnnnnnnnnnnnnnnnnnnnnnnnnnnnnnnnnnnnnnnnnnnnnnnnnnnnnnnnnnnnnnnnnnnnnnnnnnnnnnnnnnnnnnnnnnnnnnnnnnnnnnnnnnnnnnnnnnnnnnnnnnnnnnnnnnnnnnnnnnnnnnnnnnnnnnnnnnnnnnnnnnnnnnnnnnnnnnnnnnnnnnnnnnnnnnnnnnnnnnnnnnnnnnnnnnnnnnnnnnnnnnnnnnnnnnnnnnnnnnnnnnnnnnnnnnnnnnnnnnnnnnnnnnnnnnnnnnnnnnnnnnnnnnnnnnnnnnnnnnnnnnnnnnnnnnnnnnnnnnnnnnnnnnnnnnnnnnnnnnnnnnnnnnnnnnnnnnnnnnnnnnnnnnnnnnnnnnnnnnnnnnnnnnnnnnnnnnnnnnnnnnnnnnnnnnnnnnnnnnnnnnnnnnnnnnnnnnnnnnnnnnnnnnnnnnnnnnnnnnnnnnnnnnnnnnnnnnnnnnnnnnnnnnnnnnnnnnnnnnnnnnnnnnnnnnnnnnnnnnnnnnnnnnnnnnnnnnnnnnnnnnnnnnnnnnnnnnnnnnnnnnnnnnnnnnnnnnnnnnnnnnnnnnnnnnnnnnnnnnnnnnnnnnnnnnnnnnnnnnnnnnnnnnnnnnnnnnnnnnnnnnnnnnnnnnnnnnnnnnnnnnnnnnnnnnnnnnnnnnnnnnnnnnnnnnnnnnnnnnnnnnnnnnnnnnnnnnnnnnnnnnnnnnnnnnnnnnnnnnnnnnnnnnnnnnnnnnnnnnnnnnnnnnnnnnnnnnnnnnnnnnnnnnnnnnnnnnnnnnnnnnnnnnnnnnnnnnnnnnnnnnnnnnnnnnnnnnnnnnnnnnnnnnnnnnnnnnnnnnnnnnnnnnnnnnnnnnnnnnnnnnnnnnnnnnnnnnnnnnnnnnnnnnnnnnnnnnnnnnnnnnnnnnnnnnnnnnnnnnnnnnnnnnnnnnnnnnnnnnnnnnnnnnnnnnnnnnnnnnnnnnnnnnnnnnnnnnnnnnnnnnnnnnnnnnnnnnnnnnnnnnnnnnnnnnnnnnnnnnnnnnnnnnnnnnnnnnnnnnnnnnnnnnnnnnnnnnnnnnnnnnnnnnnnnnnnnnnnnnnnnnnnnnnnnnnnnnnnnnnnnnnnnnnnnnnnnnnnnnnnnnnnnnnnnnnnnnnnnnnnnnnnnnnnnnnnnnnnnnnnnnnnnnnnnnnnnnnnnnnnnnnnnnnnnnnnnnnnnnnnnnnnnnnnnnnnnnnnnnnnnnnnnnnnnnnnnnnnnnnnnnnnnnnnnnnnnnnnnnnnnnnnnnnnnnnnnnnnnnnnnnnnnnnnnnnnnnnnnnnnnnnnnnnnnnnnnnnnnnnnnnnnnnnnnnnnnnnnnnnnnnnnnnnnnnnnnnnnnnnnnnnnnnnnnnnnnnnnnnnnnnnnnnnnnnnnnnnnnnnnnnnnnnnnnnnnnnnnnnnnnnnnnnnnnnnnnnnnnnnnnnnnnnnnnnnnnnnnnnnnnnnnnnnnnnnnnnnnnnnnnnnnnnnnnnnnnnnnnnnnnnnnnnnnnnnnnnnnnnnnnnnnnnnnnnnnnnnnnnnnnnnnnnnnnnnnnnnnnnnnnnnnnnnnnnnnnnnnnnnnnnnnnnnnnnnnnnnnnnnnnnnnnnnnnnnnnnnnnnnnnnnnnnnnnnnnnnnnnnnnnnnnnnnnnnnnnnnnnnnnnnnnnnnnnnnnnnnnnnnnnnnnnnnnnnnnnnnnnnnnnnnnnnnnnnnnnnnnnnnnnnnnnnnnnnnnnnnnnnnnnnnnnnnnnnnnnnnnnnnnnnnnnnnnnnnnnnnnnnnnnnnnnnnnnnnnnnnnnnnnnnnnnnnnnnnnnnnnnnnnnnnnnnnnnnnnnnnnnnnnnnnnnnnnnnnnnnnnnnnnnnnnnnnnnnnnnnnnnnnnnnnnnnnnnnnnnnnnnnnnnnnnnnnnnnnnnnnnnnnnnnnnnnnnnnnnnnnnnnnnnnnnnnnnnnnnnnnnnnnnnnnnnnnnnnnnnnnnnnnnnnnnnnnnnnnnnnnnnnnnnnnnnnnnnnnnnnnnnnnnnnnnnnnnnnnnnnnnnnnnnnnnnnnnnnnnnnnnnnnnnnnnnnnnnnnnnnnnnnnnnnnnnnnnnnnnnnnnnnnnnnnnnnnnnnnnnnnnnnnnnnnnnnnnnnnnnnnnnnnnnnnnnnnnnnnnnnnnnnnnnnnnnnnnnnnnnnnnnnnnnnnnnnnnnnnnnnnnnnnnnnnnnnnnnnnnnnnnnnnnnnnnnnnnnnnnnnnnnnnnnnnnnnnnnnnnnnnnnnnnnnnnnnnnnnnnnnnnnnnnnnnnnnnnnnnnnnnnnnnnnnnnnnnnnnnnnnnnnnnnnnnnnnnnnnnnnnnnnnnnnnnnnnnnnnnnnnnnnnnnnnnnnnnnnnnnnnnnnnnnnnnnnnnnnnnnnnnnnnnnnnnnnnnnnnnnnnnnnnnnnnnnnnnnnnnnnnnnnnnnnnnnnnnnnnnnnnnnnnnnnnnnnnnnnnnnnnnnnnnnnnnnnnnnnnnnnnnnnnnnnnnnnnnnnnnnnnnnnnnnnnnnnnnnnnnnnnnnnnnnnnnnnnnnnnnnnnnnnnnnnnnnnnnnnnnnnnnnnnnnnnnnnnnnnnnnnnnnnnnnnnnnnnnnnnnnnnnnnnnnnnnnnnnnnnnnnnnnnnnnnnnnnnnnnnnnnnnnnnnnnnnnnnnnnnnnnnnnnnnnnnnnnnnnnnnnnnnnnnnnnnnnnnnnnnnnnnnnnnnnnnnnnnnnnnnnnnnnnnnnnnnnnnnnnnnnnnnnnnnnnnnnnnnnnnnnnnnnnnnnnnnnnnnnnnnnnnnnnnnnnnnnnnnnnnnnnnnnnnnnnnnnnnnnnnnnnnnnnnnnnnnnnnnnnnnnnnnnnnnnnnnnnnnnnnnnnnnnnnnnnnnnnnnnnnnnnnnnnnnnnnnnnnnnnnnnnnnnnnnnnnnnnnnnnnnnnnnnnnnnnnnnnnnnnnnnnnnnnnnnnnnnnnnnnnnnnnnnnnnnnnnnnnnnnnnnnnnnnnnnnnnnnnnnnnnnnnnnnnnnnnnnnnnnnnnnnnnnnnnnnnnnnnnnnnnnnnnnnnnnnnnnnnnnnnnnnnnnnnnnnnnnnnnnnnnnnnnnnnnnnnnnnnnnnnnnnnnnnnnnnnnnnnnnnnnnnnnnnnnnnnnnnnnnnnnnnnnnnnnnnnnnnnnnnnnnnnnnnnnnnnnnnnnnnnnnnnnnnnnnnnnnnnnnnnnnnnnnnnnnnnnnnnnnnnnnnnnnnnnnnnnnnnnnnnnnnnnnnnnnnnnnnnnnnnnnnnnnnnnnnnnnnnnnnnnnnnnnnnnnnnnnnnnnnnnnnnnnnnnnnnnnnnnnnnnnnnnnnnnnnnnnnnnnnnnnnnnnnnnnnnnnnnnnnnnnnnnnnnnnnnnnnnnnnnnnnnnnnnnnnnnnnnnnnnnnnnnnnnnnnnnnnnnnnnnnnnnnnnnnnnnnnnnnnnnnnnnnnnnnnnnnnnnnnnnnnnnnnnnnnnnnnnnnnnnnnnnnnnnnnnnnnnnnnnnnnnnnnnnnnnnnnnnnnnnnnnnnnnnnnnnnnnnnnnnnnnnnnnnnnnnnnnnnnnnnnnnnnnnnnnnnnnnnnnnnnnnnnnnnnnnnnnnnnnnnnnnnnnnnnnnnnnnnnnnnnnnnnnnnnnnnnnnnnnnnnnnnnnnnnnnnnnnnnnnnnnnnnnnnnnnnnnnnnnnnnnnnnnnnnnnnnnnnnnnnnnnnnnnnnnnnnnnnnnnnnnnnnnnnnnnnnnnnnnnnnnnnnnnnnnnnnnnnnnnnnnnnnnnnnnnnnnnnnnnnnnnnnnnnnnnnnnnnnnnnnnnnnnnnnnnnnnnnnnnnnnnnnnnnnnnnnnnnnnnnnnnnnnnnnnnnnnnnnnnnnnnnnnnnnnnnnnnnnnnnnnnnnnnnnnnnnnnnnnnnnnnnnnnnnnnnnnnnnnnnnnnnnnnnnnnnnnnnnnnnnnnnnnnnnnnnnnnnnnnnnnnnnnnnnnnnnnnnnnnnnnnnnnnnnnnnnnnnnnnnnnnnnnnnnnnnnnnnnnnnnnnnnnnnnnnnnnnnnnnnnnnnnnnnnnnnnnnnnnnnnnnnnnnnnnnnnnnnnnnnnnnnnnnnnnnnnnnnnnnnnnnnnnnnnnnnnnnnnnnnnnnnnnnnnnnnnnnnnnnnnnnnnnnnnnnnnnnnnnnnnnnnnnnnnnnnnnnnnnnnnnnnnnnnnnnnnnnnnnnnnnnnnnnnnnnnnnnnnnnnnnnnnnnnnnnnnnnnnnnnnnnnnnnnnnnnnnnnnnnnnnnnnnnnnnnnnnnnnnnnnnnnnnnnnnnnnnnnnnnnnnnnnnnnnnnnnnnnnnnnnnnnnnnnnnnnnnnnnnnnnnnnnnnnnnnnnnnnnnnnnnnnnnnnnnnnnnnnnnnnnnnnnnnnnnnnnnnnnnnnnnnnnnnnnnnnnnnnnnnnnnnnnnnnnnnnnnnnnnnnnnnnnnnnnnnnnnnnnnnnnnnnnnnnnnnnnnnnnnnnnnnnnnnnnnnnnnnnnnnnnnnnnnnnnnnnnnnnnnnnnnnnnnnnnnnnnnnnnnnnnnnnnnnnnnnnnnnnnnnnnnnnnnnnnnnnnnnnnnnnnnnnnnnnnnnnnnnnnnnnnnnnnnnnnnnnnnnnnnnnnnnnnnnnnnnnnnnnnnnnnnnnnnnnnnnnnnnnnnnnnnnnnnnnnnnnnnnnnnnnnnnnnnnnnnnnnnnnnnnnnnnnnnnnnnnnnnnnnnnnnnnnnnnnnnnnnnnnnnnnnnnnnnnnnnnnnnnnnnnnnnnnnnnnnnnnnnnnnnnnnnnnnnnnnnnnnnnnnnnnnnnnnnnnnnnnnnnnnnnnnnnnnnnnnnnnnnnnnnnnnnnnnnnnnnnnnnnnnnnnnnnnnnnnnnnnnnnnnnnnnnnnnnnnnnnnnnnnnnnnnnnnnnnnnnnnnnnnnnnnnnnnnnnnnnnnnnnnnnnnnnnnnnnnnnnnnnnnnnnnnnnnnnnnnnnnnnnnnnnnnnnnnnnnnnnnnnnnnnnnnnnnnnnnnnnnnnnnnnnnnnnnnnnnnnnnnnnnnnnnnnnnnnnnnnnnnnnnnnnnnnnnnnnnnnnnnnnnnnnnnnnnnnnnnnnnnnnnnnnnnnnnnnnnnnnnnnnnnnnnnnnnnnnnnnnnnnnnnnnnnnnnnnnnnnnnnnnnnnnnnnnnnnnnnnnnnnnnnnnnnnnnnnnnnnnnnnnnnnnnnnnnnnnnnnnnnnnnnnnnnnnnnnnnnnnnnnnnnnnnnnnnnnnnnnnnnnnnnnnnnnnnnnnnnnnnnnnnnnnnnnnnnnnnnnnnnnnnnnnnnnnnnnnnnnnnnnnnnnnnnnnnnnnnnnnnnnnnnnnnnnnnnnnnnnnnnnnnnnnnnnnnnnnnnnnnnnnnnnnnnnnnnnnnnnnnnnnnnnnnnnnnnnnnnnnnnnnnnnnnnnnnnnnnnnnnnnnnnnnnnnnnnnnnnnnnnnnnnnnnnnnnnnnnnnnnnnnnnnnnnnnnnnnnnnnnnnnnnnnnnnnnnnnnnnnnnnnnnnnnnnnnnnnnnnnnnnnnnnnnnnnnnnnnnnnnnnnnnnnnnnnnnnnnnnnnnnnnnnnnnnnnnnnnnnnnnnnnnnnnnnnnnnnnnnnnnnnnnnnnnnnnnnnnnnnnnnnnnnnnnnnnnnnnnnnnnnnnnnnnnnnnnnnnnnnnnnnnnnnnnnnnnnnnnnnnnnnnnnnnnnnnnnnnnnnnnnnnnnnnnnnnnnnnnnnnnnnnnnnnnnnnnnnnnnnnnnnnnnnnnnnnnnnnnnnnnnnnnnnnnnnnnnnnnnnnnnnnnnnnnnnnnnnnnnnnnnnnnnnnnnnnnnnnnnnnnnnnnnnnnnnnnnnnnnnnnnnnnnnnnnnnnnnnnnnnnnnnnnnnnnnnnnnnnnnnnnnnnnnnnnnnnnnnnnnnnnnnnnnnnnnnnnnnnnnnnnnnnnnnnnnnnnnnnnnnnnnnnnnnnnnnnnnnnnnnnnnnnnnnnnnnnnnnnnnnnnnnnnnnnnnnnnnnnnnnnnnnnnnnnnnnnnnnnnnnnnnnnnnnnnnnnnnnnnnnnnnnnnnnnnnnnnnnnnnnnnnnnnnnnnnnnnnnnnnnnnnnnnnnnnnnnnnnnnnnnnnnnnnnnnnnnnnnnnnnnnnnnnnnnnnnnnnnnnnnnnnnnnnnnnnnnnnnnnnnnnnnnnnnnnnnnnnnnnnnnnnnnnnnnnnnnnnnnnnnnnnnnnnnnnnnnnnnnnnnnnnnnnnnnnnnnnnnnnnnnnnnnnnnnnnnnnnnnnnnnnnnnnnnnnnnnnnnnnnnnnnnnnnnnnnnnnnnnnnnnnnnnnnnnnnnnnnnnnnnnnnnnnnnnnnnnnnnnnnnnnnnnnnnnnnnnnnnnnnnnnnnnnnnnnnnnnnnnnnnnnnnnnnnnnnnnnnnnnnnnnnnnnnnnnnnnnnnnnnnnnnnnnnnnnnnnnnnnnnnnnnnnnnnnnnnnnnnnnnnnnnnnnnnnnnnnnnnnnnnnnnnnnnnnnnnnnnnnnnnnnnnnnnnnnnnnnnnnnnnnnnnnnnnnnnnnnnnnnnnnnnnnnnnnnnnnnnnnnnnnnnnnnnnnnnnnnnnnnnnnnnnnnnnnnnnnnnnnnnnnnnnnnnnnnnnnnnnnnnnnnnnnnnnnnnnnnnnnnnnnnnnnnnnnnnnnnnnnnnnnnnnnnnnnnnnnnnnnnnnnnnnnnnnnnnnnnnnnnnnnnnnnnnnnnnnnnnnnnnnnnnnnnnnnnnnnnnnnnnnnnnnnnnnnnnnnnnnnnnnnnnnnnnnnnnnnnnnnnnnnnnnnnnnnnnnnnnnnnnnnnnnnnnnnnnnnnnnnnnnnnnnnnnnnnnnnnnnnnnnnnnnnnnnnnnnnnnnnnnnnnnnnnnnnnnnnnnnnnnnnnnnnnnnnnnnnnnnnnnnnnnnnnnnnnnnnnnnnnnnnnnnnnnnnnnnnnnnnnnnnnnnnnnnnnnnnnnnnnnnnnnnnnnnnnnnnnnnnnnnnnnnnnnnnnnnnnnnnnnnnnnnnnnnnnnnnnnnnnnnnnnnnnnnnnnnnnnnnnnnnnnnnnnnnnnnnnnnnnnnnnnnnnnnnnnnnnnnnnnnnnnnnnnnnnnnnnnnnnnnnnnnnnnnnnnnnnnnnnnnnnnnnnnnnnnnnnnnnnnnnnnnnnnnnnnnnnnnnnnnnnnnnnnnnnnnnnnnnnnnnnnnnnnnnnnnnnnnnnnnnnnnnnnnnnnnnnnnnnnnnnnnnnnnnnnnnnnnnnnnnnnnnnnnnnnnnnnnnnnnnnnnnnnnnnnnnnnnnnnnnnnnnnnnnnnnnnnnnnnnnnnnnnnnnnnnnnnnnnnnnnnnnnnnnnnnnnnnnnnnnnnnnnnnnnnnnnnnnnnnnnnnnnnnnnnnnnnnnnnnnnnnnnnnnnnnnnnnnnnnnnnnnnnnnnnnnnnnnnnnnnnnnnnnnnnnnnnnnnnnnnnnnnnnnnnnnnnnnnnnnnnnnnnnnnnnnnnnnnnnnnnnnnnnnnnnnnnnnnnnnnnnnnnnnnnnnnnnnnnnnnnnnnnnnnnnnnnnnnnnnnnnnnnnnnnnnnnnnnnnnnnnnnnnnnnnnnnnnnnnnnnnnnnnnnnnnnnnnnnnnnnnnnnnnnnnnnnnnnnnnnnnnnnnnnnnnnnnnnnnnnnnnnnnnnnnnnnnnnnnnnnnnnnnnnnnnnnnnnnnnnnnnnnnnnnnnnnnnnnnnnnnnnnnnnnnnnnnnnnnnnnnnnnnnnnnnnnnnnnnnnnnnnnnnnnnnnnnnnnnnnnnnnnnnnnnnnnnnnnnnnnnnnnnnnnnnnnnnnnnnnnnnnnnnnnnnnnnnnnnnnnnnnnnnnnnnnnnnnnnnnnnnnnnnnnnnnnnnnnnnnnnnnnnnnnnnnnnnnnnnnnnnnnnnnnnnnnnnnnnnnnnnnnnnnnnnnnnnnnnnnnnnnnnnnnnnnnnnnnnnnnnnnnnnnnnnnnnnnnnnnnnnnnnnnnnnnnnnnnnnnnnnnnnnnnnnnnnnnnnnnnnnnnnnnnnnnnnnnnnnnnnnnnnnnnnnnnnnnnnnnnnnnnnnnnnnnnnnnnnnnnnnnnnnnnnnnnnnnnnnnnnnnnnnnnnnnnnnnnnnnnnnnnnnnnnnnnnnnnnnnnnnnnnnnnnnnnnnnnnnnnnnnnnnnnnnnnnnnnnnnnnnnnnnnnnnnnnnnnnnnnnnnnnnnnnnnnnnnnnnnnnnnnnnnnnnnnnnnnnnnnnnnnnnnnnnnnnnnnnnnnnnnnnnnnnnnnnnnnnnnnnnnnnnnnnnnnnnnnnnnnnnnnnnnnnnnnnnnnnnnnnnnnnnnnnnnnnnnnnnnnnnnnnnnnnnnnnnnnnnnnnnnnnnnnnnnnnnnnnnnnnnnnnnnnnnnnnnnnnnnnnnnnnnnnnnnnnnnnnnnnnnnnnnnnnnnnnnnnnnnnnnnnnnnnnnnnnnnnnnnnnnnnnnnnnnnnnnnnnnnnnnnnnnnnnnnnnnnnnnnnnnnnnnnnnnnnnnnnnnnnnnnnnnnnnnnnnnnnnnnnnnnnnnnnnnnnnnnnnnnnnnnnnnnnnnnnnnnnnnnnnnnnnnnnnnnnnnnnnnnnnnnnnnnnnnnnnnnnnnnnnnnnnnnnnnnnnnnnnnnnnnnnnnnnnnnnnnnnnnnnnnnnnnnnnnnnnnnnnnnnnnnnnnnnnnnnnnnnnnnnnnnnnnnnnnnnnnnnnnnnnnnnnnnnnnnnnnnnnnnnnnnnnnnnnnnnnnnnnnnnnnnnnnnnnnnnnnnnnnnnnnnnnnnnnnnnnnnnnnnnnnnnnnnnnnnnnnnnnnnnnnnnnnnnnnnnnnnnnnnnnnnnnnnnnnnnnnnnnnnnnnnnnnnnnnnnnnnnnnnnnnnnnnnnnnnnnnnnnnnnnnnnnnnnnnnnnnnnnnnnnnnnnnnnnnnnnnnnnnnnnnnnnnnnnnnnnnnnnnnnnnnnnnnnnnnnnnnnnnnnnnnnnnnnnnnnnnnnnnnnnnnnnnnnnnnnnnnnnnnnnnnnnnnnnnnnnnnnnnnnnnnnnnnnnnnnnnnnnnnnnnnnnnnnnnnnnnnnnnnnnnnnnnnnnnnnnnnnnnnnnnnnnnnnnnnnnnnnnnnnnnnnnnnnnnnnnnnnnnnnnnnnnnnnnnnnnnnnnnnnnnnnnnnnnnnnnnnnnnnnnnnnnnnnnnnnnnnnnnnnnnnnnnnnnnnnnnnnnnnnnnnnnnnnnnnnnnnnnnnnnnnnnnnnnnnnnnnnnnnnnnnnnnnnnnnnnnnnnnnnnnnnnnnnnnnnnnnnnnnnnnnnnnnnnnnnnnnnnnnnnnnnnnnnnnnnnnnnnnnnnnnnnnnnnnnnnnnnnnnnnnnnnnnnnnnnnnnnnnnnnnnnnnnnnnnnnnnnnnnnnnnnnnnnnnnnnnnnnnnnnnnnnnnnnnnnnnnnnnnnnnnnnnnnnnnnnnnnnnnnnnnnnnnnnnnnnnnnnnnnnnnnnnnnnnnnnnnnnnnnnnnnnnnnnnnnnnnnnnnnnnnnnnnnnnnnnnnnnnnnnnnnnnnnnnnnnnnnnnnnnnnnnnnnnnnnnnnnnnnnnnnnnnnnnnnnnnnnnnnnnnnnnnnnnnnnnnnnnnnnnnnnnnnnnnnnnnnnnnnnnnnnnnnnnnnnnnnnnnnnnnnnnnnnnnnnnnnnnnnnnnnnnnnnnnnnnnnnnnnnnnnnnnnnnnnnnnnnnnnnnnnnnnnnnnnnnnnnnnnnnnnnnnnnnnnnnnnnnnnnnnnnnnnnnnnnnnnnnnnnnnnnnnnnnnnnnnnnnnnnnnnnnnnnnnnnnnnnnnnnnnnnnnnnnnnnnnnnnnnnnnnnnnnnnnnnnnnnnnnnnnnnnnnnnnnnnnnnnnnnnnnnnnnnnnnnnnnnnnnnnnnnnnnnnnnnnnnnnnnnnnnnnnnnnnnnnnnnnnnnnnnnnnnnnnnnnnnnnnnnnnnnnnnnnnnnnnnnnnnnnnnnnnnnnnnnnnnnnnnnnnnnnnnnnnnnnnnnnnnnnnnnnnnnnnnnnnnnnnnnnnnnnnnnnnnnnnnnnnnnnnnnnnnnnnnnnnnnnnnnnnnnnnnnnnnnnnnnnnnnnnnnnnnnnnnnnnnnnnnnnnnnnnnnnnnnnnnnnnnnnnnnnnnnnnnnnnnnnnnnnnnnnnnnnnnnnnnnnnnnnnnnnnnnnnnnnnnnnnnnnnnnnnnnnnnnnnnnnnnnnnnnnnnnnnnnnnnnnnnnnnnnnnnnnnnnnnnnnnnnnnnnnnnnnnnnnnnnnnnnnnnnnnnnnnnnnnnnnnnnnnnnnnnnnnnnnnnnnnnnnnnnnnnnnnnnnnnnnnnnnnnnnnnnnnnnnnnnnnnnnnnnnnnnnnnnnnnnnnnnnnnnnnnnnnnnnnnnnnnnnnnnnnnnnnnnnnnnnnnnnnnnnnnnnnnnnnnnnnnnnnnnnnnnnnnnnnnnnnnnnnnnnnnnnnnnnnnnnnnnnnnnnnnnnnnnnnnnnnnnnnnnnnnnnnnnnnnnnnnnnnnnnnnnnnnnnnnnnnnnnnnnnnnnnnnnnnnnnnnnnnnnnnnnnnnnnnnnnnnnnnnnnnnnnnnnnnnnnnnnnnnnnnnnnnnnnnnnnnnnnnnnnnnnnnnnnnnnnnnnnnnnnnnnnnnnnnnnnnnnnnnnnnnnnnnnnnnnnnnnnnnnnnnnnnnnnnnnnnnnnnnnnnnnnnnnnnnnnnnnnnnnnnnnnnnnnnnnnnnnnnnnnnnnnnnnnnnnnnnnnnnnnnnnnnnnnnnnnnnnnnnnnnnnnnnnnnnnnnnnnnnnnnnnnnnnnnnnnnnnnnnnnnnnnnnnnnnnnnnnnnnnnnnnnnnnnnnnnnnnnnnnnnnnnnnnnnnnnnnnnnnnnnnnnnnnnnnnnnnnnnnnnnnnnnnnnnnnnnnnnnnnnnnnnnnnnnnnnnnnnnnnnnnnnnnnnnnnnnnnnnnnnnnnnnnnnnnnnnnnnnnnnnnnnnnnnnnnnnnnnnnnnnnnnnnnnnnnnnnnnnnnnnnnnnnnnnnnnnnnnnnnnnnnnnnnnnnnnnnnnnnnnnnnnnnnnnnnnnnnnnnnnnnnnnnnnnnnnnnnnnnnnnnnnnnnnnnnnnnnnnnnnnnnnnnnnnnnnnnnnnnnnnnnnnnnnnnnnnnnnnnnnnnnnnnnnnnnnnnnnnnnnnnnnnnnnnnnnnnnnnnnnnnnnnnnnnnnnnnnnnnnnnnnnnnnnnnnnnnnnnnnnnnnnnnnnnnnnnnnnnnnnnnnnnnnnnnnnnnnnnnnnnnnnnnnnnnnnnnnnnnnnnnnnnnnnnnnnnnnnnnnnnnnnnnnnnnnnnnnnnnnnnnnnnnnnnnnnnnnnnnnnnnnnnnnnnnnnnnnnnnnnnnnnnnnnnnnnnnnnnnnnnnnnnnnnnnnnnnnnnnnnnnnnnnnnnnnnnnnnnnnnnnnnnnnnnnnnnnnnnnnnnnnnnnnnnnnnnnnnnnnnnnnnnnnnnnnnnnnnnnnnnnnnnnnnnnnnnnnnnnnnnnnnnnnnnnnnnnnnnnnnnnnnnnnnnnnnnnnnnnnnnnnnnnnnnnnnnnnnnnnnnnnnnnnnnnnnnnnnnnnnnnnnnnnnnnnnnnnnnnnnnnnnnnnnnnnnnnnnnnnnnnnnnnnnnnnnnnnnnnnnnnnnnnnnnnnnnnnnnnnnnnnnnnnnnnnnnnnnnnnnnnnnnnnnnnnnnnnnnnnnnnnnnnnnnnnnnnnnnnnnnnnnnnnnnnnnnnnnnnnnnnnnnnnnnnnnnnnnnnnnnnnnnnnnnnnnnnnnnnnnnnnnnnnnnnnnnnnnnnnnnnnnnnnnnnnnnnnnnnnnnnnnnnnnnnnnnnnnnnnnnnnnnnnnnnnnnnnnnnnnnnnnnnnnnnnnnnnnnnnnnnnnnnnnnnnnnnnnnnnnnnnnnnnnnnnnnnnnnnnnnnnnnnnnnnnnnnnnnnnnnnnnnnnnnnnnnnnnnnnnnnnnnnnnnnnnnnnnnnnnnnnnnnnnnnnnnnnnnnnnnnnnnnnnnnnnnnnnnnnnnnnnnnnnnnnnnnnnnnnnnnnnnnnnnnnnnnnnnnnnnnnnnnnnnnnnnnnnnnnnnnnnnnnnnnnnnnnnnnnnnnnnnnnnnnnnnnnnnnnnnnnnnnnnnnnnnnnnnnnnnnnnnnnnnnnnnnnnnnnnnnnnnnnnnnnnnnnnnnnnnnnnnnnnnnnnnnnnnnnnnnnnnnnnnnnnnnnnnnnnnnnnnnnnnnnnnnnnnnnnnnnnnnnnnnnnnnnnnnnnnnnnnnnnnnnnnnnnnnnnnnnnnnnnnnnnnnnnnnnnnnnnnnnnnnnnnnnnnnnnnnnnnnnnnnnnnnnnnnnnnnnnnnnnnnnnnnnnnnnnnnnnnnnnnnnnnnnnnnnnnnnnnnnnnnnnnnnnnnnnnnnnnnnnnnnnnnnnnnnnnnnnnnnnnnnnnnnnnnnnnnnnnnnnnnnnnnnnnnnnnnnnnnnnnnnnnnnnnnnnnnnnnnnnnnnnnnnnnnnnnnnnnnnnnnnnnnnnnnnnnnnnnnnnnnnnnnnnnnnnnnnnnnnnnnnnnnnnnnnnnnnnnnnnnnnnnnnnnnnnnnnnnnnnnnnnnnnnnnnnnnnnnnnnnnnnnnnnnnnnnnnnnnnnnnnnnnnnnnnnnnnnnnnnnnnnnnnnnnnnnnnnnnnnnnnnnnnnnnnnnnnnnnnnnnnnnnnnnnnnnnnnnnnnnnnnnnnnnnnnnnnnnnnnnnnnnnnnnnnnnnnnnnnnnnnnnnnnnnnnnnnnnnnnnnnnnnnnnnnnnnnnnnnnnnnnnnnnnnnnnnnnnnnnnnnnnnnnnnnnnnnnnnnnnnnnnnnnnnnnnnnnnnnnnnnnnnnnnnnnnnnnnnnnnnnnnnnnnnnnnnnnnnnnnnnnnnnnnnnnnnnnnnnnnnnnnnnnnnnnnnnnnnnnnnnnnnnnnnnnnnnnnnnnnnnnnnnnnnnnnnnnnnnnnnnnnnnnnnnnnnnnnnnnnnnnnnnnnnnnnnnnnnnnnnnnnnnnnnnnnnnnnnnnnnnnnnnnnnnnnnnnnnnnnnnnnnnnnnnnnnnnnnnnnnnnnnnnnnnnnnnnnnnnnnnnnnnnnnnnnnnnnnnnnnnnnnnnnnnnnnnnnnnnnnnnnnnnnnnnnnnnnnnnnnnnnnnnnnnnnnnnnnnnnnnnnnnnnnnnnnnnnnnnnnnnnnnnnnnnnnnnnnnnnnnnnnnnnnnnnnnnnnnnnnnnnnnnnnnnnnnnnnnnnnnnnnnnnnnnnnnnnnnnnnnnnnnnnnnnnnnnnnnnnnnnnnnnnnnnnnnnnnnnnnnnnnnnnnnnnnnnnnnnnnnnnnnnnnnnnnnnnnnnnnnnnnnnnnnnnnnnnnnnnnnnnnnnnnnnnnnnnnnnnnnnnnnnnnnnnnnnnnnnnnnnnnnnnnnnnnnnnnnnnnnnnnnnnnnnnnnnnnnnnnnnnnnnnnnnnnnnnnnnnnnnnnnnnnnnnnnnnnnnnnnnnnnnnnnnnnnnnnnnnnnnnnnnnnnnnnnnnnnnnnnnnnnnnnnnnnnnnnnnnnnnnnnnnnnnnnnnnnnnnnnnnnnnnnnnnnnnnnnnnnnnnnnnnnnnnnnnnnnnnnnnnnnnnnnnnnnnnnnnnnnnnnnnnnnnnnnnnnnnnnnnnnnnnnnnnnnnnnnnnnnnnnnnnnnnnnnnnnnnnnnnnnnnnnnnnnnnnnnnnnnnnnnnnnnnnnnnnnnnnnnnnnnnnnnnnnnnnnnnnnnnnnnnnnnnnnnnnnnnnnnnnnnnnnnnnnnnnnnnnnnnnnnnnnnnnnnnnnnnnnnnnnnnnnnnnnnnnnnnnnnnnnnnnnnnnnnnnnnnnnnnnnnnnnnnnnnnnnnnnnnnnnnnnnnnnnnnnnnnnnnnnnnnnnnnnnnnnnnnnnnnnnnnnnnnnnnnnnnnnnnnnnnnnnnnnnnnnnnnnnnnnnnnnnnnnnnnnnnnnnnnnnnnnnnnnnnnnnnnnnnnnnnnnnnnnnnnnnnnnnnnnnnnnnnnnnnnnnnnnnnnnnnnnnnnnnnnnnnnnnnnnnnnnnnnnnnnnnnnnnnnnnnnnnnnnnnnnnnnnnnnnnnnnnnnnnnnnnnnnnnnnnnnnnnnnnnnnnnnnnnnnnnnnnnnnnnnnnnnnnnnnnnnnnnnnnnnnnnnnnnnnnnnnnnnnnnnnnnnnnnnnnnnnnnnnnnnnnnnnnnnnnnnnnnnnnnnnnnnnnnnnnnnnnnnnnnnnnnnnnnnnnnnnnnnnnnnnnnnnnnnnnnnnnnnnnnnnnnnnnnnnnnnnnnnnnnnnnnnnnnnnnnnnnnnnnnnnnnnnnnnnnnnnnnnnnnnnnnnnnnnnnnnnnnnnnnnnnnnnnnnnnnnnnnnnnnnnnnnnnnnnnnnnnnnnnnnnnnnnnnnnnnnnnnnnnnnnnnnnnnnnnnnnnnnnnnnnnnnnnnnnnnnnnnnnnnnnnnnnnnnnnnnnnnnnnnnnnnnnnnnnnnnnnnnnnnnnnnnnnnnnnnnnnnnnnnnnnnnnnnnnnnnnnnnnnnnnnnnnnnnnnnnnnnnnnnnnnnnnnnnnnnnnnnnnnnnnnnnnnnnnnnnnnnnnnnnnnnnnnnnnnnnnnnnnnnnnnnnnnnnnnnnnnnnnnnnnnnnnnnnnnnnnnnnnnnnnnnnnnnnnnnnnnnnnnnnnnnnnnnnnnnnnnnnnnnnnnnnnnnnnnnnnnnnnnnnnnnnnnnnnnnnnnnnnnnnnnnnnnnnnnnnnnnnnnnnnnnnnnnnnnnnnnnnnnnnnnnnnnnnnnnnnnnnnnnnnnnnnnnnnnnnnnnnnnnnnnnnnnnnnnnnnnnnnnnnnnnnnnnnnnnnnnnnnnnnnnnnnnnnnnnnnnnnnnnnnnnnnnnnnnnnnnnnnnnnnnnnnnnnnnnnnnnnnnnnnnnnnnnnnnnnnnnnnnnnnnnnnnnnnnnnnnnnnnnnnnnnnnnnnnnnnnnnnnnnnnnnnnnnnnnnnnnnnnnnnnnnnnnnnnnnnnnnnnnnnnnnnnnnnnnnnnnnnnnnnnnnnnnnnnnnnnnnnnnnnnnnnnnnnnnnnnnnnnnnnnnnnnnnnnnnnnnnnnnnnnnnnnnnnnnnnnnnnnnnnnnnnnnnnnnnnnnnnnnnnnnnnnnnnnnnnnnnnnnnnnnnnnnnnnnnnnnnnnnnnnnnnnnnnnnnnnnnnnnnnnnnnnnnnnnnnnnnnnnnnnnnnnnnnnnnnnnnnnnnnnnnnnnnnnnnnnnnnnnnnnnnnnnnnnnnnnnnnnnnnnnnnnnnnnnnnnnnnnnnnnnnnnnnnnnnnnnnnnnnnnnnnnnnnnnnnnnnnnnnnnnnnnnnnnnnnnnnnnnnnnnnnnnnnnnnnnnnnnnnnnnnnnnnnnnnnnnnnnnnnnnnnnnnnnnnnnnnnnnnnnnnnnnnnnnnnnnnnnnnnnnnnnnnnnnnnnnnnnnnnnnnnnnnnnnnnnnnnnnnnnnnnnnnnnnnnnnnnnnnnnnnnnnnnnnnnnnnnnnnnnnnnnnnnnnnnnnnnnnnnnnnnnnnnnnnnnnnnnnnnnnnnnnnnnnnnnnnnnnnnnnnnnnnnnnnnnnnnnnnnnnnnnnnnnnnnnnnnnnnnnnnnnnnnnnnnnnnnnnnnnnnnnnnnnnnnnnnnnnnnnnnnnnnnnnnnnnnnnnnnnnnnnnnnnnnnnnnnnnnnnnnnnnnnnnnnnnnnnnnnnnnnnnnnnnnnnnnnnnnnnnnnnnnnnnnnnnnnnnnnnnnnnnnnnnnnnnnnnnnnnnnnnnnnnnnnnnnnnnnnnnnnnnnnnnnnnnnnnnnnnnnnnnnnnnnnnnnnnnnnnnnnnnnnnnnnnnnnnnnnnnnnnnnnnnnnnnnnnnnnnnnnnnnnnnnnnnnnnnnnnnnnnnnnnnnnnnnnnnnnnnnnnnnnnnnnnnnnnnnnnnnnnnnnnnnnnnnnnnnnnnnnnnnnnnnnnnnnnnnnnnnnnnnnnnnnnnnnnnnnnnnnnnnnnnnnnnnnnnnnnnnnnnnnnnnnnnnnnnnnnnnnnnnnnnnnnnnnnnnnnnnnnnnnnnnnnnnnnnnnnnnnnnnnnnnnnnnnnnnnnnnnnnnnnnnnnnnnnnnnnnnnnnnnnnnnnnnnnnnnnnnnnnnnnnnnnnnnnnnnnnnnnnnnnnnnnnnnnnnnnnnnnnnnnnnnnnnnnnnnnnnnnnnnnnnnnnnnnnnnnnnnnnnnnnnnnnnnnnnnnnnnnnnnnnnnnnnnnnnnnnnnnnnnnnnnnnnnnnnnnnnnnnnnnnnnnnnnnnnnnnnnnnnnnnnnnnnnnnnnnnnnnnnnnnnnnnnnnnnnnnnnnnnnnnnnnnnnnnnnnnnnnnnnnnnnnnnnnnnnnnnnnnnnnnnnnnnnnnnnnnnnnnnnnnnnnnnnnnnnnnnnnnnnnnnnnnnnnnnnnnnnnnnnnnnnnnnnnnnnnnnnnnnnnnnnnnnnnnnnnnnnnnnnnnnnnnnnnnnnnnnnnnnnnnnnnnnnnnnnnnnnnnnnnnnnnnnnnnnnnnnnnnnnnnnnnnnnnnnnnnnnnnnnnnnnnnnnnnnnnnnnnnnnnnnnnnnnnnnnnnnnnnnnnnnnnnnnnnnnnnnnnnnnnnnnnnnnnnnnnnnnnnnnnnnnnnnnnnnnnnnnnnnnnnnnnnnnnnnnnnnnnnnnnnnnnnnnnnnnnnnnnnnnnnnnnnnnnnnnnnnnnnnnnnnnnnnnnnnnnnnnnnnnnnnnnnnnnnnnnnnnnnnnnnnnnnnnnnnnnnnnnnnnnnnnnnnnnnnnnnnnnnnnnnnnnnnnnnnnnnnnnnnnnnnnnnnnnnnnnnnnnnnnnnnnnnnnnnnnnnnnnnnnnnnnnnnnnnnnnnnnnnnnnnnnnnnnnnnnnnnnnnnnnnnnnnnnnnnnnnnnnnnnnnnnnnnnnnnnnnnnnnnnnnnnnnnnnnnnnnnnnnnnnnnnnnnnnnnnnnnnnnnnnnnnnnnnnnnnnnnnnnnnnnnnnnnnnnnnnnnnnnnnnnnnnnnnnnnnnnnnnnnnnnnnnnnnnnnnnnnnnnnnnnnnnnnnnnnnnnnnnnnnnnnnnnnnnnnnnnnnnnnnnnnnnnnnnnnnnnnnnnnnnnnnnnnnnnnnnnnnnnnnnnnnnnnnnnnnnnnnnnnnnnnnnnnnnnnnnnnnnnnnnnnnnnnnnnnnnnnnnnnnnnnnnnnnnnnnnnnnnnnnnnnnnnnnnnnnnnnnnnnnnnnnnnnnnnnnnnnnnnnnnnnnnnnnnnnnnnnnnnnnnnnnnnnnnnnnnnnnnnnnnnnnnnnnnnnnnnnnnnnnnnnnnnnnnnnnnnnnnnnnnnnnnnnnnnnnnnnnnnnnnnnnnnnnnnnnnnnnnnnnnnnnnnnnnnnnnnnnnnnnnnnnnnnnnnnnnnnnnnnnnnnnnnnnnnnnnnnnnnnnnnnnnnnnnnnnnnnnnnnnnnnnnnnnnnnnnnnnnnnnnnnnnnnnnnnnnnnnnnnnnnnnnnnnnnnnnnnnnnnnnnnnnnnnnnnnnnnnnnnnnnnnnnnnnnnnnnnnnnnnnnnnnnnnnnnnnnnnnnnnnnnnnnnnnnnnnnnnnnnnnnnnnnnnnnnnnnnnnnnnnnnnnnnnnnnnnnnnnnnnnnnnnnnnnnnnnnnnnnnnnnnnnnnnnnnnnnnnnnnnnnnnnnnnnnnnnnnnnnnnnnnnnnnnnnnnnnnnnnnnnnnnnnnnnnnnnnnnnnnnnnnnnnnnnnnnnnnnnnnnnnnnnnnnnnnnnnnnnnnnnnnnnnnnnnnnnnnnnnnnnnnnnnnnnnnnnnnnnnnnnnnnnnnnnnnnnnnnnnnnnnnnnnnnnnnnnnnnnnnnnnnnnnnnnnnnnnnnnnnnnnnnnnnnnnnnnnnnnnnnnnnnnnnnnnnnnnnnnnnnnnnnnnnnnnnnnnnnnnnnnnnnnnnnnnnnnnnnnnnnnnnnnnnnnnnnnnnnnnnnnnnnnnnnnnnnnnnnnnnnnnnnnnnnnnnnnnnnnnnnnnnnnnnnnnnnnnnnnnnnnnnnnnnnnnnnnnnnnnnnnnnnnnnnnnnnnnnnnnnnnnnnnnnnnnnnnnnnnnnnnnnnnnnnnnnnnnnnnnnnnnnnnnnnnnnnnnnnnnnnnnnnnnnnnnnnnnnnnnnnnnnnnnnnnnnnnnnnnnnnnnnnnnnnnnnnnnnnnnnnnnnnnnnnnnnnnnnnnnnnnnnnnnnnnnnnnnnnnnnnnnnnnnnnnnnnnnnnnnnnnnnnnnnnnnnnnnnnnnnnnnnnnnnnnnnnnnnnnnnnnnnnnnnnnnnnnnnnnnnnnnnnnnnnnnnnnnnnnnnnnnnnnnnnnnnnnnnnnnnnnnnnnnnnnnnnnnnnnnnnnnnnnnnnnnnnnnnnnnnnnnnnnnnnnnnnnnnnnnnnnnnnnnnnnnnnnnnnnnnnnnnnnnnnnnnnnnnnnnnnnnnnnnnnnnnnnnnnnnnnnnnnnnnnnnnnnnnnnnnnnnnnnnnnnnnnnnnnnnnnnnnnnnnnnnnnnnnnnnnnnnnnnnnnnnnnnnnnnnnnnnnnnnnnnnnnnnnnnnnnnnnnnnnnnnnnnnnnnnnnnnnnnnnnnnnnnnnnnnnnnnnnnnnnnnnnnnnnnnnnnnnnnnnnnnnnnnnnnnnnnnnnnnnnnnnnnnnnnnnnnnnnnnnnnnnnnnnnnnnnnnnnnnnnnnnnnnnnnnnnnnnnnnnnnnnnnnnnnnnnnnnnnnnnnnnnnnnnnnnnnnnnnnnnnnnnnnnnnnnnnnnnnnnnnnnnnnnnnnnnnnnnnnnnnnnnnnnnnnnnnnnnnnnnnnnnnnnnnnnnnnnnnnnnnnnnnnnnnnnnnnnnnnnnnnnnnnnnnnnnnnnnnnnnnnnnnnnnnnnnnnnnnnnnnnnnnnnnnnnnnnnnnnnnnnnnnnnnnnnnnnnnnnnnnnnnnnnnnnnnnnnnnnnnnnnnnnnnnnnnnnnnnnnnnnnnnnnnnnnnnnnnnnnnnnnnnnnnnnnnnnnnnnnnnnnnnnnnnnnnnnnnnnnnnnnnnnnnnnnnnnnnnnnnnnnnnnnnnnnnnnnnnnnnnnnnnnnnnnnnnnnnnnnnnnnnnnnnnnnnnnnnnnnnnnnnnnnnnnnnnnnnnnnnnnnnnnnnnnnnnnnnnnnnnnnnnnnnnnnnnnnnnnnnnnnnnnnnnnnnnnnnnnnnnnnnnnnnnnnnnnnnnnnnnnnnnnnnnnnnnnnnnnnnnnnnnnnnnnnnnnnnnnnnnnnnnnnnnnnnnnnnnnnnnnnnnnnnnnnnnnnnnnnnnnnnnnnnnnnnnnnnnnnnnnnnnnnnnnnnnnnnnnnnnnnnnnnnnnnnnnnnnnnnnnnnnnnnnnnnnnnnnnnnnnnnnnnnnnnnnnnnnnnnnnnnnnnnnnnnnnnnnnnnnnnnnnnnnnnnnnnnnnnnnnnnnnnnnnnnnnnnnnnnnnnnnnnnnnnnnnnnnnnnnnnnnnnnnnnnnnnnnnnnnnnnnnnnnnnnnnnnnnnnnnnnnnnnnnnnnnnnnnnnnnnnnnnnnnnnnnnnnnnnnnnnnnnnnnnnnnnnnnnnnnnnnnnnnnnnnnnnnnnnnnnnnnnnnnnnnnnnnnnnnnnnnnnnnnnnnnnnnnnnnnnnnnnnnnnnnnnnnnnnnnnnnnnnnnnnnnnnnnnnnnnnnnnnnnnnnnnnnnnnnnnnnnnnnnnnnnnnnnnnnnnnnnnnnnnnnnnnnnnnnnnnnnnnnnnnnnnnnnnnnnnnnnnnnnnnnnnnnnnnnnnnnnnnnnnnnnnnnnnnnnnnnnnnnnnnnnnnnnnnnnnnnnnnnnnnnnnnnnnnnnnnnnnnnnnnnnnnnnnnnnnnnnnnnnnnnnnnnnnnnnnnnnnnnnnnnnnnnnnnnnnnnnnnnnnnnnnnnnnnnnnnnnnnnnnnnnnnnnnnnnnnnnnnnnnnnnnnnnnnnnnnnnnnnnnnnnnnnnnnnnnnnnnnnnnnnnnnnnnnnnnnnnnnnnnnnnnnnnnnnnnnnnnnnnnnnnnnnnnnnnnnnnnnnnnnnnnnnnnnnnnnnnnnnnnnnnnnnnnnnnnnnnnnnnnnnnnnnnnnnnnnnnnnnnnnnnnnnnnnnnnnnnnnnnnnnnnnnnnnnnnnnnnnnnnnnnnnnnnnnnnnnnnnnnnnnnnnnnnnnnnnnnnnnnnnnnnnnnnnnnnnnnnnnnnnnnnnnnnnnnnnnnnnnnnnnnnnnnnnnnnnnnnnnnnnnnnnnnnnnnnnnnnnnnnnnnnnnnnnnnnnnnnnnnnnnnnnnnnnnnnnnnnnnnnnnnnnnnnnnnnnnnnnnnnnnnnnnnnnnnnnnnnnnnnnnnnnnnnnnnnnnnnnnnnnnnnnnnnnnnnnnnnnnnnnnnnnnnnnnnnnnnnnnnnnnnnnnnnnnnnnnnnnnnnnnnnnnnnnnnnnnnnnnnnnnnnnnnnnnnnnnnnnnnnnnnnnnnnnnnnnnnnnnnnnnnnnnnnnnnnnnnnnnnnnnnnnnnnnnnnnnnnnnnnnnnnnnnnnnnnnnnnnnnnnnnnnnnnnnnnnnnnnnnnnnnnnnnnnnnnnnnnnnnnnnnnnnnnnnnnnnnnnnnnnnnnnnnnnnnnnnnnnnnnnnnnnnnnnnnnnnnnnnnnnnnnnnnnnnnnnnnnnnnnnnnnnnnnnnnnnnnnnnnnnnnnnnnnnnnnnnnnnnnnnnnnnnnnnnnnnnnnnnnnnnnnnnnnnnnnnnnnnnnnnnnnnnnnnnnnnnnnnnnnnnnnnnnnnnnnnnnnnnnnnnnnnnnnnnnnnnnnnnnnnnnnnnnnnnnnnnnnnnnnnnnnnnnnnnnnnnnnnnnnnnnnnnnnnnnnnnnnnnnnnnnnnnnnnnnnnnnnnnnnnnnnnnnnnnnnnnnnnnnnnnnnnnnnnnnnnnnnnnnnnnnnnnnnnnnnnnnnnnnnnnnnnnnnnnnnnnnnnnnnnnnnnnnnnnnnnnnnnnnnnnnnnnnnnnnnnnnnnnnnnnnnnnnnnnnnnnnnnnnnnnnnnnnnnnnnnnnnnnnnnnnnnnnnnnnnnnnnnnnnnnnnnnnnnnnnnnnnnnnnnnnnnnnnnnnnnnnnnnnnnnnnnnnnnnnnnnnnnnnnnnnnnnnnnnnnnnnnnnnnnnnnnnnnnnnnnnnnnnnnnnnnnnnnnnnnnnnnnnnnnnnnnnnnnnnnnnnnnnnnnnnnnnnnnnnnnnnnnnnnnnnnnnnnnnnnnnnnnnnnnnnnnnnnnnnnnnnnnnnnnnnnnnnnnnnnnnnnnnnnnnnnnnnnnnnnnnnnnnnnnnnnnnnnnnnnnnnnnnnnnnnnnnnnnnnnnnnnnnnnnnnnnnnnnnnnnnnnnnnnnnnnnnnnnnnnnnnnnnnnnnnnnnnnnnnnnnnnnnnnnnnnnnnnnnnnnnnnnnnnnnnnnnnnnnnnnnnnnnnnnnnnnnnnnnnnnnnnnnnnnnnnnnnnnnnnnnnnnnnnnnnnnnnnnnnnnnnnnnnnnnnnnnnnnnnnnnnnnnnnnnnnnnnnnnnnnnnnnnnnnnnnnnnnnnnnnnnnnnnnnnnnnnnnnnnnnnnnnnnnnnnnnnnnnnnnnnnnnnnnnnnnnnnnnnnnnnnnnnnnnnnnnnnnnnnnnnnnnnnnnnnnnnnnnnnnnnnnnnnnnnnnnnnnnnnnnnnnnnnnnnnnnnnnnnnnnnnnnnnnnnnnnnnnnnnnnnnnnnnnnnnnnnnnnnnnnnnnnnnnnnnnnnnnnnnnnnnnnnnnnnnnnnnnnnnnnnnnnnnnnnnnnnnnnnnnnnnnnnnnnnnnnnnnnnnnnnnnnnnnnnnnnnnnnnnnnnnnnnnnnnnnnnnnnnnnnnnnnnnnnnnnnnnnnnnnnnnnnnnnnnnnnnnnnnnnnnnnnnnnnnnnnnnnnnnnnnnnnnnnnnnnnnnnnnnnnnnnnnnnnnnnnnnnnnnnnnnnnnnnnnnnnnnnnnnnnnnnnnnnnnnnnnnnnnnnnnnnnnnnnnnnnnnnnnnnnnnnnnnnnnnnnnnnnnnnnnnnnnnnnnnnnnnnnnnnnnnnnnnnnnnnnnnnnnnnnnnnnnnnnnnnnnnnnnnnnnnnnnnnnnnnnnnnnnnnnnnnnnnnnnnnnnnnnnnnnnnnnnnnnnnnnnnnnnnnnnnnnnnnnnnnnnnnnnnnnnnnnnnnnnnnnnnnnnnnnnnnnnnnnnnnnnnnnnnnnnnnnnnnnnnnnnnnnnnnnnnnnnnnnnnnnnnnnnnnnnnnnnnnnnnnnnnnnnnnnnnnnnnnnnnnnnnnnnnnnnnnnnnnnnnnnnnnnnnnnnnnnnnnnnnnnnnnnnnnnnnnnnnnnnnnnnnnnnnnnnnnnnnnnnnnnnnnnnnnnnnnnnnnnnnnnnnnnnnnnnnnnnnnnnnnnnnnnnnnnnnnnnnnnnnnnnnnnnnnnnnnnnnnnnnnnnnnnnnnnnnnnnnnnnnnnnnnnnnnnnnnnnnnnnnnnnnnnnnnnnnnnnnnnnnnnnnnnnnnnnnnnnnnnnnnnnnnnnnnnnnnnnnnnnnnnnnnnnnnnnnnnnnnnnnnnnnnnnnnnnnnnnnnnnnnnnnnnnnnnnnnnnnnnnnnnnnnnnnnnnnnnnnnnnnnnnnnnnnnnnnnnnnnnnnnnnnnnnnnnnnnnnnnnnnnnnnnnnnnnnnnnnnnnnnnnnnnnnnnnnnnnnnnnnnnnnnnnnnnnnnnnnnnnnnnnnnnnnnnnnnnnnnnnnnnnnnnnnnnnnnnnnnnnnnnnnnnnnnnnnnnnnnnnnnnnnnnnnnnnnnnnnnnnnnnnnnnnnnnnnnnnnnnnnnnnnnnnnnnnnnnnnnnnnnnnnnnnnnnnnnnnnnnnnnnnnnnnnnnnnnnnnnnnnnnnnnnnnnnnnnnnnnnnnnnnnnnnnnnnnnnnnnnnnnnnnnnnnnnnnnnnnnnnnnnnnnnnnnnnnnnnnnnnnnnnnnnnnnnnnnnnnnnnnnnnnnnnnnnnnnnnnnnnnnnnnnnnnnnnnnnnnnnnnnnnnnnnnnnnnnnnnnnnnnnnnnnnnnnnnnnnnnnnnnnnnnnnnnnnnnnnnnnnnnnnnnnnnnnnnnnnnnnnnnnnnnnnnnnnnnnnnnnnnnnnnnnnnnnnnnnnnnnnnnnnnnnnnnnnnnnnnnnnnnnnnnnnnnnnnnnnnnnnnnnnnnnnnnnnnnnnnnnnnnnnnnnnnnnnnnnnnnnnnnnnnnnnnnnnnnnnnnnnnnnnnnnnnnnnnnnnnnnnnnnnnnnnnnnnnnnnnnnnnnnnnnnnnnnnnnnnnnnnnnnnnnnnnnnnnnnnnnnnnnnnnnnnnnnnnnnnnnnnnnnnnnnnnnnnnnnnnnnnnnnnnnnnnnnnnnnnnnnnnnnnnnnnnnnnnnnnnnnnnnnnnnnnnnnnnnnnnnnnnnnnnnnnnnnnnnnnnnnnnnnnnnnnnnnnnnnnnnnnnnnnnnnnnnnnnnnnnnnnnnnnnnnnnnnnnnnnnnnnnnnnnnnnnnnnnnnnnnnnnnnnnnnnnnnnnnnnnnnnnnnnnnnnnnnnnnnnnnnnnnnnnnnnnnnnnnnnnnnnnnnnnnnnnnnnnnnnnnnnnnnnnnnnnnnnnnnnnnnnnnnnnnnnnnnnnnnnnnnnnnnnnnnnnnnnnnnnnnnnnnnnnnnnnnnnnnnnnnnnnnnnnnnnnnnnnnnnnnnnnnnnnnnnnnnnnnnnnnnnnnnnnnnnnnnnnnnnnnnnnnnnnnnnnnnnnnnnnnnnnnnnnnnnnnnnnnnnnnnnnnnnnnnnnnnnnnnnnnnnnnnnnnnnnnnnnnnnnnnnnnnnnnnnnnnnnnnnnnnnnnnnnnnnnnnnnnnnnnnnnnnnnnnnnnnnnnnnnnnnnnnnnnnnnnnnnnnnnnnnnnnnnnnnnnnnnnnnnnnnnnnnnnnnnnnnnnnnnnnnnnnnnnnnnnnnnnnnnnnnnnnnnnnnnnnnnnnnnnnnnnnnnnnnnnnnnnnnnnnnnnnnnnnnnnnnnnnnnnnnnnnnnnnnnnnnnnnnnnnnnnnnnnnnnnnnnnnnnnnnnnnnnnnnnnnnnnnnnnnnnnnnnnnnnnnnnnnnnnnnnnnnnnnnnnnnnnnnnnnnnnnnnnnnnnnnnnnnnnnnnnnnnnnnnnnnnnnnnnnnnnnnnnnnnnnnnnnnnnnnnnnnnnnnnnnnnnnnnnnnnnnnnnnnnnnnnnnnnnnnnnnnnnnnnnnnnnnnnnnnnnnnnnnnnnnnnnnnnnnnnnnnnnnnnnnnnnnnnnnnnnnnnnnnnnnnnnnnnnnnnnnnnnnnnnnnnnnnnnnnnnnnnnnnnnnnnnnnnnnnnnnnnnnnnnnnnnnnnnnnnnnnnnnnnnnnnnnnnnnnnnnnnnnnnnnnnnnnnnnnnnnnnnnnnnnnnnnnnnnnnnnnnnnnnnnnnnnnnnnnnnnnnnnnnnnnnnnnnnnnnnnnnnnnnnnnnnnnnnnnnnnnnnnnnnnnnnnnnnnnnnnnnnnnnnnnnnnnnnnnnnnnnnnnnnnnnnnnnnnnnnnnnnnnnnnnnnnnnnnnnnnnnnnnnnnnnnnnnnnnnnnnnnnnnnnnnnnnnnnnnnnnnnnnnnnnnnnnnnnnnnnnnnnnnnnnnnnnnnnnnnnnnnnnnnnnnnnnnnnnnnnnnnnnnnnnnnnnnnnnnnnnnnnnnnnnnnnnnnnnnnnnnnnnnnnnnnnnnnnnnnnnnnnnnnnnnnnnnnnnnnnnnnnnnnnnnnnnnnnnnnnnnnnnnnnnnnnnnnnnnnnnnnnnnnnnnnnnnnnnnnnnnnnnnnnnnnnnnnnnnnnnnnnnnnnnnnnnnnnnnnnnnnnnnnnnnnnnnnnnnnnnnnnnnnnnnnnnnnnnnnnnnnnnnnnnnnnnnnnnnnnnnnnnnnnnnnnnnnnnnnnnnnnnnnnnnnnnnnnnnnnnnnnnnnnnnnnnnnnnnnnnnnnnnnnnnnnnnnnnnnnnnnnnnnnnnnnnnnnnnnnnnnnnnnnnnnnnnnnnnnnnnnnnnnnnnnnnnnnnnnnnnnnnnnnnnnnnnnnnnnnnnnnnnnnnnnnnnnnnnnnnnnnnnnnnnnnnnnnnnnnnnnnnnnnnnnnnnnnnnnnnnnnnnnnnnnnnnnnnnnnnnnnnnnnnnnnnnnnnnnnnnnnnnnnnnnnnnnnnnnnnnnnnnnnnnnnnnnnnnnnnnnnnnnnnnnnnnnnnnnnnnnnnnnnnnnnnnnnnnnnnnnnnnnnnnnnnnnnnnnnnnnnnnnnnnnnnnnnnnnnnnnnnnnnnnnnnnnnnnnnnnnnnnnnnnnnnnnnnnnnnnnnnnnnnnnnnnnnnnnnnnnnnnnnnnnnnnnnnnnnnnnnnnnnnnnnnnnnnnnnnnnnnnnnnnnnnnnnnnnnnnnnnnnnnnnnnnnnnnnnnnnnnnnnnnnnnnnnnnnnnnnnnnnnnnnnnnnnnnnnnnnnnnnnnnnnnnnnnnnnnnnnnnnnnnnnnnnnnnnnnnnnnnnnnnnnnnnnnnnnnnnnnnnnnnnnnnnnnnnnnnnnnnnnnnnnnnnnnnnnnnnnnnnnnnnnnnnnnnnnnnnnnnnnnnnnnnnnnnnnnnnnnnnnnnnnnnnnnnnnnnnnnnnnnnnnnnnnnnnnnnnnnnnnnnnnnnnnnnnnnnnnnnnnnnnnnnnnnnnnnnnnnnnnnnnnnnnnnnnnnnnnnnnnnnnnnnnnnnnnnnnnnnnnnnnnnnnnnnnnnnnnnnnnnnnnnnnnnnnnnnnnnnnnnnnnnnnnnnnnnnnnnnnnnnnnnnnnnnnnnnnnnnnnnnnnnnnnnnnnnnnnnnnnnnnnnnnnnnnnnnnnnnnnnnnnnnnnnnnnnnnnnnnnnnnnnnnnnnnnnnnnnnnnnnnnnnnnnnnnnnnnnnnnnnnnnnnnnnnnnnnnnnnnnnnnnnnnnnnnnnnnnnnnnnnnnnnnnnnnnnnnnnnnnnnnnnnnnnnnnnnnnnnnnnnnnnnnnnnnnnnnnnnnnnnnnnnnnnnnnnnnnnnnnnnnnnnnnnnnnnnnnnnnnnnnnnnnnnnnnnnnnnnnnnnnnnnnnnnnnnnnnnnnnnnnnnnnnnnnnnnnnnnnnnnnnnnnnnnnnnnnnnnnnnnnnnnnnnnnnnnnnnnnnnnnnnnnnnnnnnnnnnnnnnnnnnnnnnnnnnnnnnnnnnnnnnnnnnnnnnnnnnnnnnnnnnnnnnnnnnnnnnnnnnnnnnnnnnnnnnnnnnnnnnnnnnnnnnnnnnnnnnnnnnnnnnnnnnnnnnnnnnnnnnnnnnnnnnnnnnnnnnnnnnnnnnnnnnnnnnnnnnnnnnnnnnnnnnnnnnnnnnnnnnnnnnnnnnnnnnnnnnnnnnnnnnnnnnnnnnnnnnnnnnnnnnnnnnnnnnnnnnnnnnnnnnnnnnnnnnnnnnnnnnnnnnnnnnnnnnnnnnnnnnnnnnnnnnnnnnnnnnnnnnnnnnnnnnnnnnnnnnnnnnnnnnnnnnnnnnnnnnnnnnnnnnnnnnnnnnnnnnnnnnnnnnnnnnnnnnnnnnnnnnnnnnnnnnnnnnnnnnnnnnnnnnnnnnnnnnnnnnnnnnnnnnnnnnnnnnnnnnnnnnnnnnnnnnnnnnnnnnnnnnnnnnnnnnnnnnnnnnnnnnnnnnnnnnnnnnnnnnnnnnnnnnnnnnnnnnnnnnnnnnnnnnnnnnnnnnnnnnnnnnnnnnnnnnnnnnnnnnnnnnnnnnnnnnnnnnnnnnnnnnnnnnnnnnnnnnnnnnnnnnnnnnnnnnnnnnnnnnnnnnnnnnnnnnnnnnnnnnnnnnnnnnnnnnnnnnnnnnnnnnnnnnnnnnnnnnnnnnnnnnnnnnnnnnnnnnnnnnnnnnnnnnnnnnnnnnnnnnnnnnnnnnnnnnnnnnnnnnnnnnnnnnnnnnnnnnnnnnnnnnnnnnnnnnnnnnnnnnnnnnnnnnnnnnnnnnnnnnnnnnnnnnnnnnnnnnnnnnnnnnnnnnnnnnnnnnnnnnnnnnnnnnnnnnnnnnnnnnnnnnnnnnnnnnnnnnnnnnnnnnnnnnnnnnnnnnnnnnnnnnnnnnnnnnnnnnnnnnnnnnnnnnnnnnnnnnnnnnnnnnnnnnnnnnnnnnnnnnnnnnnnnnnnnnnnnnnnnnnnnnnnnnnnnnnnnnnnnnnnnnnnnnnnnnnnnnnnnnnnnnnnnnnnnnnnnnnnnnnnnnnnnnnnnnnnnnnnnnnnnnnnnnnnnnnnnnnnnnnnnnnnnnnnnnnnnnnnnnnnnnnnnnnnnnnnnnnnnnnnnnnnnnnnnnnnnnnnnnnnnnnnnnnnnnnnnnnnnnnnnnnnnnnnnnnnnnnnnnnnnnnnnnnnnnnnnnnnnnnnnnnnnnnnnnnnnnnnnnnnnnnnnnnnnnnnnnnnnnnnnnnnnnnnnnnnnnnnnnnnnnnnnnnnnnnnnnnnnnnnnnnnnnnnnnnnnnnnnnnnnnnnnnnnnnnnnnnnnnnnnnnnnnnnnnnnnnnnnnnnnnnnnnnnnnnnnnnnnnnnnnnnnnnnnnnnnnnnnnnnnnnnnnnnnnnnnnnnnnnnnnnnnnnnnnnnnnnnnnnnnnnnnnnnnnnnnnnnnnnnnnnnnnnnnnnnnnnnnnnnnnnnnnnnnnnnnnnnnnnnnnnnnnnnnnnnnnnnnnnnnnnnnnnnnnnnnnnnnnnnnnnnnnnnnnnnnnnnnnnnnnnnnnnnnnnnnnnnnnnnnnnnnnnnnnnnnnnnnnnnnnnnnnnnnnnnnnnnnnnnnnnnnnnnnnnnnnnnnnnnnnnnnnnnnnnnnnnnnnnnnnnnnnnnnnnnnnnnnnnnnnnnnnnnnnnnnnnnnnnnnnnnnnnnnnnnnnnnnnnnnnnnnnnnnnnnnnnnnnnnnnnnnnnnnnnnnnnnnnnnnnnnnnnnnnnnnnnnnnnnnnnnnnnnnnnnnnnnnnnnnnnnnnnnnnnnnnnnnnnnnnnnnnnnnnnnnnnnnnnnnnnnnnnnnnnnnnnnnnnnnnnnnnnnnnnnnnnnnnnnnnnnnnnnnnnnnnnnnnnnnnnnnnnnnnnnnnnnnnnnnnnnnnnnnnnnnnnnnnnnnnnnnnnnnnnnnnnnnnnnnnnnnnnnnnnnnnnnnnnnnnnnnnnnnnnnnnnnnnnnnnnnnnnnnnnnnnnnnnnnnnnnnnnnnnnnnnnnnnnnnnnnnnnnnnnnnnnnnnnnnnnnnnnnnnnnnnnnnnnnnnnnnnnnnnnnnnnnnnnnnnnnnnnnnnnnnnnnnnnnnnnnnnnnnnnnnnnnnnnnnnnnnnnnnnnnnnnnnnnnnnnnnnnnnnnnnnnnnnnnnnnnnnnnnnnnnnnnnnnnnnnnnnnnnnnnnnnnnnnnnnnnnnnnnnnnnnnnnnnnnnnnnnnnnnnnnnnnnnnnnnnnnnnnnnnnnnnnnnnnnnnnnnnnnnnnnnnnnnnnnnnnnnnnnnnnnnnnnnnnnnnnnnnnnnnnnnnnnnnnnnnnnnnnnnnnnnnnnnnnnnnnnnnnnnnnnnnnnnnnnnnnnnnnnnnnnnnnnnnnnnnnnnnnnnnnnnnnnnnnnnnnnnnnnnnnnnnnnnnnnnnnnnnnnnnnnnnnnnnnnnnnnnnnnnnnnnnnnnnnnnnnnnnnnnnnnnnnnnnnnnnnnnnnnnnnnnnnnnnnnnnnnnnnnnnnnnnnnnnnnnnnnnnnnnnnnnnnnnnnnnnnnnnnnnnnnnnnnnnnnnnnnnnnnnnnnnnnnnnnnnnnnnnnnnnnnnnnnnnnnnnnnnnnnnnnnnnnnnnnnnnnnnnnnnnnnnnnnnnnnnnnnnnnnnnnnnnnnnnnnnnnnnnnnnnnnnnnnnnnnnnnnnnnnnnnnnnnnnnnnnnnnnnnnnnnnnnnnnnnnnnnnnnnnnnnnnnnnnnnnnnnnnnnnnnnnnnnnnnnnnnnnnnnnnnnnnnnnnnnnnnnnnnnnnnnnnnnnnnnnnnnnnnnnnnnnnnnnnnnnnnnnnnnnnnnnnnnnnnnnnnnnnnnnnnnnnnnnnnnnnnnnnnnnnnnnnnnnnnnnnnnnnnnnnnnnnnnnnnnnnnnnnnnnnnnnnnnnnnnnnnnnnnnnnnnnnnnnnnnnnnnnnnnnnnnnnnnnnnnnnnnnnnnnnnnnnnnnnnnnnnnnnnnnnnnnnnnnnnnnnnnnnnnnnnnnnnnnnnnnnnnnnnnnnnnnnnnnnnnnnnnnnnnnnnnnnnnnnnnnnnnnnnnnnnnnnnnnnnnnnnnnnnnnnnnnnnnnnnnnnnnnnnnnnnnnnnnnnnnnnnnnnnnnnnnnnnnnnnnnnnnnnnnnnnnnnnnnnnnnnnnnnnnnnnnnnnnnnnnnnnnnnnnnnnnnnnnnnnnnnnnnnnnnnnnnnnnnnnnnnnnnnnnnnnnnnnnnnnnnnnnnnnnnnnnnnnnnnnnnnnnnnnnnnnnnnnnnnnnnnnnnnnnnnnnnnnnnnnnnnnnnnnnnnnnnnnnnnnnnnnnnnnnnnnnnnnnnnnnnnnnnnnnnnnnnnnnnnnnnnnnnnnnnnnnnnnnnnnnnnnnnnnnnnnnnnnnnnnnnnnnnnnnnnnnnnnnnnnnnnnnnnnnnnnnnnnnnnnnnnnnnnnnnnnnnnnnnnnnnnnnnnnnnnnnnnnnnnnnnnnnnnnnnnnnnnnnnnnnnnnnnnnnnnnnnnnnnnnnnnnnnnnnnnnnnnnnnnnnnnnnnnnnnnnnnnnnnnnnnnnnnnnnnnnnnnnnnnnnnnnnnnnnnnnnnnnnnnnnnnnnnnnnnnnnnnnnnnnnnnnnnnnnnnnnnnnnnnnnnnnnnnnnnnnnnnnnnnnnnnnnnnnnnnnnnnnnnnnnnnnnnnnnnnnnnnnnnnnnnnnnnnnnnnnnnnnnnnnnnnnnnnnnnnnnnnnnnnnnnnnnnnnnnnnnnnnnnnnnnnnnnnnnnnnnnnnnnnnnnnnnnnnnnnnnnnnnnnnnnnnnnnnnnnnnnnnnnnnnnnnnnnnnnnnnnnnnnnnnnnnnnnnnnnnnnnnnnnnnnnnnnnnnnnnnnnnnnnnnnnnnnnnnnnnnnnnnnnnnnnnnnnnnnnnnnnnnnnnnnnnnnnnnnnnnnnnnnnnnnnnnnnnnnnnnnnnnnnnnnnnnnnnnnnnnnnnnnnnnnnnnnnnnnnnnnnnnnnnnnnnnnnnnnnnnnnnnnnnnnnnnnnnnnnnnnnnnnnnnnnnnnnnnnnnnnnnnnnnnnnnnnnnnnnnnnnnnnnnnnnnnnnnnnnnnnnnnnnnnnnnnnnnnnnnnnnnnnnnnnnnnnnnnnnnnnnnnnnnnnnnnnnnnnnnnnnnnnnnnnnnnnnnnnnnnnnnnnnnnnnnnnnnnnnnnnnnnnnnnnnnnnnnnnnnnnnnnnnnnnnnnnnnnnnnnnnnnnnnnnnnnnnnnnnnnnnnnnnnnnnnnnnnnnnnnnnnnnnnnnnnnnnnnnnnnnnnnnnnnnnnnnnnnnnnnnnnnnnnnnnnnnnnnnnnnnnnnnnnnnnnnnnnnnnnnnnnnnnnnnnnnnnnnnnnnnnnnnnnnnnnnnnnnnnnnnnnnnnnnnnnnnnnnnnnnnnnnnnnnnnnnnnnnnnnnnnnnnnnnnnnnnnnnnnnnnnnnnnnnnnnnnnnnnnnnnnnnnnnnnnnnnnnnnnnnnnnnnnnnnnnnnnnnnnnnnnnnnnnnnnnnnnnnnnnnnnnnnnnnnnnnnnnnnnnnnnnnnnnnnnnnnnnnnnnnnnnnnnnnnnnnnnnnnnnnnnnnnnnnnnnnnnnnnnnnnnnnnnnnnnnnnnnnnnnnnnnnnnnnnnnnnnnnnnnnnnnnnnnnnnnnnnnnnnnnnnnnnnnnnnnnnnnnnnnnnnnnnnnnnnnnnnnnnnnnnnnnnnnnnnnnnnnnnnnnnnnnnnnnnnnnnnnnnnnnnnnnnnnnnnnnnnnnnnnnnnnnnnnnnnnnnnnnnnnnnnnnnnnnnnnnnnnnnnnnnnnnnnnnnnnnnnnnnnnnnnnnnnnnnnnnnnnnnnnnnnnnnnnnnnnnnnnnnnnnnnnnnnnnnnnnnnnnnnnnnnnnnnnnnnnnnnnnnnnnnnnnnnnnnnnnnnnnnnnnnnnnnnnnnnnnnnnnnnnnnnnnnnnnnnnnnnnnnnnnnnnnnnnnnnnnnnnnnnnnnnnnnnnnnnnnnnnnnnnnnnnnnnnnnnnnnnnnnnnnnnnnnnnnnnnnnnnnnnnnnnnnnnnnnnnnnnnnnnnnnnnnnnnnnnnnnnnnnnnnnnnnnnnnnnnnnnnnnnnnnnnnnnnnnnnnnnnnnnnnnnnnnnnnnnnnnnnnnnnnnnnnnnnnnnnnnnnnnnnnnnnnnnnnnnnnnnnnnnnnnnnnnnnnnnnnnnnnnnnnnnnnnnnnnnnnnnnnnnnnnnnnnnnnnnnnnnnnnnnnnnnnnnnnnnnnnnnnnnnnnnnnnnnnnnnnnnnnnnnnnnnnnnnnnnnnnnnnnnnnnnnnnnnnnnnnnnnnnnnnnnnnnnnnnnnnnnnnnnnnnnnnnnnnnnnnnnnnnnnnnnnnnnnnnnnnnnnnnnnnnnnnnnnnnnnnnnnnnnnnnnnnnnnnnnnnnnnnnnnnnnnnnnnnnnnnnnnnnnnnnnnnnnnnnnnnnnnnnnnnnnnnnnnnnnnnnnnnnnnnnnnnnnnnnnnnnnnnnnnnnnnnnnnnnnnnnnnnnnnnnnnnnnnnnnnnnnnnnnnnnnnnnnnnnnnnnnnnnnnnnnnnnnnnnnnnnnnnnnnnnnnnnnnnnnnnnnnnnnnnnnnnnnnnnnnnnnnnnnnnnnnnnnnnnnnnnnnnnnnnnnnnnnnnnnnnnnnnnnnnnnnnnnnnnnnnnnnnnnnnnnnnnnnnnnnnnnnnnnnnnnnnnnnnnnnnnnnnnnnnnnnnnnnnnnnnnnnnnnnnnnnnnnnnnnnnnnnnnnnnnnnnnnnnnnnnnnnnnnnnnnnnnnnnnnnnnnnnnnnnnnnnnnnnnnnnnnnnnnnnnnnnnnnnnnnnnnnnnnnnnnnnnnnnnnnnnnnnnnnnnnnnnnnnnnnnnnnnnnnnnnnnnnnnnnnnnnnnnnnnnnnnnnnnnnnnnnnnnnnnnnnnnnnnnnnnnnnnnnnnnnnnnnnnnnnnnnnnnnnnnnnnnnnnnnnnnnnnnnnnnnnnnnnnnnnnnnnnnnnnnnnnnnnnnnnnnnnnnnnnnnnnnnnnnnnnnnnnnnnnnnnnnnnnnnnnnnnnnnnnnnnnnnnnnnnnnnnnnnnnnnnnnnnnnnnnnnnnnnnnnnnnnnnnnnnnnnnnnnnnnnnnnnnnnnnnnnnnnnnnnnnnnnnnnnnnnnnnnnnnnnnnnnnnnnnnnnnnnnnnnnnnnnnnnnnnnnnnnnnnnnnnnnnnnnnnnnnnnnnnnnnnnnnnnnnnnnnnnnnnnnnnnnnnnnnnnnnnnnnnnnnnnnnnnnnnnnnnnnnnnnnnnnnnnnnnnnnnnnnnnnnnnnnnnnnnnnnnnnnnnnnnnnnnnnnnnnnnnnnnnnnnnnnnnnnnnnnnnnnnnnnnnnnnnnnnnnnnnnnnnnnnnnnnnnnnnnnnnnnnnnnnnnnnnnnnnnnnnnnnnnnnnnnnnnnnnnnnnnnnnnnnnnnnnnnnnnnnnnnnnnnnnnnnnnnnnnnnnnnnnnnnnnnnnnnnnnnnnnnnnnnnnnnnnnnnnnnnnnnnnnnnnnnnnnnnnnnnnnnnnnnnnnnnnnnnnnnnnnnnnnnnnnnnnnnnnnnnnnnnnnnnnnnnnnnnnnnnnnnnnnnnnnnnnnnnnnnnnnnnnnnnnnnnnnnnnnnnnnnnnnnnnnnnnnnnnnnnnnnnnnnnnnnnnnnnnnnnnnnnnnnnnnnnnnnnnnnnnnnnnnnnnnnnnnnnnnnnnnnnnnnnnnnnnnnnnnnnnnnnnnnnnnnnnnnnnnnnnnnnnnnnnnnnnnnnnnnnnnnnnnnnnnnnnnnnnnnnnnnnnnnnnnnnnnnnnnnnnnnnnnnnnnnnnnnnnnnnnnnnnnnnnnnnnnnnnnnnnnnnnnnnnnnnnnnnnnnnnnnnnnnnnnnnnnnnnnnnnnnnnnnnnnnnnnnnnnnnnnnnnnnnnnnnnnnnnnnnnnnnnnnnnnnnnnnnnnnnnnnnnnnnnnnnnnnnnnnnnnnnnnnnnnnnnnnnnnnnnnnnnnnnnnnnnnnnnnnnnnnnnnnnnnnnnnnnnnnnnnnnnnnnnnnnnnnnnnnnnnnnnnnnnnnnnnnnnnnnnnnnnnnnnnnnnnnnnnnnnnnnnnnnnnnnnnnnnnnnnnnnnnnnnnnnnnnnnnnnnnnnnnnnnnnnnnnnnnnnnnnnnnnnnnnnnnnnnnnnnnnnnnnnnnnnnnnnnnnnnnnnnnnnnnnnnnnnnnnnnnnnnnnnnnnnnnnnnnnnnnnnnnnnnnnnnnnnnnnnnnnnnnnnnnnnnnnnnnnnnnnnnnnnnnnnnnnnnnnnnnnnnnnnnnnnnnnnnnnnnnnnnnnnnnnnnnnnnnnnnnnnnnnnnnnnnnnnnnnnnnnnnnnnnnnnnnnnnnnnnnnnnnnnnnnnnnnnnnnnnnnnnnnnnnnnnnnnnnnnnnnnnnnnnnnnnnnnnnnnnnnnnnnnnnnnnnnnnnnnnnnnnnnnnnnnnnnnnnnnnnnnnnnnnnnnnnnnnnnnnnnnnnnnnnnnnnnnnnnnnnnnnnnnnnnnnnnnnnnnnnnnnnnnnnnnnnnnnnnnnnnnnnnnnnnnnnnnnnnnnnnnnnnnnnnnnnnnnnnnnnnnnnnnnnnnnnnnnnnnnnnnnnnnnnnnnnnnnnnnnnnnnnnnnnnnnnnnnnnnnnnnnnnnnnnnnnnnnnnnnnnnnnnnnnnnnnnnnnnnnnnnnnnnnnnnnnnnnnnnnnnnnnnnnnnnnnnnnnnnnnnnnnnnnnnnnnnnnnnnnnnnnnnnnnnnnnnnnnnnnnnnnnnnnnnnnnnnnnnnnnnnnnnnnnnnnnnnnnnnnnnnnnnnnnnnnnnnnnnnnnnnnnnnnnnnnnnnnnnnnnnnnnnnnnnnnnnnnnnnnnnnnnnnnnnnnnnnnnnnnnnnnnnnnnnnnnnnnnnnnnnnnnnnnnnnnnnnnnnnnnnnnnnnnnnnnnnnnnnnnnnnnnnnnnnnnnnnnnnnnnnnnnnnnnnnnnnnnnnnnnnnnnnnnnnnnnnnnnnnnnnnnnnnnnnnnnnnnnnnnnnnnnnnnnnnnnnnnnnnnnnnnnnnnnnnnnnnnnnnnnnnnnnnnnnnnnnnnnnnnnnnnnnnnnnnnnnnnnnnnnnnnnnnnnnnnnnnnnnnnnnnnnnnnnnnnnnnnnnnnnnnnnnnnnnnnnnnnnnnnnnnnnnnnnnnnnnnnnnnnnnnnnnnnnnnnnnnnnnnnnnnnnnnnnnnnnnnnnnnnnnnnnnnnnnnnnnnnnnnnnnnnnnnnnnnnnnnnnnnnnnnnnnnnnnnnnnnnnnnnnnnnnnnnnnnnnnnnnnnnnnnnnnnnnnnnnnnnnnnnnnnnnnnnnnnnnnnnnnnnnnnnnnnnnnnnnnnnnnnnnnnnnnnnnnnnnnnnnnnnnnnnnnnnnnnnnnnnnnnnnnnnnnnnnnnnnnnnnnnnnnnnnnnnnnnnnnnnnnnnnnnnnnnnnnnnnnnnnnnnnnnnnnnnnnnnnnnnnnnnnnnnnnnnnnnnnnnnnnnnnnnnnnnnnnnnnnnnnnnnnnnnnnnnnnnnnnnnnnnnnnnnnnnnnnnnnnnnnnnnnnnnnnnnnnnnnnnnnnnnnnnnnnnnnnnnnnnnnnnnnnnnnnnnnnnnnnnnnnnnnnnnnnnnnnnnnnnnnnnnnnnnnnnnnnnnnnnnnnnnnnnnnnnnnnnnnnnnnnnnnnnnnnnnnnnnnnnnnnnnnnnnnnnnnnnnnnnnnnnnnnnnnnnnnnnnnnnnnnnnnnnnnnnnnnnnnnnnnnnnnnnnnnnnnnnnnnnnnnnnnnnnnnnnnnnnnnnnnnnnnnnnnnnnnnnnnnnnnnnnnnnnnnnnnnnnnnnnnnnnnnnnnnnnnnnnnnnnnnnnnnnnnnnnnnnnnnnnnnnnnnnnnnnnnnnnnnnnnnnnnnnnnnnnnnnnnnnnnnnnnnnnnnnnnnnnnnnnnnnnnnnnnnnnnnnnnnnnnnnnnnnnnnnnnnnnnnnnnnnnnnnnnnnnnnnnnnnnnnnnnnnnnnnnnnnnnnnnnnnnnnnnnnnnnnnnnnnnnnnnnnnnnnnnnnnnnnnnnnnnnnnnnnnnnnnnnnnnnnnnnnnnnnnnnnnnnnnnnnnnnnnnnnnnnnnnnnnnnnnnnnnnnnnnnnnnnnnnnnnnnnnnnnnnnnnnnnnnnnnnnnnnnnnnnnnnnnnnnnnnnnnnnnnnnnnnnnnnnnnnnnnnnnnnnnnnnnnnnnnnnnnnnnnnnnnnnnnnnnnnnnnnnnnnnnnnnnnnnnnnnnnnnnnnnnnnnnnnnnnnnnnnnnnnnnnnnnnnnnnnnnnnnnnnnnnnnnnnnnnnnnnnnnnnnnnnnnnnnnnnnnnnnnnnnnnnnnnnnnnnnnnnnnnnnnnnnnnnnnnnnnnnnnnnnnnnnnnnnnnnnnnnnnnnnnnnnnnnnnnnnnnnnnnnnnnnnnnnnnnnnnnnnnnnnnnnnnnnnnnnnnnnnnnnnnnnnnnnnnnnnnnnnnnnnnnnnnnnnnnnnnnnnnnnnnnnnnnnnnnnnnnnnnnnnnnnnnnnnnnnnnnnnnnnnnnnnnnnnnnnnnnnnnnnnnnnnnnnnnnnnnnnnnnnnnnnnnnnnnnnnnnnnnnnnnnnnnnnnnnnnnnnnnnnnnnnnnnnnnnnnnnnnnnnnnnnnnnnnnnnnnnnnnnnnnnnnnnnnnnnnnnnnnnnnnnnnnnnnnnnnnnnnnnnnnnnnnnnnnnnnnnnnnnnnnnnnnnnnnnnnnnnnnnnnnnnnnnnnnnnnnnnnnnnnnnnnnnnnnnnnnnnnnnnnnnnnnnnnnnnnnnnnnnnnnnnnnnnnnnnnnnnnnnnnnnnnnnnnnnnnnnnnnnnnnnnnnnnnnnnnnnnnnnnnnnnnnnnnnnnnnnnnnnnnnnnnnnnnnnnnnnnnnnnnnnnnnnnnnnnnnnnnnnnnnnnnnnnnnnnnnnnnnnnnnnnnnnnnnnnnnnnnnnnnnnnnnnnnnnnnnnnnnnnnnnnnnnnnnnnnnnnnnnnnnnnnnnnnnnnnnnnnnnnnnnnnnnnnnnnnnnnnnnnnnnnnnnnnnnnnnnnnnnnnnnnnnnnnnnnnnnnnnnnnnnnnnnnnnnnnnnnnnnnnnnnnnnnnnnnnnnnnnnnnnnnnnnnnnnnnnnnnnnnnnnnnnnnnnnnnnnnnnnnnnnnnnnnnnnnnnnnnnnnnnnnnnnnnnnnnnnnnnnnnnnnnnnnnnnnnnnnnnnnnnnnnnnnnnnnnnnnnnnnnnnnnnnnnnnnnnnnnnnnnnnnnnnnnnnnnnnnnnnnnnnnnnnnnnnnnnnnnnnnnnnnnnnnnnnnnnnnnnnnnnnnnnnnnnnnnnnnnnnnnnnnnnnnnnnnnnnnnnnnnnnnnnnnnnnnnnnnnnnnnnnnnnnnnnnnnnnnnnnnnnnnnnnnnnnnnnnnnnnnnnnnnnnnnnnnnnnnnnnnnnnnnnnnnnnnnnnnnnnnnnnnnnnnnnnnnnnnnnnnnnnnnnnnnnnnnnnnnnnnnnnnnnnnnnnnnnnnnnnnnnnnnnnnnnnnnnnnnnnnnnnnnnnnnnnnnnnnnnnnnnnnnnnnnnnnnnnnnnnnnnnnnnnnnnnnnnnnnnnnnnnnnnnnnnnnnnnnnnnnnnnnnnnnnnnnnnnnnnnnnnnnnnnnnnnnnnnnnnnnnnnnnnnnnnnnnnnnnnnnnnnnnnnnnnnnnnnnnnnnnnnnnnnnnnnnnnnnnnnnnnnnnnnnnnnnnnnnnnnnnnnnnnnnnnnnnnnnnnnnnnnnnnnnnnnnnnnnnnnnnnnnnnnnnnnnnnnnnnnnnnnnnnnnnnnnnnnnnnnnnnnnnnnnnnnnnnnnnnnnnnnnnnnnnnnnnnnnnnnnnnnnnnnnnnnnnnnnnnnnnnnnnnnnnnnnnnnnnnnnnnnnnnnnnnnnnnnnnnnnnnnnnnnnnnnnnnnnnnnnnnnnnnnnnnnnnnnnnnnnnnnnnnnnnnnnnnnnnnnnnnnnnnnnnnnnnnnnnnnnnnnnnnnnnnnnnnnnnnnnnnnnnnnnnnnnnnnnnnnnnnnnnnnnnnnnnnnnnnnnnnnnnnnnnnnnnnnnnnnnnnnnnnnnnnnnnnnnnnnnnnnnnnnnnnnnnnnnnnnnnnnnnnnnnnnnnnnnnnnnnnnnnnnnnnnnnnnnnnnnnnnnnnnnnnnnnnnnnnnnnnnnnnnnnnnnnnnnnnnnnnnnnnnnnnnnnnnnnnnnnnnnnnnnnnnnnnnnnnnnnnnnnnnnnnnnnnnnnnnnnnnnnnnnnnnnnnnnnnnnnnnnnnnnnnnnnnnnnnnnnnnnnnnnnnnnnnnnnnnnnnnnnnnnnnnnnnnnnnnnnnnnnnnnnnnnnnnnnnnnnnnnnnnnnnnnnnnnnnnnnnnnnnnnnnnnnnnnnnnnnnnnnnnnnnnnnnnnnnnnnnnnnnnnnnnnnnnnnnnnnnnnnnnnnnnnnnnnnnnnnnnnnnnnnnnnnnnnnnnnnnnnnnnnnnnnnnnnnnnnnnnnnnnnnnnnnnnnnnnnnnnnnnnnnnnnnnnnnnnnnnnnnnnnnnnnnnnnnnnnnnnnnnnnnnnnnnnnnnnnnnnnnnnnnnnnnnnnnnnnnnnnnnnnnnnnnnnnnnnnnnnnnnnnnnnnnnnnnnnnnnnnnnnnnnnnnnnnnnnnnnnnnnnnnnnnnnnnnnnnnnnnnnnnnnnnnnnnnnnnnnnnnnnnnnnnnnnnnnnnnnnnnnnnnnnnnnnnnnnnnnnnnnnnnnnnnnnnnnnnnnnnnnnnnnnnnnnnnnnnnnnnnnnnnnnnnnnnnnnnnnnnnnnnnnnnnnnnnnnnnnnnnnnnnnnnnnnnnnnnnnnnnnnnnnnnnnnnnnnnnnnnnnnnnnnnnnnnnnnnnnnnnnnnnnnnnnnnnnnnnnnnnnnnnnnnnnnnnnnnnnnnnnnnnnnnnnnnnnnnnnnnnnnnnnnnnnnnnnnnnnnnnnnnnnnnnnnnnnnnnnnnnnnnnnnnnnnnnnnnnnnnnnnnnnnnnnnnnnnnnnnnnnnnnnnnnnnnnnnnnnnnnnnnnnnnnnnnnnnnnnnnnnnnnnnnnnnnnnnnnnnnnnnnnnnnnnnnnnnnnnnnnnnnnnnnnnnnnnnnnnnnnnnnnnnnnnnnnnnnnnnnnnnnnnnnnnnnnnnnnnnnnnnnnnnnnnnnnnnnnnnnnnnnnnnnnnnnnnnnnnnnnnnnnnnnnnnnnnnnnnnnnnnnnnnnnnnnnnnnnnnnnnnnnnnnnnnnnnnnnnnnnnnnnnnnnnnnnnnnnnnnnnnnnnnnnnnnnnnnnnnnnnnnnnnnnnnnnnnnnnnnnnnnnnnnnnnnnnnnnnnnnnnnnnnnnnnnnnnnnnnnnnnnnnnnnnnnnnnnnnnnnnnnnnnnnnnnnnnnnnnnnnnnnnnnnnnnnnnnnnnnnnnnnnnnnnnnnnnnnnnnnnnnnnnnnnnnnnnnnnnnnnnnnnnnnnnnnnnnnnnnnnnnnnnnnnnnnnnnnnnnnnnnnnnnnnnnnnnnnnnnnnnnnnnnnnnnnnnnnnnnnnnnnnnnnnnnnnnnnnnnnnnnnnnnnnnnnnnnnnnnnnnnnnnnnnnnnnnnnnnnnnnnnnnnnnnnnnnnnnnnnnnnnnnnnnnnnnnnnnnnnnnnnnnnnnnnnnnnnnnnnnnnnnnnnnnnnnnnnnnnnnnnnnnnnnnnnnnnnnnnnnnnnnnnnnnnnnnnnnnnnnnnnnnnnnnnnnnnnnnnnnnnnnnnnnnnnnnnnnnnnnnnnnnnnnnnnnnnnnnnnnnnnnnnnnnnnnnnnnnnnnnnnnnnnnnnnnnnnnnnnnnnnnnnnnnnnnnnnnnnnnnnnnnnnnnnnnnnnnnnnnnnnnnnnnnnnnnnnnnnnnnnnnnnnnnnnnnnnnnnnnnnnnnnnnnnnnnnnnnnnnnnnnnnnnnnnnnnnnnnnnnnnnnnnnnnnnnnnnnnnnnnnnnnnnnnnnnnnnnnnnnnnnnnnnnnnnnnnnnnnnnnnnnnnnnnnnnnnnnnnnnnnnnnnnnnnnnnnnnnnnnnnnnnnnnnnnnnnnnnnnnnnnnnnnnnnnnnnnnnnnnnnnnnnnnnnnnnnnnnnnnnnnnnnnnnnnnnnnnnnnnnnnnnnnnnnnnnnnnnnnnnnnnnnnnnnnnnnnnnnnnnnnnnnnnnnnnnnnnnnnnnnnnnnnnnnnnnnnnnnnnnnnnnnnnnnnnnnnnnnnnnnnnnnnnnnnnnnnnnnnnnnnnnnnnnnnnnnnnnnnnnnnnnnnnnnnnnnnnnnnnnnnnnnnnnnnnnnnnnnnnnnnnnnnnnnnnnnnnnnnnnnnnnnnnnnnnnnnnnnnnnnnnnnnnnnnnnnnnnnnnnnnnnnnnnnnnnnnnnnnnnnnnnnnnnnnnnnnnnnnnnnnnnnnnnnnnnnnnnnnnnnnnnnnnnnnnnnnnnnnnnnnnnnnnnnnnnnnnnnnnnnnnnnnnnnnnnnnnnnnnnnnnnnnnnnnnnnnnnnnnnnnnnnnnnnnnnnnnnnnnnnnnnnnnnnnnnnnnnnnnnnnnnnnnnnnnnnnnnnnnnnnnnnnnnnnnnnnnnnnnnnnnnnnnnnnnnnnnnnnnnnnnnnnnnnnnnnnnnnnnnnnnnnnnnnnnnnnnnnnnnnnnnnnnnnnnnnnnnnnnnnnnnnnnnnnnnnnnnnnnnnnnnnnnnnnnnnnnnnnnnnnnnnnnnnnnnnnnnnnnnnnnnnnnnnnnnnnnnnnnnnnnnnnnnnnnnnnnnnnnnnnnnnnnnnnnnnnnnnnnnnnnnnnnnnnnnnnnnnnnnnnnnnnnnnnnnnnnnnnnnnnnnnnnnnnnnnnnnnnnnnnnnnnnnnnnnnnnnnnnnnnnnnnnnnnnnnnnnnnnnnnnnnnnnnnnnnnnnnnnnnnnnnnnnnnnnnnnnnnnnnnnnnnnnnnnnnnnnnnnnnnnnnnnnnnnnnnnnnnnnnnnnnnnnnnnnnnnnnnnnnnnnnnnnnnnnnnnnnnnnnnnnnnnnnnnnnnnnnnnnnnnnnnnnnnnnnnnnnnnnnnnnnnnnnnnnnnnnnnnnnnnnnnnnnnnnnnnnnnnnnnnnnnnnnnnnnnnnnnnnnnnnnnnnnnnnnnnnnnnnnnnnnnnnnnnnnnnnnnnnnnnnnnnnnnnnnnnnnnnnnnnnnnnnnnnnnnnnnnnnnnnnnnnnnnnnnnnnnnnnnnnnnnnnnnnnnnnnnnnnnnnnnnnnnnnnnnnnnnnnnnnnnnnnnnnnnnnnnnnnnnnnnnnnnnnnnnnnnnnnnnnnnnnnnnnnnnnnnnnnnnnnnnnnnnnnnnnnnnnnnnnnnnnnnnnnnnnnnnnnnnnnnnnnnnnnnnnnnnnnnnnnnnnnnnnnnnnnnnnnnnnnnnnnnnnnnnnnnnnnnnnnnnnnnnnnnnnnnnnnnnnnnnnnnnnnnnnnnnnnnnnnnnnnnnnnnnnnnnnnnnnnnnnnnnnnnnnnnnnnnnnnnnnnnnnnnnnnnnnnnnnnnnnnnnnnnnnnnnnnnnnnnnnnnnnnnnnnnnnnnnnnnnnnnnnnnnnnnnnnnnnnnnnnnnnnnnnnnnnnnnnnnnnnnnnnnnnnnnnnnnnnnnnnnnnnnnnnnnnnnnnnnnnnnnnnnnnnnnnnnnnnnnnnnnnnnnnnnnnnnnnnnnnnnnnnnnnnnnnnnnnnnnnnnnnnnnnnnnnnnnnnnnnnnnnnnnnnnnnnnnnnnnnnnnnnnnnnnnnnnnnnnnnnnnnnnnnnnnnnnnnnnnnnnnnnnnnnnnnnnnnnnnnnnnnnnnnnnnnnnnnnnnnnnnnnnnnnnnnnnnnnnnnnnnnnnnnnnnnnnnnnnnnnnnnnnnnnnnnnnnnnnnnnnnnnnnnnnnnnnnnnnnnnnnnnnnnnnnnnnnnnnnnnnnnnnnnnnnnnnnnnnnnnnnnnnnnnnnnnnnnnnnnnnnnnnnnnnnnnnnnnnnnnnnnnnnnnnnnnnnnnnnnnnnnnnnnnnnnnnnnnnnnnnnnnnnnnnnnnnnnnnnnnnnnnnnnnnnnnnnnnnnnnnnnnnnnnnnnnnnnnnnnnnnnnnnnnnnnnnnnnnnnnnnnnnnnnnnnnnnnnnnnnnnnnnnnnnnnnnnnnnnnnnnnnnnnnnnnnnnnnnnnnnnnnnnnnnnnnnnnnnnnnnnnnnnnnnnnnnnnnnnnnnnnnnnnnnnnnnnnnnnnnnnnnnnnnnnnnnnnnnnnnnnnnnnnnnnnnnnnnnnnnnnnnnnnnnnnnnnnnnnnnnnnnnnnnnnnnnnnnnnnnnnnnnnnnnnnnnnnnnnnnnnnnnnnnnnnnnnnnnnnnnnnnnnnnnnnnnnnnnnnnnnnnnnnnnnnnnnnnnnnnnnnnnnnnnnnnnnnnnnnnnnnnnnnnnnnnnnnnnnnnnnnnnnnnnnnnnnnnnnnnnnnnnnnnnnnnnnnnnnnnnnnnnnnnnnnnnnnnnnnnnnnnnnnnnnnnnnnnnnnnnnnnnnnnnnnnnnnnnnnnnnnnnnnnnnnnnnnnnnnnnnnnnnnnnnnnnnnnnnnnnnnnnnnnnnnnnnnnnnnnnnnnnnnnnnnnnnnnnnnnnnnnnnnnnnnnnnnnnnnnnnnnnnnnnnnnnnnnnnnnnnnnnnnnnnnnnnnnnnnnnnnnnnnnnnnnnnnnnnnnnnnnnnnnnnnnnnnnnnnnnnnnnnnnnnnnnnnnnnnnnnnnnnnnnnnnnnnnnnnnnnnnnnnnnnnnnnnnnnnnnnnnnnnnnnnnnnnnnnnnnnnnnnnnnnnnnnnnnnnnnnnnnnnnnnnnnnnnnnnnnnnnnnnnnnnnnnnnnnnnnnnnnnnnnnnnnnnnnnnnnnnnnnnnnnnnnnnnnnnnnnnnnnnnnnnnnnnnnnnnnnnnnnnnnnnnnnnnnnnnnnnnnnnnnnnnnnnnnnnnnnnnnnnnnnnnnnnnnnnnnnnnnnnnnnnnnnnnnnnnnnnnnnnnnnnnnnnnnnnnnnnnnnnnnnnnnnnnnnnnnnnnnnnnnnnnnnnnnnnnnnnnnnnnnnnnnnnnnnnnnnnnnnnnnnnnnnnnnnnnnnnnnnnnnnnnnnnnnnnnnnnnnnnnnnnnnnnnnnnnnnnnnnnnnnnnnnnnnnnnnnnnnnnnnnnnnnnnnnnnnnnnnnnnnnnnnnnnnnnnnnnnnnnnnnnnnnnnnnnnnnnnnnnnnnnnnnnnnnnnnnnnnnnnnnnnnnnnnnnnnnnnnnnnnnnnnnnnnnnnnnnnnnnnnnnnnnnnnnnnnnnnnnnnnnnnnnnnnnnnnnnnnnnnnnnnnnnnnnnnnnnnnnnnnnnnnnnnnnnnnnnnnnnnnnnnnnnnnnnnnnnnnnnnnnnnnnnnnnnnnnnnnnnnnnnnnnnnnnnnnnnnnnnnnnnnnnnnnnnnnnnnnnnnnnnnnnnnnnnnnnnnnnnnnnnnnnnnnnnnnnnnnnnnnnnnnnnnnnnnnnnnnnnnnnnnnnnnnnnnnnnnnnnnnnnnnnnnnnnnnnnnnnnnnnnnnnnnnnnnnnnnnnnnnnnnnnnnnnnnnnnnnnnnnnnnnnnnnnnnnnnnnnnnnnnnnnnnnnnnnnnnnnnnnnnnnnnnnnnnnnnnnnnnnnnnnnnnnnnnnnnnnnnnnnnnnnnnnnnnnnnnnnnnnnnnnnnnnnnnnnnnnnnnnnnnnnnnnnnnnnnnnnnnnnnnnnnnnnnnnnnnnnnnnnnnnnnnnnnnnnnnnnnnnnnnnnnnnnnnnnnnnnnnnnnnnnnnnnnnnnnnnnnnnnnnnnnnnnnnnnnnnnnnnnnnnnnnnnnnnnnnnnnnnnnnnnnnnnnnnnnnnnnnnnnnnnnnnnnnnnnnnnnnnnnnnnnnnnnnnnnnnnnnnnnnnnnnnnnnnnnnnnnnnnnnnnnnnnnnnnnnnnnnnnnnnnnnnnnnnnnnnnnnnnnnnnnnnnnnnnnnnnnnnnnnnnnnnnnnnnnnnnnnnnnnnnnnnnnnnnnnnnnnnnnnnnnnnnnnnnnnnnnnnnnnnnnnnnnnnnnnnnnnnnnnnnnnnnnnnnnnnnnnnnnnnnnnnnnnnnnnnnnnnnnnnnnnnnnnnnnnnnnnnnnnnnnnnnnnnnnnnnnnnnnnnnnnnnnnnnnnnnnnnnnnnnnnnnnnnnnnnnnnnnnnnnnnnnnnnnnnnnnnnnnnnnnnnnnnnnnnnnnnnnnnnnnnnnnnnnnnnnnnnnnnnnnnnnnnnnnnnnnnnnnnnnnnnnnnnnnnnnnnnnnnnnnnnnnnnnnnnnnnnnnnnnnnnnnnnnnnnnnnnnnnnnnnnnnnnnnnnnnnnnnnnnnnnnnnnnnnnnnnnnnnnnnnnnnnnnnnnnnnnnnnnnnnnnnnnnnnnnnnnnnnnnnnnnnnnnnnnnnnnnnnnnnnnnnnnnnnnnnnnnnnnnnnnnnnnnnnnnnnnnnnnnnnnnnnnnnnnnnnnnnnnnnnnnnnnnnnnnnnnnnnnnnnnnnnnnnnnnnnnnnnnnnnnnnnnnnnnnnnnnnnnnnnnnnnnnnnnnnnnnnnnnnnnnnnnnnnnnnnnnnnnnnnnnnnnnnnnnnnnnnnnnnnnnnnnnnnnnnnnnnnnnnnnnnnnnnnnnnnnnnnnnnnnnnnnnnnnnnnnnnnnnnnnnnnnnnnnnnnnnnnnnnnnnnnnnnnnnnnnnnnnnnnnnnnnnnnnnnnnnnnnnnnnnnnnnnnnnnnnnnnnnnnnnnnnnnnnnnnnnnnnnnnnnnnnnnnnnnnnnnnnnnnnnnnnnnnnnnnnnnnnnnnnnnnnnnnnnnnnnnnnnnnnnnnnnnnnnnnnnnnnnnnnnnnnnnnnnnnnnnnnnnnnnnnnnnnnnnnnnnnnnnnnnnnnnnnnnnnnnnnnnnnnnnnnnnnnnnnnnnnnnnnnnnnnnnnnnnnnnnnnnnnnnnnnnnnnnnnnnnnnnnnnnnnnnnnnnnnnnnnnnnnnnnnnnnnnnnnnnnnnnnnnnnnnnnnnnnnnnnnnnnnnnnnnnnnnnnnnnnnnnnnnnnnnnnnnnnnnnnnnnnnnnnnnnnnnnnnnnnnnnnnnnnnnnnnnnnnnnnnnnnnnnnnnnnnnnnnnnnnnnnnnnnnnnnnnnnnnnnnnnnnnnnnnnnnnnnnnnnnnnnnnnnnnnnnnnnnnnnnnnnnnnnnnnnnnnnnnnnnnnnnnnnnnnnnnnnnnnnnnnnnnnnnnnnnnnnnnnnnnnnnnnnnnnnnnnnnnnnnnnnnnnnnnnnnnnnnnnnnnnnnnnnnnnnnnnnnnnnnnnnnnnnnnnnnnnnnnnnnnnnnnnnnnnnnnnnnnnnnnnnnnnnnnnnnnnnnnnnnnnnnnnnnnnnnnnnnnnnnnnnnnnnnnnnnnnnnnnnnnnnnnnnnnnnnnnnnnnnnnnnnnnnnnnnnnnnnnnnnnnnnnnnnnnnnnnnnnnnnnnnnnnnnnnnnnnnnnnnnnnnnnnnnnnnnnnnnnnnnnnnnnnnnnnnnnnnnnnnnnnnnnnnnnnnnnnnnnnnnnnnnnnnnnnnnnnnnnnnnnnnnnnnnnnnnnnnnnnnnnnnnnnnnnnnnnnnnnnnnnnnnnnnnnnnnnnnnnnnnnnnnnnnnnnnnnnnnnnnnnnnnnnnnnnnnnnnnnnnnnnnnnnnnnnnnnnnnnnnnnnnnnnnnnnnnnnnnnnnnnnnnnnnnnnnnnnnnnnnnnnnnnnnnnnnnnnnnnnnnnnnnnnnnnnnnnnnnnnnnnnnnnnnnnnnnnnnnnnnnnnnnnnnnnnnnnnnnnnnnnnnnnnnnnnnnnnnnnnnnnnnnnnnnnnnnnnnnnnnnnnnnnnnnnnnnnnnnnnnnnnnnnnnnnnnnnnnnnnnnnnnnnnnnnnnnnnnnnnnnnnnnnnnnnnnnnnnnnnnnnnnnnnnnnnnnnnnnnnnnnnnnnnnnnnnnnnnnnnnnnnnnnnnnnnnnnnnnnnnnnnnnnnnnnnnnnnnnnnnnnnnnnnnnnnnnnnnnnnnnnnnnnnnnnnnnnnnnnnnnnnnnnnnnnnnnnnnnnnnnnnnnnnnnnnnnnnnnnnnnnnnnnnnnnnnnnnnnnnnnnnnnnnnnnnnnnnnnnnnnnnnnnnnnnnnnnnnnnnnnnnnnnnnnnnnnnnnnnnnnnnnnnnnnnnnnnnnnnnnnnnnnnnnnnnnnnnnnnnnnnnnnnnnnnnnnnnnnnnnnnnnnnnnnnnnnnnnnnnnnnnnnnnnnnnnnnnnnnnnnnnnnnnnnnnnnnnnnnnnnnnnnnnnnnnnnnnnnnnnnnnnnnnnnnnnnnnnnnnnnnnnnnnnnnnnnnnnnnnnnnnnnnnnnnnnnnnnnnnnnnnnnnnnnnnnnnnnnnnnnnnnnnnnnnnnnnnnnnnnnnnnnnnnnnnnnnnnnnnnnnnnnnnnnnnnnnnnnnnnnnnnnnnnnnnnnnnnnnnnnnnnnnnnnnnnnnnnnnnnnnnnnnnnnnnnnnnnnnnnnnnnnnnnnnnnnnnnnnnnnnnnnnnnnnnnnnnnnnnnnnnnnnnnnnnnnnnnnnnnnnnnnnnnnnnnnnnnnnnnnnnnnnnnnnnnnnnnnnnnnnnnnnnnnnnnnnnnnnnnnnnnnnnnnnnnnnnnnnnnnnnnnnnnnnnnnnnnnnnnnnnnnnnnnnnnnnnnnnnnnnnnnnnnnnnnnnnnnnnnnnnnnnnnnnnnnnnnnnnnnnnnnnnnnnnnnnnnnnnnnnnnnnnnnnnnnnnnnnnnnnnnnnnnnnnnnnnnnnnnnnnnnnnnnnnnnnnnnnnnnnnnnnnnnnnnnnnnnnnnnnnnnnnnnnnnnnnnnnnnnnnnnnnnnnnnnnnnnnnnnnnnnnnnnnnnnnnnnnnnnnnnnnnnnnnnnnnnnnnnnnnnnnnnnnnnnnnnnnnnnnnnnnnnnnnnnnnnnnnnnnnnnnnnnnnnnnnnnnnnnnnnnnnnnnnnnnnnnnnnnnnnnnnnnnnnnnnnnnnnnnnnnnnnnnnnnnnnnnnnnnnnnnnnnnnnnnnnnnnnnnnnnnnnnnnnnnnnnnnnnnnnnnnnnnnnnnnnnnnnnnnnnnnnnnnnnnnnnnnnnnnnnnnnnnnnnnnnnnnnnnnnnnnnnnnnnnnnnnnnnnnnnnnnnnnnnnnnnnnnnnnnnnnnnnnnnnnnnnnnnnnnnnnnnnnnnnnnnnnnnnnnnnnnnnnnnnnnnnnnnnnnnnnnnnnnnnnnnnnnnnnnnnnnnnnnnnnnnnnnnnnnnnnnnnnnnnnnnnnnnnnnnnnnnnnnnnnnnnnnnnnnnnnnnnnnnnnnnnnnnnnnnnnnnnnnnnnnnnnnnnnnnnnnnnnnnnnnnnnnnnnnnnnnnnnnnnnnnnnnnnnnnnnnnnnnnnnnnnnnnnnnnnnnnnnnnnnnnnnnnnnnnnnnnnnnnnnnnnnnnnnnnnnnnnnnnnnnnnnnnnnnnnnnnnnnnnnnnnnnnnnnnnnnnnnnnnnnnnnnnnnnnnnnnnnnnnnnnnnnnnnnnnnnnnnnnnnnnnnnnnnnnnnnnnnnnnnnnnnnnnnnnnnnnnnnnnnnnnnnnnnnnnnnnnnnnnnnnnnnnnnnnnnnnnnnnnnnnnnnnnnnnnnnnnnnnnnnnnnnnnnnnnnnnnnnnnnnnnnnnnnnnnnnnnnnnnnnnnnnnnnnnnnnnnnnnnnnnnnnnnnnnnnnnnnnnnnnnnnnnnnnnnnnnnnnnnnnnnnnnnnnnnnnnnnnnnnnnnnnnnnnnnnnnnnnnnnnnnnnnnnnnnnnnnnnnnnnnnnnnnnnnnnnnnnnnnnnnnnnnnnnnnnnnnnnnnnnnnnnnnnnnnnnnnnnnnnnnnnnnnnnnnnnnnnnnnnnnnnnnnnnnnnnnnnnnnnnnnnnnnnnnnnnnnnnnnnnnnnnnnnnnnnnnnnnnnnnnnnnnnnnnnnnnnnnnnnnnnnnnnnnnnnnnnnnnnnnnnnnnnnnnnnnnnnnnnnnnnnnnnnnnnnnnnnnnnnnnnnnnnnnnnnnnnnnnnnnnnnnnnnnnnnnnnnnnnnnnnnnnnnnnnnnnnnnnnnnnnnnnnnnnnnnnnnnnnnnnnnnnnnnnnnnnnnnnnnnnnnnnnnnnnnnnnnnnnnnnnnnnnnnnnnnnnnnnnnnnnnnnnnnnnnnnnnnnnnnnnnnnnnnnnnnnnnnnnnnnnnnnnnnnnnnnnnnnnnnnnnnnnnnnnnnnnnnnnnnnnnnnnnnnnnnnnnnnnnnnnnnnnnnnnnnnnnnnnnnnnnnnnnnnnnnnnnnnnnnnnnnnnnnnnnnnnnnnnnnnnnnnnnnnnnnnnnnnnnnnnnnnnnnnnnnnnnnnnnnnnnnnnnnnnnnnnnnnnnnnnnnnnnnnnnnnnnnnnnnnnnnnnnnnnnnnnnnnnnnnnnnnnnnnnnnnnnnnnnnnnnnnnnnnnnnnnnnnnnnnnnnnnnnnnnnnnnnnnnnnnnnnnnnnnnnnnnnnnnnnnnnnnnnnnnnnnnnnnnnnnnnnnnnnnnnnnnnnnnnnnnnnnnnnnnnnnnnnnnnnnnnnnnnnnnnnnnnnnnnnnnnnnnnnnnnnnnnnnnnnnnnnnnnnnnnnnnnnnnnnnnnnnnnnnnnnnnnnnnnnnnnnnnnnnnnnnnnnnnnnnnnnnnnnnnnnnnnnnnnnnnnnnnnnnnnnnnnnnnnnnnnnnnnnnnnnnnnnnnnnnnnnnnnnnnnnnnnnnnnnnnnnnnnnnnnnnnnnnnnnnnnnnnnnnnnnnnnnnnnnnnnnnnnnnnnnnnnnnnnnnnnnnnnnnnnnnnnnnnnnnnnnnnnnnnnnnnnnnnnnnnnnnnnnnnnnnnnnnnnnnnnnnnnnnnnnnnnnnnnnnnnnnnnnnnnnnnnnnnnnnnnnnnnnnnnnnnnnnnnnnnnnnnnnnnnnnnnnnnnnnnnnnnnnnnnnnnnnnnnnnnnnnnnnnnnnnnnnnnnnnnnnnnnnnnnnnnnnnnnnnnnnnnnnnnnnnnnnnnnnnnnnnnnnnnnnnnnnnnnnnnnnnnnnnnnnnnnnnnnnnnnnnnnnnnnnnnnnnnnnnnnnnnnnnnnnnnnnnnnnnnnnnnnnnnnnnnnnnnnnnnnnnnnnnnnnnnnnnnnnnnnnnnnnnnnnnnnnnnnnnnnnnnnnnnnnnnnnnnnnnnnnnnnnnnnnnnnnnnnnnnnnnnnnnnnnnnnnnnnnnnnnnnnnnnnnnnnnnnnnnnnnnnnnnnnnnnnnnnnnnnnnnnnnnnnnnnnnnnnnnnnnnnnnnnnnnnnnnnnnnnnnnnnnnnnnnnnnnnnnnnnnnnnnnnnnnnnnnnnnnnnnnnnnnnnnnnnnnnnnnnnnnnnnnnnnnnnnnnnnnnnnnnnnnnnnnnnnnnnnnnnnnnnnnnnnnnnnnnnnnnnnnnnnnnnnnnnnnnnnnnnnnnnnnnnnnnnnnnnnnnnnnnnnnnnnnnnnnnnnnnnnnnnnnnnnnnnnnnnnnnnnnnnnnnnnnnnnnnnnnnnnnnnnnnnnnnnnnnnnnnnnnnnnnnnnnnnnnnnnnnnnnnnnnnnnnnnnnnnnnnnnnnnnnnnnnnnnnnnnnnnnnnnnnnnnnnnnnnnnnnnnnnnnnnnnnnnnnnnnnnnnnnnnnnnnnnnnnnnnnnnnnnnnnnnnnnnnnnnnnnnnnnnnnnnnnnnnnnnnnnnnnnnnnnnnnnnnnnnnnnnnnnnnnnnnnnnnnnnnnnnnnnnnnnnnnnnnnnnnnnnnnnnnnnnnnnnnnnnnnnnnnnnnnnnnnnnnnnnnnnnnnnnnnnnnnnnnnnnnnnnnnnnnnnnnnnnnnnnnnnnnnnnnnnnnnnnnnnnnnnnnnnnnnnnnnnnnnnnnnnnnnnnnnnnnnnnnnnnnnnnnnnnnnnnnnnnnnnnnnnnnnnnnnnnnnnnnnnnnnnnnnnnnnnnnnnnnnnnnnnnnnnnnnnnnnnnnnnnnnnnnnnnnnnnnnnnnnnnnnnnnnnnnnnnnnnnnnnnnnnnnnnnnnnnnnnnnnnnnnnnnnnnnnnnnnnnnnnnnnnnnnnnnnnnnnnnnnnnnnnnnnnnnnnnnnnnnnnnnnnnnnnnnnnnnnnnnnnnnnnnnnnnnnnnnnnnnnnnnnnnnnnnnnnnnnnnnnnnnnnnnnnnnnnnnnnnnnnnnnnnnnnnnnnnnnnnnnnnnnnnnnnnnnnnnnnnnnnnnnnnnnnnnnnnnnnnnnnnnnnnnnnnnnnnnnnnnnnnnnnnnnnnnnnnnnnnnnnnnnnnnnnnnnnnnnnnnnnnnnnnnnnnnnnnnnnnnnnnnnnnnnnnnnnnnnnnnnnnnnnnnnnnnnnnnnnnnnnnnnnnnnnnnnnnnnnnnnnnnnnnnnnnnnnnnnnnnnnnnnnnnnnnnnnnnnnnnnnnnnnnnnnnnnnnnnnnnnnnnnnnnnnnnnnnnnnnnnnnnnnnnnnnnnnnnnnnnnnnnnnnnnnnnnnnnnnnnnnnnnnnnnnnnnnnnnnnnnnnnnnnnnnnnnnnnnnnnnnnnnnnnnnnnnnnnnnnnnnnnnnnnnnnnnnnnnnnnnnnnnnnnnnnnnnnnnnnnnnnnnnnnnnnnnnnnnnnnnnnnnnnnnnnnnnnnnnnnnnnnnnnnnnnnnnnnnnnnnnnnnnnnnnnnnnnnnnnnnnnnnnnnnnnnnnnnnnnnnnnnnnnnnnnnnnnnnnnnnnnnnnnnnnnnnnnnnnnnnnnnnnnnnnnnnnnnnnnnnnnnnnnnnnnnnnnnnnnnnnnnnnnnnnnnnnnnnnnnnnnnnnnnnnnnnnnnnnnnnnnnnnnnnnnnnnnnnnnnnnnnnnnnnnnnnnnnnnnnnnnnnnnnnnnnnnnnnnnnnnnnnnnnnnnnnnnnnnnnnnnnnnnnnnnnnnnnnnnnnnnnnnnnnnnnnnnnnnnnnnnnnnnnnnnnnnnnnnnnnnnnnnnnnnnnnnnnnnnnnnnnnnnnnnnnnnnnnnnnnnnnnnnnnnnnnnnnnnnnnnnnnnnnnnnnnnnnnnnnnnnnnnnnnnnnnnnnnnnnnnnnnnnnnnnnnnnnnnnnnnnnnnnnnnnnnnnnnnnnnnnnnnnnnnnnnnnnnnnnnnnnnnnnnnnnnnnnnnnnnnnnnnnnnnnnnnnnnnnnnnnnnnnnnnnnnnnnnnnnnnnnnnnnnnnnnnnnnnnnnnnnnnnnnnnnnnnnnnnnnnnnnnnnnnnnnnnnnnnnnnnnnnnnnnnnnnnnnnnnnnnnnnnnnnnnnnnnnnnnnnnnnnnnnnnnnnnnnnnnnnnnnnnnnnnnnnnnnnnnnnnnnnnnnnnnnnnnnnnnnnnnnnnnnnnnnnnnnnnnnnnnnnnnnnnnnnnnnnnnnnnnnnnnnnnnnnnnnnnnnnnnnnnnnnnnnnnnnnnnnnnnnnnnnnnnnnnnnnnnnnnnnnnnnnnnnnnnnnnnnnnnnnnnnnnnnnnnnnnnnnnnnnnnnnnnnnnnnnnnnnnnnnnnnnnnnnnnnnnnnnnnnnnnnnnnnnnnnnnnnnnnnnnnnnnnnnnnnnnnnnnnnnnnnnnnnnnnnnnnnnnnnnnnnnnnnnnnnnnnnnnnnnnnnnnnnnnnnnnnnnnnnnnnnnnnnnnnnnnnnnnnnnnnnnnnnnnnnnnnnnnnnnnnnnnnnnnnnnnnnnnnnnnnnnnnnnnnnnnnnnnnnnnnnnnnnnnnnnnnnnnnnnnnnnnnnnnnnnnnnnnnnnnnnnnnnnnnnnnnnnnnnnnnnnnnnnnnnnnnnnnnnnnnnnnnnnnnnnnnnnnnnnnnnnnnnnnnnnnnnnnnnnnnnnnnnnnnnnnnnnnnnnnnnnnnnnnnnnnnnnnnnnnnnnnnnnnnnnnnnnnnnnnnnnnnnnnnnnnnnnnnnnnnnnnnnnnnnnnnnnnnnnnnnnnnnnnnnnnnnnnnnnnnnnnnnnnnnnnnnnnnnnnnnnnnnnnnnnnnnnnnnnnnnnnnnnnnnnnnnnnnnnnnnnnnnnnnnnnnnnnnnnnnnnnnnnnnnnnnnnnnnnnnnnnnnnnnnnnnnnnnnnnnnnnnnnnnnnnnnnnnnnnnnnnnnnnnnnnnnnnnnnnnnnnnnnnnnnnnnnnnnnnnnnnnnnnnnnnnnnnnnnnnnnnnnnnnnnnnnnnnnnnnnnnnnnnnnnnnnnnnnnnnnnnnnnnnnnnnnnnnnnnnnnnnnnnnnnnnnnnnnnnnnnnnnnnnnnnnnnnnnnnnnnnnnnnnnnnnnnnnnnnnnnnnnnnnnnnnnnnnnnnnnnnnnnnnnnnnnnnnnnnnnnnnnnnnnnnnnnnnnnnnnnnnnnnnnnnnnnnnnnnnnnnnnnnnnnnnnnnnnnnnnnnnnnnnnnnnnnnnnnnnnnnnnnnnnnnnnnnnnnnnnnnnnnnnnnnnnnnnnnnnnnnnnnnnnnnnnnnnnnnnnnnnnnnnnnnnnnnnnnnnnnnnnnnnnnnnnnnnnnnnnnnnnnnnnnnnnnnnnnnnnnnnnnnnnnnnnnnnnnnnnnnnnnnnnnnnnnnnnnnnnnnnnnnnnnnnnnnnnnnnnnnnnnnnnnnnnnnnnnnnnnnnnnnnnnnnnnnnnnnnnnnnnnnnnnnnnnnnnnnnnnnnnnnnnnnnnnnnnnnnnnnnnnnnnnnnnnnnnnnnnnnnnnnnnnnnnnnnnnnnnnnnnnnnnnnnnnnnnnnnnnnnnnnnnnnnnnnnnnnnnnnnnnnnnnnnnnnnnnnnnnnnnnnnnnnnnnnnnnnnnnnnnnnnnnnnnnnnnnnnnnnnnnnnnnnnnnnnnnnnnnnnnnnnnnnnnnnnnnnnnnnnnnnnnnnnnnnnnnnnnnnnnnnnnnnnnnnnnnnnnnnnnnnnnnnnnnnnnnnnnnnnnnnnnnnnnnnnnnnnnnnnnnnnnnnnnnnnnnnnnnnnnnnnnnnnnnnnnnnnnnnnnnnnnnnnnnnnnnnnnnnnnnnnnnnnnnnnnnnnnnnnnnnnnnnnnnnnnnnnnnnnnnnnnnnnnnnnnnnnnnnnnnnnnnnnnnnnnnnnnnnnnnnnnnnnnnnnnnnnnnnnnnnnnnnnnnnnnnnnnnnnnnnnnnnnnnnnnnnnnnnnnnnnnnnnnnnnnnnnnnnnnnnnnnnnnnnnnnnnnnnnnnnnnnnnnnnnnnnnnnnnnnnnnnnnnnnnnnnnnnnnnnnnnnnnnnnnnnnnnnnnnnnnnnnnnnnnnnnnnnnnnnnnnnnnnnnnnnnnnnnnnnnnnnnnnnnnnnnnnnnnnnnnnnnnnnnnnnnnnnnnnnnnnnnnnnnnnnnnnnnnnnnnnnnnnnnnnnnnnnnnnnnnnnnnnnnnnnnnnnnnnnnnnnnnnnnnnnnnnnnnnnnnnnnnnnnnnnnnnnnnnnnnnnnnnnnnnnnnnnnnnnnnnnnnnnnnnnnnnnnnnnnnnnnnnnnnnnnnnnnnnnnnnnnnnnnnnnnnnnnnnnnnnnnnnnnnnnnnnnnnnnnnnnnnnnnnnnnnnnnnnnnnnnnnnnnnnnnnnnnnnnnnnnnnnnnnnnnnnnnnnnnnnnnnnnnnnnnnnnnnnnnnnnnnnnnnnnnnnnnnnnnnnnnnnnnnnnnnnnnnnnnnnnnnnnnnnnnnnnnnnnnnnnnnnnnnnnnnnnnnnnnnnnnnnnnnnnnnnnnnnnnnnnnnnnnnnnnnnnnnnnnnnnnnnnnnnnnnnnnnnnnnnnnnnnnnnnnnnnnnnnnnnnnnnnnnnnnnnnnnnnnnnnnnnnnnnnnnnnnnnnnnnnnnnnnnnnnnnnnnnnnnnnnnnnnnnnnnnnnnnnnnnnnnnnnnnnnnnnnnnnnnnnnnnnnnnnnnnnnnnnnnnnnnnnnnnnnnnnnnnnnnnnnnnnnnnnnnnnnnnnnnnnnnnnnnnnnnnnnnnnnnnnnnnnnnnnnnnnnnnnnnnnnnnnnnnnnnnnnnnnnnnnnnnnnnnnnnnnnnnnnnnnnnnnnnnnnnnnnnnnnnnnnnnnnnnnnnnnnnnnnnnnnnnnnnnnnnnnnnnnnnnnnnnnnnnnnnnnnnnnnnnnnnnnnnnnnnnnnnnnnnnnnnnnnnnnnnnnnnnnnnnnnnnnnnnnnnnnnnnnnnnnnnnnnnnnnnnnnnnnnnnnnnnnnnnnnnnnnnnnnnnnnnnnnnnnnnnnnnnnnnnnnnnnnnnnnnnnnnnnnnnnnnnnnnnnnnnnnnnnnnnnnnnnnnnnnnnnnnnnnnnnnnnnnnnnnnnnnnnnnnnnnnnnnnnnnnnnnnnnnnnnnnnnnnnnnnnnnnnnnnnnnnnnnnnnnnnnnnnnnnnnnnnnnnnnnnnnnnnnnnnnnnnnnnnnnnnnnnnnnnnnnnnnnnnnnnnnnnnnnnnnnnnnnnnnnnnnnnnnnnnnnnnnnnnnnnnnnnnnnnnnnnnnnnnnnnnnnnnnnnnnnnnnnnnnnnnnnnnnnnnnnnnnnnnnnnnnnnnnnnnnnnnnnnnnnnnnnnnnnnnnnnnnnnnnnnnnnnnnnnnnnnnnnnnnnnnnnnnnnnnnnnnnnnnnnnnnnnnnnnnnnnnnnnnnnnnnnnnnnnnnnnnnnnnnnnnnnnnnnnnnnnnnnnnnnnnnnnnnnnnnnnnnnnnnnnnnnnnnnnnnnnnnnnnnnnnnnnnnnnnnnnnnnnnnnnnnnnnnnnnnnnnnnnnnnnnnnnnnnnnnnnnnnnnnnnnnnnnnnnnnnnnnnnnnnnnnnnnnnnnnnnnnnnnnnnnnnnnnnnnnnnnnnnnnnnnnnnnnnnnnnnnnnnnnnnnnnnnnnnnnnnnnnnnnnnnnnnnnnnnnnnnnnnnnnnnnnnnnnnnnnnnnnnnnnnnnnnnnnnnnnnnnnnnnnnnnnnnnnnnnnnnnnnnnnnnnnnnnnnnnnnnnnnnnnnnnnnnnnnnnnnnnnnnnnnnnnnnnnnnnnnnnnnnnnnnnnnnnnnnnnnnnnnnnnnnnnnnnnnnnnnnnnnnnnnnnnnnnnnnnnnnnnnnnnnnnnnnnnnnnnnnnnnnnnnnnnnnnnnnnnnnnnnnnnnnnnnnnnnnnnnnnnnnnnnnnnnnnnnnnnnnnnnnnnnnnnnnnnnnnnnnnnnnnnnnnnnnnnnnnnnnnnnnnnnnnnnnnnnnnnnnnnnnnnnnnnnnnnnnnnnnnnnnnnnnnnnnnnnnnnnnnnnnnnnnnnnnnnnnnnnnnnnnnnnnnnnnnnnnnnnnnnnnnnnnnnnnnnnnnnnnnnnnnnnnnnnnnnnnnnnnnnnnnnnnnnnnnnnnnnnnnnnnnnnnnnnnnnnnnnnnnnnnnnnnnnnnnnnnnnnnnnnnnnnnnnnnnnnnnnnnnnnnnnnnnnnnnnnnnnnnnnnnnnnnnnnnnnnnnnnnnnnnnnnnnnnnnnnnnnnnnnnnnnnnnnnnnnnnnnnnnnnnnnnnnnnnnnnnnnnnnnnnnnnnnnnnnnnnnnnnnnnnnnnnnnnnnnnnnnnnnnnnnnnnnnnnnnnnnnnnnnnnnnnnnnnnnnnnnnnnnnnnnnnnnnnnnnnnnnnnnnnnnnnnnnnnnnnnnnnnnnnnnnnnnnnnnnnnnnnnnnnnnnnnnnnnnnnnnnnnnnnnnnnnnnnnnnnnnnnnnnnnnnnnnnnnnnnnnnnnnnnnnnnnnnnnnnnnnnnnnnnnnnnnnnnnnnnnnnnnnnnnnnnnnnnnnnnnnnnnnnnnnnnnnnnnnnnnnnnnnnnnnnnnnnnnnnnnnnnnnnnnnnnnnnnnnnnnnnnnnnnnnnnnnnnnnnnnnnnnnnnnnnnnnnnnnnnnnnnnnnnnnnnnnnnnnnnnnnnnnnnnnnnnnnnnnnnnnnnnnnnnnnnnnnnnnnnnnnnnnnnnnnnnnnnnnnnnnnnnnnnnnnnnnnnnnnnnnnnnnnnnnnnnnnnnnnnnnnnnnnnnnnnnnnnnnnnnnnnnnnnnnnnnnnnnnnnnnnnnnnnnnnnnnnnnnnnnnnnnnnnnnnnnnnnnnnnnnnnnnnnnnnnnnnnnnnnnnnnnnnnnnnnnnnnnnnnnnnnnnnnnnnnnnnnnnnnnnnnnnnnnnnnnnnnnnnnnnnnnnnnnnnnnnnnnnnnnnnnnnnnnnnnnnnnnnnnnnnnnnnnnnnnnnnnnnnnnnnnnnnnnnnnnnnnnnnnnnnnnnnnnnnnnnnnnnnnnnnnnnnnnnnnnnnnnnnnnnnnnnnnnnnnnnnnnnnnnnnnnnnnnnnnnnnnnnnnnnnnnnnnnnnnnnnnnnnnnnnnnnnnnnnnnnnnnnnnnnnnnnnnnnnnnnnnnnnnnnnnnnnnnnnnnnnnnnnnnnnnnnnnnnnnnnnnnnnnnnnnnnnnnnnnnnnnnnnnnnnnnnnnnnnnnnnnnnnnnnnnnnnnnnnnnnnnnnnnnnnnnnnnnnnnnnnnnnnnnnnnnnnnnnnnnnnnnnnnnnnnnnnnnnnnnnnnnnnnnnnnnnnnnnnnnnnnnnnnnnnnnnnnnnnnnnnnnnnnnnnnnnnnnnnnnnnnnnnnnnnnnnnnnnnnnnnnnnnnnnnnnnnnnnnnnnnnnnnnnnnnnnnnnnnnnnnnnnnnnnnnnnnnnnnnnnnnnnnnnnnnnnnnnnnnnnnnnnnnnnnnnnnnnnnnnnnnnnnnnnnnnnnnnnnnnnnnnnnnnnnnnnnnnnnnnnnnnnnnnnnnnnnnnnnnnnnnnnnnnnnnnnnnnnnnnnnnnnnnnnnnnnnnnnnnnnnnnnnnnnnnnnnnnnnnnnnnnnnnnnnnnnnnnnnnnnnnnnnnnnnnnnnnnnnnnnnnnnnnnnnnnnnnnnnnnnnnnnnnnnnnnnnnnnnnnnnnnnnnnnnnnnnnnnnnnnnnnnnnnnnnnnnnnnnnnnnnnnnnnnnnnnnnnnnnnnnnnnnnnnnnnnnnnnnnnnnnnnnnnnnnnnnnnnnnnnnnnnnnnnnnnnnnnnnnnnnnnnnnnnnnnnnnnnnnnnnnnnnnnnnnnnnnnnnnnnnnnnnnnnnnnnnnnnnnnnnnnnnnnnnnnnnnnnnnnnnnnnnnnnnnnnnnnnnnnnnnnnnnnnnnnnnnnnnnnnnnnnnnnnnnnnnnnnnnnnnnnnnnnnnnnnnnnnnnnnnnnnnnnnnnnnnnnnnnnnnnnnnnnnnnnnnnnnnnnnnnnnnnnnnnnnnnnnnnnnnnnnnnnnnnnnnnnnnnnnnnnnnnnnnnnnnnnnnnnnnnnnnnnnnnnnnnnnnnnnnnnnnnnnnnnnnnnnnnnnnnnnnnnnnnnnnnnnnnnnnnnnnnnnnnnnnnnnnnnnnnnnnnnnnnnnnnnnnnnnnnnnnnnnnnnnnnnnnnnnnnnnnnnnnnnnnnnnnnnnnnnnnnnnnnnnnnnnnnnnnnnnnnnnnnnnnnnnnnnnnnnnnnnnnnnnnnnnnnnnnnnnnnnnnnnnnnnnnnnnnnnnnnnnnnnnnnnnnnnnnnnnnnnnnnnnnnnnnnnnnnnnnnnnnnnnnnnnnnnnnnnnnnnnnnnnnnnnnnnnnnnnnnnnnnnnnnnnnnnnnnnnnnnnnnnnnnnnnnnnnnnnnnnnnnnnnnnnnnnnnnnnnnnnnnnnnnnnnnnnnnnnnnnnnnnnnnnnnnnnnnnnnnnnnnnnnnnnnnnnnnnnnnnnnnnnnnnnnnnnnnnnnnnnnnnnnnnnnnnnnnnnnnnnnnnnnnnnnnnnnnnnnnnnnnnnnnnnnnnnnnnnnnnnnnnnnnnnnnnnnnnnnnnnnnnnnnnnnnnnnnnnnnnnnnnnnnnnnnnnnnnnnnnnnnnnnnnnnnnnnnnnnnnnnnnnnnnnnnnnnnnnnnnnnnnnnnnnnnnnnnnnnnnnnnnnnnnnnnnnnnnnnnnnnnnnnnnnnnnnnnnnnnnnnnnnnnnnnnnnnnnnnnnnnnnnnnnnnnnnnnnnnnnnnnnnnnnnnnnnnnnnnnnnnnnnnnnnnnnnnnnnnnnnnnnnnnnnnnnnnnnnnnnnnnnnnnnnnnnnnnnnnnnnnnnnnnnnnnnnnnnnnnnnnnnnnnnnnnnnnnnnnnnnnnnnnnnnnnnnnnnnnnnnnnnnnnnnnnnnnnnnnnnnnnnnnnnnnnnnnnnnnnnnnnnnnnnnnnnnnnnnnnnnnnnnnnnnnnnnnnnnnnnnnnnnnnnnnnnnnnnnnnnnnnnnnnnnnnnnnnnnnnnnnnnnnnnnnnnnnnnnnnnnnnnnnnnnnnnnnnnnnnnnnnnnnnnnnnnnnnnnnnnnnnnnnnnnnnnnnnnnnnnnnnnnnnnnnnnnnnnnnnnnnnnnnnnnnnnnnnnnnnnnnnnnnnnnnnnnnnnnnnnnnnnnnnnnnnnnnnnnnnnnnnnnnnnnnnnnnnnnnnnnnnnnnnnnnnnnnnnnnnnnnnnnnnnnnnnnnnnnnnnnnnnnnnnnnnnnnnnnnnnnnnnnnnnnnnnnnnnnnnnnnnnnnnnnnnnnnnnnnnnnnnnnnnnnnnnnnnnnnnnnnnnnnnnnnnnnnnnnnnnnnnnnnnnnnnnnnnnnnnnnnnnnnnnnnnnnnnnnnnnnnnnnnnnnnnnnnnnnnnnnnnnnnnnnnnnnnnnnnnnnnnnnnnnnnnnnnnnnnnnnnnnnnnnnnnnnnnnnnnnnnnnnnnnnnnnnnnnnnnnnnnnnnnnnnnnnnnnnnnnnnnnnnnnnnnnnnnnnnnnnnnnnnnnnnnnnnnnnnnnnnnnnnnnnnnnnnnnnnnnnnnnnnnnnnnnnnnnnnnnnnnnnnnnnnnnnnnnnnnnnnnnnnnnnnnnnnnnnnnnnnnnnnnnnnnnnnnnnnnnnnnnnnnnnnnnnnnnnnnnnnnnnnnnnnnnnnnnnnnnnnnnnnnnnnnnnnnnnnnnnnnnnnnnnnnnnnnnnnnnnnnnnnnnnnnnnnnnnnnnnnnnnnnnnnnnnnnnnnnnnnnnnnnnnnnnnnnnnnnnnnnnnnnnnnnnnnnnnnnnnnnnnnnnnnnnnnnnnnnnnnnnnnnnnnnnnnnnnnnnnnnnnnnnnnnnnnnnnnnnnnnnnnnnnnnnnnnnnnnnnnnnnnnnnnnnnnnnnnnnnnnnnnnnnnnnnnnnnnnnnnnnnnnnnnnnnnnnnnnnnnnnnnnnnnnnnnnnnnnnnnnnnnnnnnnnnnnnnnnnnnnnnnnnnnnnnnnnnnnnnnnnnnnnnnnnnnnnnnnnnnnnnnnnnnnnnnnnnnnnnnnnnnnnnnnnnnnnnnnnnnnnnnnnnnnnnnnnnnnnnnnnnnnnnnnnnnnnnnnnnnnnnnnnnnnnnnnnnnnnnnnnnnnnnnnnnnnnnnnnnnnnnnnnnnnnnnnnnnnnnnnnnnnnnnnnnnnnnnnnnnnnnnnnnnnnnnnnnnnnnnnnnnnnnnnnnnnnnnnnnnnnnnnnnnnnnnnnnnnnnnnnnnnnnnnnnnnnnnnnnnnnnnnnnnnnnnnnnnnnnnnnnnnnnnnnnnnnnnnnnnnnnnnnnnnnnnnnnnnnnnnnnnnnnnnnnnnnnnnnnnnnnnnnnnnnnnnnnnnnnnnnnnnnnnnnnnnnnnnnnnnnnnnnnnnnnnnnnnnnnnnnnnnnnnnnnnnnnnnnnnnnnnnnnnnnnnnnnnnnnnnnnnnnnnnnnnnnnnnnnnnnnnnnnnnnnnnnnnnnnnnnnnnnnnnnnnnnnnnnnnnnnnnnnnnnnnnnnnnnnnnnnnnnnnnnnnnnnnnnnnnnnnnnnnnnnnnnnnnnnnnnnnnnnnnnnnnnnnnnnnnnnnnnnnnnnnnnnnnnnnnnnnnnnnnnnnnnnnnnnnnnnnnnnnnnnnnnnnnnnnnnnnnnnnnnnnnnnnnnnnnnnnnnnnnnnnnnnnnnnnnnnnnnnnnnnnnnnnnnnnnnnnnnnnnnnnnnnnnnnnnnnnnnnnnnnnnnnnnnnnnnnnnnnnnnnnnnnnnnnnnnnnnnnnnnnnnnnnnnnnnnnnnnnnnnnnnnnnnnnnnnnnnnnnnnnnnnnnnnnnnnnnnnnnnnnnnnnnnnnnnnnnnnnnnnnnnnnnnnnnnnnnnnnnnnnnnnnnnnnnnnnnnnnnnnnnnnnnnnnnnnnnnnnnnnnnnnnnnnnnnnnnnnnnnnnnnnnnnnnnnnnnnnnnnnnnnnnnnnnnnnnnnnnnnnnnnnnnnnnnnnnnnnnnnnnnnnnnnnnnnnnnnnnnnnnnnnnnnnnnnnnnnnnnnnnnnnnnnnnnnnnnnnnnnnnnnnnnnnnnnnnnnnnnnnnnnnnnnnnnnnnnnnnnnnnnnnnnnnnnnnnnnnnnnnnnnnnnnnnnnnnnnnnnnnnnnnnnnnnnnnnnnnnnnnnnnnnnnnnnnnnnnnnnnnnnnnnnnnnnnnnnnnnnnnnnnnnnnnnnnnnnnnnnnnnnnnnnnnnnnnnnnnnnnnnnnnnnnnnnnnnnnnnnnnnnnnnnnnnnnnnnnnnnnnnnnnnnnnnnnnnnnnnnnnnnnnnnnnnnnnnnnnnnnnnnnnnnnnnnnnnnnnnnnnnnnnnnnnnnnnnnnnnnnnnnnnnnnnnnnnnnnnnnnnnnnnnnnnnnnnnnnnnnnnnnnnnnnnnnnnnnnnnnnnnnnnnnnnnnnnnnnnnnnnnnnnnnnnnnnnnnnnnnnnnnnnnnnnnnnnnnnnnnnnnnnnnnnnnnnnnnnnnnnnnnnnnnnnnnnnnnnnnnnnnnnnnnnnnnnnnnnnnnnnnnnnnnnnnnnnnnnnnnnnnnnnnnnnnnnnnnnnnnnnnnnnnnnnnnnnnnnnnnnnnnnnnnnnnnnnnnnnnnnnnnnnnnnnnnnnnnnnnnnnnnnnnnnnnnnnnnnnnnnnnnnnnnnnnnnnnnnnnnnnnnnnnnnnnnnnnnnnnnnnnnnnnnnnnnnnnnnnnnnnnnnnnnnnnnnnnnnnnnnnnnnnnnnnnnnnnnnnnnnnnnnnnnnnnnnnnnnnnnnnnnnnnnnnnnnnnnnnnnnnnnnnnnnnnnnnnnnnnnnnnnnnnnnnnnnnnnnnnnnnnnnnnnnnnnnnnnnnnnnnnnnnnnnnnnnnnnnnnnnnnnnnnnnnnnnnnnnnnnnnnnnnnnnnnnnnnnnnnnnnnnnnnnnnnnnnnnnnnnnnnnnnnnnnnnnnnnnnnnnnnnnnnnnnnnnnnnnnnnnnnnnnnnnnnnnnnnnnnnnnnnnnnnnnnnnnnnnnnnnnnnnnnnnnnnnnnnnnnnnnnnnnnnnnnnnnnnnnnnnnnnnnnnnnnnnnnnnnnnnnnnnnnnnnnnnnnnnnnnnnnnnnnnnnnnnnnnnnnnnnnnnnnnnnnnnnnnnnnnnnnnnnnnnnnnnnnnnnnnnnnnnnnnnnnnnnnnnnnnnnnnnnnnnnnnnnnnnnnnnnnnnnnnnnnnnnnnnnnnnnnnnnnnnnnnnnnnnnnnnnnnnnnnnnnnnnnnnnnnnnnnnnnnnnnnnnnnnnnnnnnnnnnnnnnnnnnnnnnnnnnnnnnnnnnnnnnnnnnnnnnnnnnnnnnnnnnnnnnnnnnnnnnnnnnnnnnnnnnnnnnnnnnnnnnnnnnnnnnnnnnnnnnnnnnnnnnnnnnnnnnnnnnnnnnnnnnnnnnnnnnnnnnnnnnnnnnnnnnnnnnnnnnnnnnnnnnnnnnnnnnnnnnnnnnnnnnnnnnnnnnnnnnnnnnnnnnnnnnnnnnnnnnnnnnnnnnnnnnnnnnnnnnnnnnnnnnnnnnnnnnnnnnnnnnnnnnnnnnnnnnnnnnnnnnnnnnnnnnnnnnnnnnnnnnnnnnnnnnnnnnnnnnnnnnnnnnnnnnnnnnnnnnnnnnnnnnnnnnnnnnnnnnnnnnnnnnnnnnnnnnnnnnnnnnnnnnnnnnnnnnnnnnnnnnnnnnnnnnnnnnnnnnnnnnnnnnnnnnnnnnnnnnnnnnnnnnnnnnnnnnnnnnnnnnnnnnnnnnnnnnnnnnnnnnnnnnnnnnnnnnnnnnnnnnnnnnnnnnnnnnnnnnnnnnnnnnnnnnnnnnnnnnnnnnnnnnnnnnnnnnnnnnnnnnnnnnnnnnnnnnnnnnnnnnnnnnnnnnnnnnnnnnnnnnnnnnnnnnnnnnnnnnnnnnnnnnnnnnnnnnnnnnnnnnnnnnnnnnnnnnnnnnnnnnnnnnnnnnnnnnnnnnnnnnnnnnnnnnnnnnnnnnnnnnnnnnnnnnnnnnnnnnnnnnnnnnnnnnnnnnnnnnnnnnnnnnnnnnnnnnnnnnnnnnnnnnnnnnnnnnnnnnnnnnnnnnnnnnnnnnnnnnnnnnnnnnnnnnnnnnnnnnnnnnnnnnnnnnnnnnnnnnnnnnnnnnnnnnnnnnnnnnnnnnnnnnnnnnnnnnnnnnnnnnnnnnnnnnnnnnnnnnnnnnnnnnnnnnnnnnnnnnnnnnnnnnnnnnnnnnnnnnnnnnnnnnnnnnnnnnnnnnnnnnnnnnnnnnnnnnnnnnnnnnnnnnnnnnnnnnnnnnnnnnnnnnnnnnnnnnnnnnnnnnnnnnnnnnnnnnnnnnnnnnnnnnnnnnnnnnnnnnnnnnnnnnnnnnnnnnnnnnnnnnnnnnnnnnnnnnnnnnnnnnnnnnnnnnnnnnnnnnnnnnnnnnnnnnnnnnnnnnnnnnnnnnnnnnnnnnnnnnnnnnnnnnnnnnnnnnnnnnnnnnnnnnnnnnnnnnnnnnnnnnnnnnnnnnnnnnnnnnnnnnnnnnnnnnnnnnnnnnnnnnnnnnnnnnnnnnnnnnnnnnnnnnnnnnnnnnnnnnnnnnnnnnnnnnnnnnnnnnnnnnnnnnnnnnnnnnnnnnnnnnnnnnnnnnnnnnnnnnnnnnnnnnnnnnnnnnnnnnnnnnnnnnnnnnnnnnnnnnnnnnnnnnnnnnnnnnnnnnnnnnnnnnnnnnnnnnnnnnnnnnnnnnnnnnnnnnnnnnnnnnnnnnnnnnnnnnnnnnnnnnnnnnnnnnnnnnnnnnnnnnnnnnnnnnnnnnnnnnnnnnnnnnnnnnnnnnnnnnnnnnnnnnnnnnnnnnnnnnnnnnnnnnnnnnnnnnnnnnnnnnnnnnnnnnnnnnnnnnnnnnnnnnnnnnnnnnnnnnnnnnnnnnnnnnnnnnnnnnnnnnnnnnnnnnnnnnnnnnnnnnnnnnnnnnnnnnnnnnnnnnnnnnnnnnnnnnnnnnnnnnnnnnnnnnnnnnnnnnnnnnnnnnnnnnnnnnnnnnnnnnnnnnnnnnnnnnnnnnnnnnnnnnnnnnnnnnnnnnnnnnnnnnnnnnnnnnnnnnnnnnnnnnnnnnnnnnnnnnnnnnnnnnnnnnnnnnnnnnnnnnnnnnnnnnnnnnnnnnnnnnnnnnnnnnnnnnnnnnnnnnnnnnnnnnnnnnnnnnnnnnnnnnnnnnnnnnnnnnnnnnnnnnnnnnnnnnnnnnnnnnnnnnnnnnnnnnnnnnnnnnnnnnnnnnnnnnnnnnnnnnnnnnnnnnnnnnnnnnnnnnnnnnnnnnnnnnnnnnnnnnnnnnnnnnnnnnnnnnnnnnnnnnnnnnnnnnnnnnnnnnnnnnnnnnnnnnnnnnnnnnnnnnnnnnnnnnnnnnnnnnnnnnnnnnnnnnnnnnnnnnnnnnnnnnnnnnnnnnnnnnnnnnnnnnnnnnnnnnnnnnnnnnnnnnnnnnnnnnnnnnnnnnnnnnnnnnnnnnnnnnnnnnnnnnnnnnnnnnnnnnnnnnnnnnnnnnnnnnnnnnnnnnnnnnnnnnnnnnnnnnnnnnnnnnnnnnnnnnnnnnnnnnnnnnnnnnnnnnnnnnnnnnnnnnnnnnnnnnnnnnnnnnnnnnnnnnnnnnnnnnnnnnnnnnnnnnnnnnnnnnnnnnnnnnnnnnnnnnnnnnnnnnnnnnnnnnnnnnnnnnnnnnnnnnnnnnnnnnnnnnnnnnnnnnnnnnnnnnnnnnnnnnnnnnnnnnnnnnnnnnnnnnnnnnnnnnnnnnnnnnnnnnnnnnnnnnnnnnnnnnnnnnnnnnnnnnnnnnnnnnnnnnnnnnnnnnnnnnnnnnnnnnnnnnnnnnnnnnnnnnnnnnnnnnnnnnnnnnnnnnnnnnnnnnnnnnnnnnnnnnnnnnnnnnnnnnnnnnnnnnnnnnnnnnnnnnnnnnnnnnnnnnnnnnnnnnnnnnnnnnnnnnnnnnnnnnnnnnnnnnnnnnnnnnnnnnnnnnnnnnnnnnnnnnnnnnnnnnnnnnnnnnnnnnnnnnnnnnnnnnnnnnnnnnnnnnnnnnnnnnnnnnnnnnnnnnnnnnnnnnnnnnnnnnnnnnnnnnnnnnnnnnnnnnnnnnnnnnnnnnnnnnnnnnnnnnnnnnnnnnnnnnnnnnnnnnnnnnnnnnnnnnnnnnnnnnnnnnnnnnnnnnnnnnnnnnnnnnnnnnnnnnnnnnnnnnnnnnnnnnnnnnnnnnnnnnnnnnnnnnnnnnnnnnnnnnnnnnnnnnnnnnnnnnnnnnnnnnnnnnnnnnnnnnnnnnnnnnnnnnnnnnnnnnnnnnnnnnnnnnnnnnnnnnnnnnnnnnnnnnnnnnnnnnnnnnnnnnnnnnnnnnnnnnnnnnnnnnnnnnnnnnnnnnnnnnnnnnnnnnnnnnnnnnnnnnnnnnnnnnnnnnnnnnnnnnnnnnnnnnnnnnnnnnnnnnnnnnnnnnnnnnnnnnnnnnnnnnnnnnnnnnnnnnnnnnnnnnnnnnnnnnnnnnnnnnnnnnnnnnnnnnnnnnnnnnnnnnnnnnnnnnnnnnnnnnnnnnnnnnnnnnnnnnnnnnnnnnnnnnnnnnnnnnnnnnnnnnnnnnnnnnnnnnnnnnnnnnnnnnnnnnnnnnnnnnnnnnnnnnnnnnnnnnnnnnnnnnnnnnnnnnnnnnnnnnnnnnnnnnnnnnnnnnnnnnnnnnnnnnnnnnnnnnnnnnnnnnnnnnnnnnnnnnnnnnnnnnnnnnnnnnnnnnnnnnnnnnnnnnnnnnnnnnnnnnnnnnnnnnnnnnnnnnnnnnnnnnnnnnnnnnnnnnnnnnnnnnnnnnnnnnnnnnnnnnnnnnnnnnnnnnnnnnnnnnnnnnnnnnnnnnnnnnnnnnnnnnnnnnnnnnnnnnnnnnnnnnnnnnnnnnnnnnnnnnnnnnnnnnnnnnnnnnnnnnnnnnnnnnnnnnnnnnnnnnnnnnnnnnnnnnnnnnnnnnnnnnnnnnnnnnnnnnnnnnnnnnnnnnnnnnnnnnnnnnnnnnnnnnnnnnnnnnnnnnnnnnnnnnnnnnnnnnnnnnnnnnnnnnnnnnnnnnnnnnnnnnnnnnnnnnnnnnnnnnnnnnnnnnnnnnnnnnnnnnnnnnnnnnnnnnnnnnnnnnnnnnnnnnnnnnnnnnnnnnnnnnnnnnnnnnnnnnnnnnnnnnnnnnnnnnnnnnnnnnnnnnnnnnnnnnnnnnnnnnnnnnnnnnnnnnnnnnnnnnnnnnnnnnnnnnnnnnnnnnnnnnnnnnnnnnnnnnnnnnnnnnnnnnnnnnnnnnnnnnnnnnnnnnnnnnnnnnnnnnnnnnnnnnnnnnnnnnnnnnnnnnnnnnnnnnnnnnnnnnnnnnnnnnnnnnnnnnnnnnnnnnnnnnnnnnnnnnnnnnnnnnnnnnnnnnnnnnnnnnnnnnnnnnnnnnnnnnnnnnnnnnnnnnnnnnnnnnnnnnnnnnnnnnnnnnnnnnnnnnnnnnnnnnnnnnnnnnnnnnnnnnnnnnnnnnnnnnnnnnnnnnnnnnnnnnnnnnnnnnnnnnnnnnnnnnnnnnnnnnnnnnnnnnnnnnnnnnnnnnnnnnnnnnnnnnnnnnnnnnnnnnnnnnnnnnnnnnnnnnnnnnnnnnnnnnnnnnnnnnnnnnnnnnnnnnnnnnnnnnnnnnnnnnnnnnnnnnnnnnnnnnnnnnnnnnnnnnnnnnnnnnnnnnnnnnnnnnnnnnnnnnnnnnnnnnnnnnnnnnnnnnnnnnnnnnnnnnnnnnnnnnnnnnnnnnnnnnnnnnnnnnnnnnnnnnnnnnnnnnnnnnnnnnnnnnnnnnnnnnnnnnnnnnnnnnnnnnnnnnnnnnnnnnnnnnnnnnnnnnnnnnnnnnnnnnnnnnnnnnnnnnnnnnnnnnnnnnnnnnnnnnnnnnnnnnnnnnnnnnnnnnnnnnnnnnnnnnnnnnnnnnnnnnnnnnnnnnnnnnnnnnnnnnnnnnnnnnnnnnnnnnnnnnnnnnnnnnnnnnnnnnnnnnnnnnnnnnnnnnnnnnnnnnnnnnnnnnnnnnnnnnnnnnnnnnnnnnnnnnnnnnnnnnnnnnnnnnnnnnnnnnnnnnnnnnnnnnnnnnnnnnnnnnnnnnnnnnnnnnnnnnnnnnnnnnnnnnnnnnnnnnnnnnnnnnnnnnnnnnnnnnnnnnnnnnnnnnnnnnnnnnnnnnnnnnnnnnnnnnnnnnnnnnnnnnnnnnnnnnnnnnnnnnnnnnnnnnnnnnnnnnnnnnnnnnnnnnnnnnnnnnnnnnnnnnnnnnnnnnnnnnnnnnnnnnnnnnnnnnnnnnnnnnnnnnnnnnnnnnnnnnnnnnnnnnnnnnnnnnnnnnnnnnnnnnnnnnnnnnnnnnnnnnnnnnnnnnnnnnnnnnnnnnnnnnnnnnnnnnnnnnnnnnnnnnnnnnnnnnnnnnnnnnnnnnnnnnnnnnnnnnnnnnnnnnnnnnnnnnnnnnnnnnnnnnnnnnnnnnnnnnnnnnnnnnnnnnnnnnnnnnnnnnnnnnnnnnnnnnnnnnnnnnnnnnnnnnnnnnnnnnnnnnnnnnnnnnnnnnnnnnnnnnnnnnnnnnnnnnnnnnnnnnnnnnnnnnnnnnnnnnnnnnnnnnnnnnnnnnnnnnnnnnnnnnnnnnnnnnnnnnnnnnnnnnnnnnnnnnnnnnnnnnnnnnnnnnnnnnnnnnnnnnnnnnnnnnnnnnnnnnnnnnnnnnnnnnnnnnnnnnnnnnnnnnnnnnnnnnnnnnnnnnnnnnnnnnnnnnnnnnnnnnnnnnnnnnnnnnnnnnnnnnnnnnnnnnnnnnnnnnnnnnnnnnnnnnnnnnnnnnnnnnnnnnnnnnnnnnnnnnnnnnnnnnnnnnnnnnnnnnnnnnnnnnnnnnnnnnnnnnnnnnnnnnnnnnnnnnnnnnnnnnnnnnnnnnnnnnnnnnnnnnnnnnnnnnnnnnnnnnnnnnnnnnnnnnnnnnnnnnnnnnnnnnnnnnnnnnnnnnnnnnnnnnnnnnnnnnnnnnnnnnnnnnnnnnnnnnnnnnnnnnnnnnnnnnnnnnnnnnnnnnnnnnnnnnnnnnnnnnnnnnnnnnnnnnnnnnnnnnnnnnnnnnnnnnnnnnnnnnnnnnnnnnnnnnnnnnnnnnnnnnnnnnnnnnnnnnnnnnnnnnnnnnnnnnnnnnnnnnnnnnnnnnnnnnnnnnnnnnnnnnnnnnnnnnnnnnnnnnnnnnnnnnnnnnnnnnnnnnnnnnnnnnnnnnnnnnnnnnnnnnnnnnnnnnnnnnnnnnnnnnnnnnnnnnnnnnnnnnnnnnnnnnnnnnnnnnnnnnnnnnnnnnnnnnnnnnnnnnnnnnnnnnnnnnnnnnnnnnnnnnnnnnnnnnnnnnnnnnnnnnnnnnnnnnnnnnnnnnnnnnnnnnnnnnnnnnnnnnnnnnnnnnnnnnnnnnnnnnnnnnnnnnnnnnnnnnnnnnnnnnnnnnnnnnnnnnnnnnnnnnnnnnnnnnnnnnnnnnnnnnnnnnnnnnnnnnnnnnnnnnnnnnnnnnnnnnnnnnnnnnnnnnnnnnnnnnnnnnnnnnnnnnnnnnnnnnnnnnnnnnnnnnnnnnnnnnnnnnnnnnnnnnnnnnnnnnnnnnnnnnnnnnnnnnnnnnnnnnnnnnnnnnnnnnnnnnnnnnnnnnnnnnnnnnnnnnnnnnnnnnnnnnnnnnnnnnnnnnnnnnnnnnnnnnnnnnnnnnnnnnnnnnnnnnnnnnnnnnnnnnnnnnnnnnnnnnnnnnnnnnnnnnnnnnnnnnnnnnnnnnnnnnnnnnnnnnnnnnnnnnnnnnnnnnnnnnnnnnnnnnnnnnnnnnnnnnnnnnnnnnnnnnnnnnnnnnnnnnnnnnnnnnnnnnnnnnnnnnnnnnnnnnnnnnnnnnnnnnnnnnnnnnnnnnnnnnnnnnnnnnnnnnnnnnnnnnnnnnnnnnnnnnnnnnnnnnnnnnnnnnnnnnnnnnnnnnnnnnnnnnnnnnnnnnnnnnnnnnnnnnnnnnnnnnnnnnnnnnnnnnnnnnnnnnnnnnnnnnnnnnnnnnnnnnnnnnnnnnnnnnnnnnnnnnnnnnnnnnnnnnnnnnnnnnnnnnnnnnnnnnnnnnnnnnnnnnnnnnnnnnnnnnnnnnnnnnnnnnnnnnnnnnnnnnnnnnnnnnnnnnnnnnnnnnnnnnnnnnnnnnnnnnnnnnnnnnnnnnnnnnnnnnnnnnnnnnnnnnnnnnnnnnnnnnnnnnnnnnnnnnnnnnnnnnnnnnnnnnnnnnnnnnnnnnnnnnnnnnnnnnnnnnnnnnnnnnnnnnnnnnnnnnnnnnnnnnnnnnnnnnnnnnnnnnnnnnnnnnnnnnnnnnnnnnnnnnnnnnnnnnnnnnnnnnnnnnnnnnnnnnnnnnnnnnnnnnnnnnnnnnnnnnnnnnnnnnnnnnnnnnnnnnnnnnnnnnnnnnnnnnnnnnnnnnnnnnnnnnnnnnnnnnnnnnnnnnnnnnnnnnnnnnnnnnnnnnnnnnnnnnnnnnnnnnnnnnnnnnnnnnnnnnnnnnnnnnnnnnnnnnnnnnnnnnnnnnnnnnnnnnnnnnnnnnnnnnnnnnnnnnnnnnnnnnnnnnnnnnnnnnnnnnnnnnnnnnnnnnnnnnnnnnnnnnnnnnnnnnnnnnnnnnnnnnnnnnnnnnnnnnnnnnnnnnnnnnnnnnnnnnnnnnnnnnnnnnnnnnnnnnnnnnnnnnnnnnnnnnnnnnnnnnnnnnnnnnnnnnnnnnnnnnnnnnnnnnnnnnnnnnnnnnnnnnnnnnnnnnnnnnnnnnnnnnnnnnnnnnnnnnnnnnnnnnnnnnnnnnnnnnnnnnnnnnnnnnnnnnnnnnnnnnnnnnnnnnnnnnnnnnnnnnnnnnnnnnnnnnnnnnnnnnnnnnnnnnnnnnnnnnnnnnnnnnnnnnnnnnnnnnnnnnnnnnnnnnnnnnnnnnnnnnnnnnnnnnnnnnnnnnnnnnnnnnnnnnnnnnnnnnnnnnnnnnnnnnnnnnnnnnnnnnnnnnnnnnnnnnnnnnnnnnnnnnnnnnnnnnnnnnnnnnnnnnnnnnnnnnnnnnnnnnnnnnnnnnnnnnnnnnnnnnnnnnnnnnnnnnnnnnnnnnnnnnnnnnnnnnnnnnnnnnnnnnnnnnnnnnnnnnnnnnnnnnnnnnnnnnnnnnnnnnnnnnnnnnnnnnnnnnnnnnnnnnnnnnnnnnnnnnnnnnnnnnnnnnnnnnnnnnnnnnnnnnnnnnnnnnnnnnnnnnnnnnnnnnnnnnnnnnnnnnnnnnnnnnnnnnnnnnnnnnnnnnnnnnnnnnnnnnnnnnnnnnnnnnnnnnnnnnnnnnnnnnnnnnnnnnnnnnnnnnnnnnnnnnnnnnnnnnnnnnnnnnnnnnnnnnnnnnnnnnnnnnnnnnnnnnnnnnnnnnnnnnnnnnnnnnnnnnnnnnnnnnnnnnnnnnnnnnnnnnnnnnnnnnnnnnnnnnnnnnnnnnnnnnnnnnnnnnnnnnnnnnnnnnnnnnnnnnnnnnnnnnnnnnnnnnnnnnnnnnnnnnnnnnnnnnnnnnnnnnnnnnnnnnnnnnnnnnnnnnnnnnnnnnnnnnnnnnnnnnnnnnnnnnnnnnnnnnnnnnnnnnnnnnnnnnnnnnnnnnnnnnnnnnnnnnnnnnnnnnnnnnnnnnnnnnnnnnnnnnnnnnnnnnnnnnnnnnnnnnnnnnnnnnnnnnnnnnnnnnnnnnnnnnnnnnnnnnnnnnnnnnnnnnnnnnnnnnnnnnnnnnnnnnnnnnnnnnnnnnnnnnnnnnnnnnnnnnnnnnnnnnnnnnnnnnnnnnnnnnnnnnnnnnnnnnnnnnnnnnnnnnnnnnnnnnnnnnnnnnnnnnnnnnnnnnnnnnnnnnnnnnnnnnnnnnnnnnnnnnnnnnnnnnnnnnnnnnnnnnnnnnnnnnnnnnnnnnnnnnnnnnnnnnnnnnnnnnnnnnnnnnnnnnnnnnnnnnnnnnnnnnnnnnnnnnnnnnnnnnnnnnnnnnnnnnnnnnnnnnnnnnnnnnnnnnnnnnnnnnnnnnnnnnnnnnnnnnnnnnnnnnnnnnnnnnnnnnnnnnnnnnnnnnnnnnnnnnnnnnnnnnnnnnnnnnnnnnnnnnnnnnnnnnnnnnnnnnnnnnnnnnnnnnnnnnnnnnnnnnnnnnnnnnnnnnnnnnnnnnnnnnnnnnnnnnnnnnnnnnnnnnnnnnnnnnnnnnnnnnnnnnnnnnnnnnnnnnnnnnnnnnnnnnnnnnnnnnnnnnnnnnnnnnnnnnnnnnnnnnnnnnnnnnnnnnnnnnnnnnnnnnnnnnnnnnnnnnnnnnnnnnnnnnnnnnnnnnnnnnnnnnnnnnnnnnnnnnnnnnnnnnnnnnnnnnnnnnnnnnnnnnnnnnnnnnnnnnnnnnnnnnnnnnnnnnnnnnnnnnnnnnnnnnnnnnnnnnnnnnnnnnnnnnnnnnnnnnnnnnnnnnnnnnnnnnnnnnnnnnnnnnnnnnnnnnnnnnnnnnnnnnnnnnnnnnnnnnnnnnnnnnnnnnnnnnnnnnnnnnnnnnnnnnnnnnnnnnnnnnnnnnnnnnnnnnnnnnnnnnnnnnnnnnnnnnnnnnnnnnnnnnnnnnnnnnnnnnnnnnnnnnnnnnnnnnnnnnnnnnnnnnnnnnnnnnnnnnnnnnnnnnnnnnnnnnnnnnnnnnnnnnnnnnnnnnnnnnnnnnnnnnnnnnnnnnnnnnnnnnnnnnnnnnnnnnnnnnnnnnnnnnnnnnnnnnnnnnnnnnnnnnnnnnnnnnnnnnnnnnnnnnnnnnnnnnnnnnnnnnnnnnnnnnnnnnnnnnnnnnnnnnnnnnnnnnnnnnnnnnnnnnnnnnnnnnnnnnnnnnnnnnnnnnnnnnnnnnnnnnnnnnnnnnnnnnnnnnnnnnnnnnnnnnnnnnnnnnnnnnnnnnnnnnnnnnnnnnnnnnnnnnnnnnnnnnnnnnnnnnnnnnnnnnnnnnnnnnnnnnnnnnnnnnnnnnnnnnnnnnnnnnnnnnnnnnnnnnnnnnnnnnnnnnnnnnnnnnnnnnnnnnnnnnnnnnnnnnnnnnnnnnnnnnnnnnnnnnnnnnnnnnnnnnnnnnnnnnnnnnnnnnnnnnnnnnnnnnnnnnnnnnnnnnnnnnnnnnnnnnnnnnnnnnnnnnnnnnnnnnnnnnnnnnnnnnnnnnnnnnnnnnnnnnnnnnnnnnnnnnnnnnnnnnnnnnnnnnnnnnnnnnnnnnnnnnnnnnnnnnnnnnnnnnnnnnnnnnnnnnnnnnnnnnnnnnnnnnnnnnnnnnnnnnnnnnnnnnnnnnnnnnnnnnnnnnnnnnnnnnnnnnnnnnnnnnnnnnnnnnnnnnnnnnnnnnnnnnnnnnnnnnnnnnnnnnnnnnnnnnnnnnnnnnnnnnnnnnnnnnnnnnnnnnnnnnnnnnnnnnnnnnnnnnnnnnnnnnnnnnnnnnnnnnnnnnnnnnnnnnnnnnnnnnnnnnnnnnnnnnnnnnnnnnnnnnnnnnnnnnnnnnnnnnnnnnnnnnnnnnnnnnnnnnnnnnnnnnnnnnnnnnnnnnnnnnnnnnnnnnnnnnnnnnnnnnnnnnnnnnnnnnnnnnnnnnnnnnnnnnnnnnnnnnnnnnnnnnnnnnnnnnnnnnnnnnnnnnnnnnnnnnnnnnnnnnnnnnnnnnnnnnnnnnnnnnnnnnnnnnnnnnnnnnnnnnnnnnnnnnnnnnnnnnnnnnnnnnnnnnnnnnnnnnnnnnnnnnnnnnnnnnnnnnnnnnnnnnnnnnnnnnnnnnnnnnnnnnnnnnnnnnnnnnnnnnnnnnnnnnnnnnnnnnnnnnnnnnnnnnnnnnnnnnnnnnnnnnnnnnnnnnnnnnnnnnnnnnnnnnnnnnnnnnnnnnnnnnnnnnnnnnnnnnnnnnnnnnnnnnnnnnnnnnnnnnnnnnnnnnnnnnnnnnnnnnnnnnnnnnnnnnnnnnnnnnnnnnnnnnnnnnnnnnnnnnnnnnnnnnnnnnnnnnnnnnnnnnnnnnnnnnnnnnnnnnnnnnnnnnnnnnnnnnnnnnnnnnnnnnnnnnnnnnnnnnnnnnnnnnnnnnnnnnnnnnnnnnnnnnnnnnnnnnnnnnnnnnnnnnnnnnnnnnnnnnnnnnnnnnnnnnnnnnnnnnnnnnnnnnnnnnnnnnnnnnnnnnnnnnnnnnnnnnnnnnnnnnnnnnnnnnnnnnnnnnnnnnnnnnnnnnnnnnnnnnnnnnnnnnnnnnnnnnnnnnnnnnnnnnnnnnnnnnnnnnnnnnnnnnnnnnnnnnnnnnnnnnnnnnnnnnnnnnnnnnnnnnnnnnnnnnnnnnnnnnnnnnnnnnnnnnnnnnnnnnnnnnnnnnnnnnnnnnnnnnnnnnnnnnnnnnnnnnnnnnnnnnnnnnnnnnnnnnnnnnnnnnnnnnnnnnnnnnnnnnnnnnnnnnnnnnnnnnnnnnnnnnnnnnnnnnnnnnnnnnnnnnnnnnnnnnnnnnnnnnnnnnnnnnnnnnnnnnnnnnnnnnnnnnnnnnnnnnnnnnnnnnnnnnnnnnnnnnnnnnnnnnnnnnnnnnnnnnnnnnnnnnnnnnnnnnnnnnnnnnnnnnnnnnnnnnnnnnnnnnnnnnnnnnnnnnnnnnnnnnnnnnnnnnnnnnnnnnnnnnnnnnnnnnnnnnnnnnnnnnnnnnnnnnnnnnnnnnnnnnnnnnnnnnnnnnnnnnnnnnnnnnnnnnnnnnnnnnnnnnnnnnnnnnnnnnnnnnnnnnnnnnnnnnnnnnnnnnnnnnnnnnnnnnnnnnnnnnnnnnnnnnnnnnnnnnnnnnnnnnnnnnnnnnnnnnnnnnnnnnnnnnnnnnnnnnnnnnnnnnnnnnnnnnnnnnnnnnnnnnnnnnnnnnnnnnnnnnnnnnnnnnnnnnnnnnnnnnnnnnnnnnnnnnnnnnnnnnnnnnnnnnnnnnnnnnnnnnnnnnnnnnnnnnnnnnnnnnnnnnnnnnnnnnnnnnnnnnnnnnnnnnnnnnnnnnnnnnnnnnnnnnnnnnnnnnnnnnnnnnnnnnnnnnnnnnnnnnnnnnnnnnnnnnnnnnnnnnnnnnnnnnnnnnnnnnnnnnnnnnnnnnnnnnnnnnnnnnnnnnnnnnnnnnnnnnnnnnnnnnnnnnnnnnnnnnnnnnnnnnnnnnnnnnnnnnnnnnnnnnnnnnnnnnnnnnnnnnnnnnnnnnnnnnnnnnnnnnnnnnnnnnnnnnnnnnnnnnnnnnnnnnnnnnnnnnnnnnnnnnnnnnnnnnnnnnnnnnnnnnnnnnnnnnnnnnnnnnnnnnnnnnnnnnnnnnnnnnnnnnnnnnnnnnnnnnnnnnnnnnnnnnnnnnnnnnnnnnnnnnnnnnnnnnnnnnnnnnnnnnnnnnnnnnnnnnnnnnnnnnnnnnnnnnnnnnnnnnnnnnnnnnnnnnnnnnnnnnnnnnnnnnnnnnnnnnnnnnnnnnnnnnnnnnnnnnnnnnnnnnnnnnnnnnnnnnnnnnnnnnnnnnnnnnnnnnnnnnnnnnnnnnnnnnnnnnnnnnnnnnnnnnnnnnnnnnnnnnnnnnnnnnnnnnnnnnnnnnnnnnnnnnnnnnnnnnnnnnnnnnnnnnnnnnnnnnnnnnnnnnnnnnnnnnnnnnnnnnnnnnnnnnnnnnnnnnnnnnnnnnnnnnnnnnnnnnnnnnnnnnnnnnnnnnnnnnnnnnnnnnnnnnnnnnnnnnnnnnnnnnnnnnnnnnnnnnnnnnnnnnnnnnnnnnnnnnnnnnnnnnnnnnnnnnnnnnnnnnnnnnnnnnnnnnnnnnnnnnnnnnnnnnnnnnnnnnnnnnnnnnnnnnnnnnnnnnnnnnnnnnnnnnnnnnnnnnnnnnnnnnnnnnnnnnnnnnnnnnnnnnnnnnnnnnnnnnnnnnnnnnnnnnnnnnnnnnnnnnnnnnnnnnnnnnnnnnnnnnnnnnnnnnnnnnnnnnnnnnnnnnnnnnnnnnnnnnnnnnnnnnnnnnnnnnnnnnnnnnnnnnnnnnnnnnnnnnnnnnnnnnnnnnnnnnnnnnnnnnnnnnnnnnnnnnnnnnnnnnnnnnnnnnnnnnnnnnnnnnnnnnnnnnnnnnnnnnnnnnnnnnnnnnnnnnnnnnnnnnnnnnnnnnnnnnnnnnnnnnnnnnnnnnnnnnnnnnnnnnnnnnnnnnnnnnnnnnnnnnnnnnnnnnnnnnnnnnnnnnnnnnnnnnnnnnnnnnnnnnnnnnnnnnnnnnnnnnnnnnnnnnnnnnnnnnnnnnnnnnnnnnnnnnnnnnnnnnnnnnnnnnnnnnnnnnnnnnnnnnnnnnnnnnnnnnnnnnnnnnnnnnnnnnnnnnnnnnnnnnnnnnnnnnnnnnnnnnnnnnnnnnnnnnnnnnnnnnnnnnnnnnnnnnnnnnnnnnnnnnnnnnnnnnnnnnnnnnnnnnnnnnnnnnnnnnnnnnnnnnnnnnnnnnnnnnnnnnnnnnnnnnnnnnnnnnnnnnnnnnnnnnnnnnnnnnnnnnnnnnnnnnnnnnnnnnnnnnnnnnnnnnnnnnnnnnnnnnnnnnnnnnnnnnnnnnnnnnnnnnnnnnnnnnnnnnnnnnnnnnnnnnnnnnnnnnnnnnnnnnnnnnnnnnnnnnnnnnnnnnnnnnnnnnnnnnnnnnnnnnnnnnnnnnnnnnnnnnnnnnnnnnnnnnnnnnnnnnnnnnnnnnnnnnnnnnnnnnnnnnnnnnnnnnnnnnnnnnnnnnnnnnnnnnnnnnnnnnnnnnnnnnnnnnnnnnnnnnnnnnnnnnnnnnnnnnnnnnnnnnnnnnnnnnnnnnnnnnnnnnnnnnnnnnnnnnnnnnnnnnnnnnnnnnnnnnnnnnnnnnnnnnnnnnnnnnnnnnnnnnnnnnnnnnnnnnnnnnnnnnnnnnnnnnnnnnnnnnnnnnnnnnnnnnnnnnnnnnnnnnnnnnnnnnnnnnnnnnnnnnnnnnnnnnnnnnnnnnnnnnnnnnnnnnnnnnnnnnnnnnnnnnnnnnnnnnnnnnnnnnnnnnnnnnnnnnnnnnnnnnnnnnnnnnnnnnnnnnnnnnnnnnnnnnnnnnnnnnnnnnnnnnnnnnnnnnnnnnnnnnnnnnnnnnnnnnnnnnnnnnnnnnnnnnnnnnnnnnnnnnnnnnnnnnnnnnnnnnnnnnnnnnnnnnnnnnnnnnnnnnnnnnnnnnnnnnnnnnnnnnnnnnnnnnnnnnnnnnnnnnnnnnnnnnnnnnnnnnnnnnnnnnnnnnnnnnnnnnnnnnnnnnnnnnnnnnnnnnnnnnnnnnnnnnnnnnnnnnnnnnnnnnnnnnnnnnnnnnnnnnnnnnnnnnnnnnnnnnnnnnnnnnnnnnnnnnnnnnnnnnnnnnnnnnnnnnnnnnnnnnnnnnnnnnnnnnnnnnnnnnnnnnnnnnnnnnnnnnnnnnnnnnnnnnnnnnnnnnnnnnnnnnnnnnnnnnnnnnnnnnnnnnnnnnnnnnnnnnnnnnnnnnnnnnnnnnnnnnnnnnnnnnnnnnnnnnnnnnnnnnnnnnnnnnnnnnnnnnnnnnnnnnnnnnnnnnnnnnnnnnnnnnnnnnnnnnnnnnnnnnnnnnnnnnnnnnnnnnnnnnnnnnnnnnnnnnnnnnnnnnnnnnnnnnnnnnnnnnnnnnnnnnnnnnnnnnnnnnnnnnnnnnnnnnnnnnnnnnnnnnnnnnnnnnnnnnnnnnnnnnnnnnnnnnnnnnnnnnnnnnnnnnnnnnnnnnnnnnnnnnnnnnnnnnnnnnnnnnnnnnnnnnnnnnnnnnnnnnnnnnnnnnnnnnnnnnnnnnnnnnnnnnnnnnnnnnnnnnnnnnnnnnnnnnnnnnnnnnnnnnnnnnnnnnnnnnnnnnnnnnnnnnnnnnnnnnnnnnnnnnnnnnnnnnnnnnnnnnnnnnnnnnnnnnnnnnnnnnnnnnnnnnnnnnnnnnnnnnnnnnnnnnnnnnnnnnnnnnnnnnnnnnnnnnnnnnnnnnnnnnnnnnnnnnnnnnnnnnnnnnnnnnnnnnnnnnnnnnnnnnnnnnnnnnnnnnnnnnnnnnnnnnnnnnnnnnnnnnnnnnnnnnnnnnnnnnnnnnnnnnnnnnnnnnnnnnnnnnnnnnnnnnnnnnnnnnnnnnnnnnnnnnnnnnnnnnnnnnnnnnnnnnnnnnnnnnnnnnnnnnnnnnnnnnnnnnnnnnnnnnnnnnnnnnnnnnnnnnnnnnnnnnnnnnnnnnnnnnnnnnnnnnnnnnnnnnnnnnnnnnnnnnnnnnnnnnnnnnnnnnnnnnnnnnnnnnnnnnnnnnnnnnnnnnnnnnnnnnnnnnnnnnnnnnnnnnnnnnnnnnnnnnnnnnnnnnnnnnnnnnnnnnnnnnnnnnnnnnnnnnnnnnnnnnnnnnnnnnnnnnnnnnnnnnnnnnnnnnnnnnnnnnnnnnnnnnnnnnnnnnnnnnnnnnnnnnnnnnnnnnnnnnnnnnnnnnnnnnnnnnnnnnnnnnnnnnnnnnnnnnnnnnnnnnnnnnnnnnnnnnnnnnnnnnnnnnnnnnnnnnnnnnnnnnnnnnnnnnnnnnnnnnnnnnnnnnnnnnnnnnnnnnnnnnnnnnnnnnnnnnnnnnnnnnnnnnnnnnnnnnnnnnnnnnnnnnnnnnnnnnnnnnnnnnnnnnnnnnnnnnnnnnnnnnnnnnnnnnnnnnnnnnnnnnnnnnnnnnnnnnnnnnnnnnnnnnnnnnnnnnnnnnnnnnnnnnnnnnnnnnnnnnnnnnnnnnnnnnnnnnnnnnnnnnnnnnnnnnnnnnnnnnnnnnnnnnnnnnnnnnnnnnnnnnnnnnnnnnnnnnnnnnnnnnnnnnnnnnnnnnnnnnnnnnnnnnnnnnnnnnnnnnnnnnnnnnnnnnnnnnnnnnnnnnnnnnnnnnnnnnnnnnnnnnnnnnnnnnnnnnnnnnnnnnnnnnnnnnnnnnnnnnnnnnnnnnnnnnnnnnnnnnnnnnnnnnnnnnnnnnnnnnnnnnnnnnnnnnnnnnnnnnnnnnnnnnnnnnnnnnnnnnnnnnnnnnnnnnnnnnnnnnnnnnnnnnnnnnnnnnnnnnnnnnnnnnnnnnnnnnnnnnnnnnnnnnnnnnnnnnnnnnnnnnnnnnnnnnnnnnnnnnnnnnnnnnnnnnnnnnnnnnnnnnnnnnnnnnnnnnnnnnnnnnnnnnnnnnnnnnnnnnnnnnnnnnnnnnnnnnnnnnnnnnnnnnnnnnnnnnnnnnnnnnnnnnnnnnnnnnnnnnnnnnnnnnnnnnnnnnnnnnnnnnnnnnnnnnnnnnnnnnnnnnnnnnnnnnnnnnnnnnnnnnnnnnnnnnnnnnnnnnnnnnnnnnnnnnnnnnnnnnnnnnnnnnnnnnnnnnnnnnnnnnnnnnnnnnnnnnnnnnnnnnnnnnnnnnnnnnnnnnnnnnnnnnnnnnnnnnnnnnnnnnnnnnnnnnnnnnnnnnnnnnnnnnnnnnnnnnnnnnnnnnnnnnnnnnnnnnnnnnnnnnnnnnnnnnnnnnnnnnnnnnnnnnnnnnnnnnnnnnnnnnnnnnnnnnnnnnnnnnnnnnnnnnnnnnnnnnnnnnnnnnnnnnnnnnnnnnnnnnnnnnnnnnnnnnnnnnnnnnnnnnnnnnnnnnnnnnnnnnnnnnnnnnnnnnnnnnnnnnnnnnnnnnnnnnnnnnnnnnnnnnnnnnnnnnnnnnnnnnnnnnnnnnnnnnnnnnnnnnnnnnnnnnnnnnnnnnnnnnnnnnnnnnnnnnnnnnnnnnnnnnnnnnnnnnnnnnnnnnnnnnnnnnnnnnnnnnnnnnnnnnnnnnnnnnnnnnnnnnnnnnnnnnnnnnnnnnnnnnnnnnnnnnnnnnnnnnnnnnnnnnnnnnnnnnnnnnnnnnnnnnnnnnnnnnnnnnnnnnnnnnnnnnnnnnnnnnnnnnnnnnnnnnnnnnnnnnnnnnnnnnnnnnnnnnnnnnnnnnnnnnnnnnnnnnnnnnnnnnnnnnnnnnnnnnnnnnnnnnnnnnnnnnnnnnnnnnnnnnnnnnnnnnnnnnnnnnnnnnnnnnnnnnnnnnnnnnnnnnnnnnnnnnnnnnnnnnnnnnnnnnnnnnnnnnnnnnnnnnnnnnnnnnnnnnnnnnnnnnnnnnnnnnnnnnnnnnnnnnnnnnnnnnnnnnnnnnnnnnnnnnnnnnnnnnnnnnnnnnnnnnnnnnnnnnnnnnnnnnnnnnnnnnnnnnnnnnnnnnnnnnnnnnnnnnnnnnnnnnnnnnnnnnnnnnnnnnnnnnnnnnnnnnnnnnnnnnnnnnnnnnnnnnnnnnnnnnnnnnnnnnnnnnnnnnnnnnnnnnnnnnnnnnnnnnnnnnnnnnnnnnnnnnnnnnnnnnnnnnnnnnnnnnnnnnnnnnnnnnnnnnnnnnnnnnnnnnnnnnnnnnnnnnnnnnnnnnnnnnnnnnnnnnnnnnnnnnnnnnnnnnnnnnnnnnnnnnnnnnnnnnnnnnnnnnnnnnnnnnnnnnnnnnnnnnnnnnnnnnnnnnnnnnnnnnnnnnnnnnnnnnnnnnnnnnnnnnnnnnnnnnnnnnnnnnnnnnnnnnnnnnnnnnnnnnnnnnnnnnnnnnnnnnnnnnnnnnnnnnnnnnnnnnnnnnnnnnnnnnnnnnnnnnnnnnnnnnnnnnnnnnnnnnnnnnnnnnnnnnnnnnnnnnnnnnnnnnnnnnnnnnnnnnnnnnnnnnnnnnnnnnnnnnnnnnnnnnnnnnnnnnnnnnnnnnnnnnnnnnnnnnnnnnnnnnnnnnnnnnnnnnnnnnnnnnnnnnnnnnnnnnnnnnnnnnnnnnnnnnnnnnnnnnnnnnnnnnnnnnnnnnnnnnnnnnnnnnnnnnnnnnnnnnnnnnnnnnnnnnnnnnnnnnnnnnnnnnnnnnnnnnnnnnnnnnnnnnnnnnnnnnnnnnnnnnnnnnnnnnnnnnnnnnnnnnnnnnnnnnnnnnnnnnnnnnnnnnnnnnnnnnnnnnnnnnnnnnnnnnnnnnnnnnnnnnnnnnnnnnnnnnnnnnnnnnnnnnnnnnnnnnnnnnnnnnnnnnnnnnnnnnnnnnnnnnnnnnnnnnnnnnnnnnnnnnnnnnnnnnnnnnnnnnnnnnnnnnnnnnnnnnnnnnnnnnnnnnnnnnnnnnnnnnnnnnnnnnnnnnnnnnnnnnnnnnnnnnnnnnnnnnnnnnnnnnnnnnnnnnnnnnnnnnnnnnnnnnnnnnnnnnnnnnnnnnnnnnnnnnnnnnnnnnnnnnnnnnnnnnnnnnnnnnnnnnnnnnnnnnnnnnnnnnnnnnnnnnnnnnnnnnnnnnnnnnnnnnnnnnnnnnnnnnnnnnnnnnnnnnnnnnnnnnnnnnnnnnnnnnnnnnnnnnnnnnnnnnnnnnnnnnnnnnnnnnnnnnnnnnnnnnnnnnnnnnnnnnnnnnnnnnnnnnnnnnnnnnnnnnnnnnnnnnnnnnnnnnnnnnnnnnnnnnnnnnnnnnnnnnnnnnnnnnnnnnnnnnnnnnnnnnnnnnnnnnnnnnnnnnnnnnnnnnnnnnnnnnnnnnnnnnnnnnnnnnnnnnnnnnnnnnnnnnnnnnnnnnnnnnnnnnnnnnnnnnnnnnnnnnnnnnnnnnnnnnnnnnnnnnnnnnnnnnnnnnnnnnnnnnnnnnnnnnnnnnnnnnnnnnnnnnnnnnnnnnnnnnnnnnnnnnnnnnnnnnnnnnnnnnnnnnnnnnnnnnnnnnnnnnnnnnnnnnnnnnnnnnnnnnnnnnnnnnnnnnnnnnnnnnnnnnnnnnnnnnnnnnnnnnnnnnnnnnnnnnnnnnnnnnnnnnnnnnnnnnnnnnnnnnnnnnnnnnnnnnnnnnnnnnnnnnnnnnnnnnnnnnnnnnnnnnnnnnnnnnnnnnnnnnnnnnnnnnnnnnnnnnnnnnnnnnnnnnnnnnnnnnnnnnnnnnnnnnnnnnnnnnnnnnnnnnnnnnnnnnnnnnnnnnnnnnnnnnnnnnnnnnnnnnnnnnnnnnnnnnnnnnnnnnnnnnnnnnnnnnnnnnnnnnnnnnnnnnnnnnnnnnnnnnnnnnnnnnnnnnnnnnnnnnnnnnnnnnnnnnnnnnnnnnnnnnnnnnnnnnnnnnnnnnnnnnnnnnnnnnnnnnnnnnnnnnnnnnnnnnnnnnnnnnnnnnnnnnnnnnnnnnnnnnnnnnnnnnnnnnnnnnnnnnnnnnnnnnnnnnnnnnnnnnnnnnnnnnnnnnnnnnnnnnnnnnnnnnnnnnnnnnnnnnnnnnnnnnnnnnnnnnnnnnnnnnnnnnnnnnnnnnnnnnnnnnnnnnnnnnnnnnnnnnnnnnnnnnnnnnnnnnnnnnnnnnnnnnnnnnnnnnnnnnnnnnnnnnnnnnnnnnnnnnnnnnnnnnnnnnnnnnnnnnnnnnnnnnnnnnnnnnnnnnnnnnnnnnnnnnnnnnnnnnnnnnnnnnnnnnnnnnnnnnnnnnnnnnnnnnnnnnnnnnnnnnnnnnnnnnnnnnnnnnnnnnnnnnnnnnnnnnnnnnnnnnnnnnnnnnnnnnnnnnnnnnnnnnnnnnnnnnnnnnnnnnnnnnnnnnnnnnnnnnnnnnnnnnnnnnnnnnnnnnnnnnnnnnnnnnnnnnnnnnnnnnnnnnnnnnnnnnnnnnnnnnnnnnnnnnnnnnnnnnnnnnnnnnnnnnnnnnnnnnnnnnnnnnnnnnnnnnnnnnnnnnnnnnnnnnnnnnnnnnnnnnnnnnnnnnnnnnnnnnnnnnnnnnnnnnnnnnnnnnnnnnnnnnnnnnnnnnnnnnnnnnnnnnnnnnnnnnnnnnnnnnnnnnnnnnnnnnnnnnnnnnnnnnnnnnnnnnnnnnnnnnnnnnnnnnnnnnnnnnnnnnnnnnnnnnnnnnnnnnnnnnnnnnnnnnnnnnnnnnnnnnnnnnnnnnnnnnnnnnnnnnnnnnnnnnnnnnnnnnnnnnnnnnnnnnnnnnnnnnnnnnnnnnnnnnnnnnnnnnnnnnnnnnnnnnnnnnnnnnnnnnnnnnnnnnnnnnnnnnnnnnnnnnnnnnnnnnnnnnnnnnnnnnnnnnnnnnnnnnnnnnnnnnnnnnnnnnnnnnnnnnnnnnnnnnnnnnnnnnnnnnnnnnnnnnnnnnnnnnnnnnnnnnnnnnnnnnnnnnnnnnnnnnnnnnnnnnnnnnnnnnnnnnnnnnnnnnnnnnnnnnnnnnnnnnnnnnnnnnnnnnnnnnnnnnnnnnnnnnnnnnnnnnnnnnnnnnnnnnnnnnnnnnnnnnnnnnnnnnnnnnnnnnnnnnnnnnnnnnnnnnnnnnnnnnnnnnnnnnnnnnnnnnnnnnnnnnnnnnnnnnnnnnnnnnnnnnnnnnnnnnnnnnnnnnnnnnnnnnnnnnnnnnnnnnnnnnnnnnnnnnnnnnnnnnnnnnnnnnnnnnnnnnnnnnnnnnnnnnnnnnnnnnnnnnnnnnnnnnnnnnnnnnnnnnnnnnnnnnnnnnnnnnnnnnnnnnnnnnnnnnnnnnnnnnnnnnnnnnnnnnnnnnnnnnnnnnnnnnnnnnnnnnnnnnnnnnnnnnnnnnnnnnnnnnnnnnnnnnnnnnnnnnnnnnnnnnnnnnnnnnnnnnnnnnnnnnnnnnnnnnnnnnnnnnnnnnnnnnnnnnnnnnnnnnnnnnnnnnnnnnnnnnnnnnnnnnnnnnnnnnnnnnnnnnnnnnnnnnnnnnnnnnnnnnnnnnnnnnnnnnnnnnnnnnnnnnnnnnnnnnnnnnnnnnnnnnnnnnnnnnnnnnnnnnnnnnnnnnnnnnnnnnnnnnnnnnnnnnnnnnnnnnnnnnnnnnnnnnnnnnnnnnnnnnnnnnnnnnnnnnnnnnnnnnnnnnnnnnnnnnnnnnnnnnnnnnnnnnnnnnnnnnnnnnnnnnnnnnnnnnnnnnnnnnnnnnnnnnnnnnnnnnnnnnnnnnnnnnnnnnnnnnnnnnnnnnnnnnnnnnnnnnnnnnnnnnnnnnnnnnnnnnnnnnnnnnnnnnnnnnnnnnnnnnnnnnnnnnnnnnnnnnnnnnnnnnnnnnnnnnnnnnnnnnnnnnnnnnnnnnnnnnnnnnnnnnnnnnnnnnnnnnnnnnnnnnnnnnnnnnnnnnnnnnnnnnnnnnnnnnnnnnnnnnnnnnnnnnnnnnnnnnnnnnnnnnnnnnnnnnnnnnnnnnnnnnnnnnnnnnnnnnnnnnnnnnnnnnnnnnnnnnnnnnnnnnnnnnnnnnnnnnnnnnnnnnnnnnnnnnnnnnnnnnnnnnnnnnnnnnnnnnnnnnnnnnnnnnnnnnnnnnnnnnnnnnnnnnnnnnnnnnnnnnnnnnnnnnnnnnnnnnnnnnnnnnnnnnnnnnnnnnnnnnnnnnnnnnnnnnnnnnnnnnnnnnnnnnnnnnnnnnnnnnnnnnnnnnnnnnnnnnnnnnnnnnnnnnnnnnnnnnnnnnnnnnnnnnnnnnnnnnnnnnnnnnnnnnnnnnnnnnnnnnnnnnnnnnnnnnnnnnnnnnnnnnnnnnnnnnnnnnnnnnnnnnnnnnnnnnnnnnnnnnnnnnnnnnnnnnnnnnnnnnnnnnnnnnnnnnnnnnnnnnnnnnnnnnnnnnnnnnnnnnnnnnnnnnnnnnnnnnnnnnnnnnnnnnnnnnnnnnnnnnnnnnnnnnnnnnnnnnnnnnnnnnnnnnnnnnnnnnnnnnnnnnnnnnnnnnnnnnnnnnnnnnnnnnnnnnnnnnnnnnnnnnnnnnnnnnnnnnnnnnnnnnnnnnnnnnnnnnnnnnnnnnnnnnnnnnnnnnnnnnnnnnnnnnnnnnnnnnnnnnnnnnnnnnnnnnnnnnnnnnnnnnnnnnnnnnnnnnnnnnnnnnnnnnnnnnnnnnnnnnnnnnnnnnnnnnnnnnnnnnnnnnnnnnnnnnnnnnnnnnnnnnnnnnnnnnnnnnnnnnnnnnnnnnnnnnnnnnnnnnnnnnnnnnnnnnnnnnnnnnnnnnnnnnnnnnnnnnnnnnnnnnnnnnnnnnnnnnnnnnnnnnnnnnnnnnnnnnnnnnnnnnnnnnnnnnnnnnnnnnnnnnnnnnnnnnnnnnnnnnnnnnnnnnnnnnnnnnnnnnnnnnnnnnnnnnnnnnnnnnnnnnnnnnnnnnnnnnnnnnnnnnnnnnnnnnnnnnnnnnnnnnnnnnnnnnnnnnnnnnnnnnnnnnnnnnnnnnnnnnnnnnnnnnnnnnnnnnnnnnnnnnnnnnnnnnnnnnnnnnnnnnnnnnnnnnnnnnnnnnnnnnnnnnnnnnnnnnnnnnnnnnnnnnnnnnnnnnnnnnnnnnnnnnnnnnnnnnnnnnnnnnnnnnnnnnnnnnnnnnnnnnnnnnnnnnnnnnnnnnnnnnnnnnnnnnnnnnnnnnnnnnnnnnnnnnnnnnnnnnnnnnnnnnnnnnnnnnnnnnnnnnnnnnnnnnnnnnnnnnnnnnnnnnnnnnnnnnnnnnnnnnnnnnnnnnnnnnnnnnnnnnnnnnnnnnnnnnnnnnnnnnnnnnnnnnnnnnnnnnnnnnnnnnnnnnnnnnnnnnnnnnnnnnnnnnnnnnnnnnnnnnnnnnnnnnnnnnnnnnnnnnnnnnnnnnnnnnnnnnnnnnnnnnnnnnnnnnnnnnnnnnnnnnnnnnnnnnnnnnnnnnnnnnnnnnnnnnnnnnnnnnnnnnnnnnnnnnnnnnnnnnnnnnnnnnnnnnnnnnnnnnnnnnnnnnnnnnnnnnnnnnnnnnnnnnnnnnnnnnnnnnnnnnnnnnnnnnnnnnnnnnnnnnnnnnnnnnnnnnnnnnnnnnnnnnnnnnnnnnnnnnnnnnnnnnnnnnnnnnnnnnnnnnnnnnnnnnnnnnnnnnnnnnnnnnnnnnnnnnnnnnnnnnnnnnnnnnnnnnnnnnnnnnnnnnnnnnnnnnnnnnnnnnnnnnnnnnnnnnnnnnnnnnnnnnnnnnnnnnnnnnnnnnnnnnnnnnnnnnnnnnnnnnnnnnnnnnnnnnnnnnnnnnnnnnnnnnnnnnnnnnnnnnnnnnnnnnnnnnnnnnnnnnnnnnnnnnnnnnnnnnnnnnnnnnnnnnnnnnnnnnnnnnnnnnnnnnnnnnnnnnnnnnnnnnnnnnnnnnnnnnnnnnnnnnnnnnnnnnnnnnnnnnnnnnnnnnnnnnnnnnnnnnnnnnnnnnnnnnnnnnnnnnnnnnnnnnnnnnnnnnnnnnnnnnnnnnnnnnnnnnnnnnnnnnnnnnnnnnnnnnnnnnnnnnnnnnnnnnnnnnnnnnnnnnnnnnnnnnnnnnnnnnnnnnnnnnnnnnnnnnnnnnnnnnnnnnnnnnnnnnnnnnnnnnnnnnnnnnnnnnnnnnnnnnnnnnnnnnnnnnnnnnnnnnnnnnnnnnnnnnnnnnnnnnnnnnnnnnnnnnnnnnnnnnnnnnnnnnnnnnnnnnnnnnnnnnnnnnnnnnnnnnnnnnnnnnnnnnnnnnnnnnnnnnnnnnnnnnnnnnnnnnnnnnnnnnnnnnnnnnnnnnnnnnnnnnnnnnnnnnnnnnnnnnnnnnnnnnnnnnnnnnnnnnnnnnnnnnnnnnnnnnnnnnnnnnnnnnnnnnnnnnnnnnnnnnnnnnnnnnnnnnnnnnnnnnnnnnnnnnnnnnnnnnnnnnnnnnnnnnnnnnnnnnnnnnnnnnnnnnnnnnnnnnnnnnnnnnnnnnnnnnnnnnnnnnnnnnnnnnnnnnnnnnnnnnnnnnnnnnnnnnnnnnnnnnnnnnnnnnnnnnnnnnnnnnnnnnnnnnnnnnnnnnnnnnnnnnnnnnnnnnnnnnnnnnnnnnnnnnnnnnnnnnnnnnnnnnnnnnnnnnnnnnnnnnnnnnnnnnnnnnnnnnnnnnnnnnnnnnnnnnnnnnnnnnnnnnnnnnnnnnnnnnnnnnnnnnnnnnnnnnnnnnnnnnnnnnnnnnnnnnnnnnnnnnnnnnnnnnnnnnnnnnnnnnnnnnnnnnnnnnnnnnnnnnnnnnnnnnnnnnnnnnnnnnnnnnnnnnnnnnnnnnnnnnnnnnnnnnnnnnnnnnnnnnnnnnnnnnnnnnnnnnnnnnnnnnnnnnnnnnnnnnnnnnnnnnnnnnnnnnnnnnnnnnnnnnnnnnnnnnnnnnnnnnnnnnnnnnnnnnnnnnnnnnnnnnnnnnnnnnnnnnnnnnnnnnnnnnnnnnnnnnnnnnnnnnnnnnnnnnnnnnnnnnnnnnnnnnnnnnnnnnnnnnnnnnnnnnnnnnnnnnnnnnnnnnnnnnnnnnnnnnnnnnnnnnnnnnnnnnnnnnnnnnnnnnnnnnnnnnnnnnnnnnnnnnnnnnnnnnnnnnnnnnnnnnnnnnnnnnnnnnnnnnnnnnnnnnnnnnnnnnnnnnnnnnnnnnnnnnnnnnnnnnnnnnnnnnnnnnnnnnnnnnnnnnnnnnnnnnnnnnnnnnnnnnnnnnnnnnnnnnnnnnnnnnnnnnnnnnnnnnnnnnnnnnnnnnnnnnnnnnnnnnnnnnnnnnnnnnnnnnnnnnnnnnnnnnnnnnnnnnnnnnnnnnnnnnnnnnnnnnnnnnnnnnnnnnnnnnnnnnnnnnnnnnnnnnnnnnnnnnnnnnnnnnnnnnnnnnnnnnnnnnnnnnnnnnnnnnnnnnnnnnnnnnnnnnnnnnnnnnnnnnnnnnnnnnnnnnnnnnnnnnnnnnnnnnnnnnnnnnnnnnnnnnnnnnnnnnnnnnnnnnnnnnnnnnnnnnnnnnnnnnnnnnnnnnnnnnnnnnnnnnnnnnnnnnnnnnnnnnnnnnnnnnnnnnnnnnnnnnnnnnnnnnnnnnnnnnnnnnnnnnnnnnnnnnnnnnnnnnnnnnnnnnnnnnnnnnnnnnnnnnnnnnnnnnnnnnnnnnnnnnnnnnnnnnnnnnnnnnnnnnnnnnnnnnnnnnnnnnnnnnnnnnnnnnnnnnnnnnnnnnnnnnnnnnnnnnnnnnnnnnnnnnnnnnnnnnnnnnnnnnnnnnnnnnnnnnnnnnnnnnnnnnnnnnnnnnnnnnnnnnnnnnnnnnnnnnnnnnnnnnnnnnnnnnnnnnnnnnnnnnnnnnnnnnnnnnnnnnnnnnnnnnnnnnnnnnnnnnnnnnnnnnnnnnnnnnnnnnnnnnnnnnnnnnnnnnnnnnnnnnnnnnnnnnnnnnnnnnnnnnnnnnnnnnnnnnnnnnnnnnnnnnnnnnnnnnnnnnnnnnnnnnnnnnnnnnnnnnnnnnnnnnnnnnnnnnnnnnnnnnnnnnnnnnnnnnnnnnnnnnnnnnnnnnnnnnnnnnnnnnnnnnnnnnnnnnnnnnnnnnnnnnnnnnnnnnnnnnnnnnnnnnnnnnnnnnnnnnnnnnnnnnnnnnnnnnnnnnnnnnnnnnnnnnnnnnnnnnnnnnnnnnnnnnnnnnnnnnnnnnnnnnnnnnnnnnnnnnnnnnnnnnnnnnnnnnnnnnnnnnnnnnnnnnnnnnnnnnnnnnnnnnnnnnnnnnnnnnnnnnnnnnnnnnnnnnnnnnnnnnnnnnnnnnnnnnnnnnnnnnnnnnnnnnnnnnnnnnnnnnnnntcagcgccaccctcgccctcacagacgtgttgagcagcctggcctggctggcttggcaaaacaactactgctgtcccgttttcaccgagcagcgcaccctcaccattgaagccggccgccatccagttatcgaacagctcatcgaggaccaggaattcattcccaacgacacttccctggattacccagataccaccatcgccatcatcaccggaccgaacatggcgggaaaatcaacctatctgcgtcaggtgggacttctggtcatcatggcccagatcggcagtttcgtgccggccaaacagctttccatgcccattttcgaccgcgttttcacccgagtgggcgcttccgacaacctcgcccagggccagagcacctttttggtggagatgatagaaacggcaaacatcctccacaccgcaaccgaaaactcactcatcctgctggacgagatcggccgcggaacctccactttcgacggcctcagcctcgcctggtccatcatcgaatacatccagaaatacaaacacagcctcaccctcttcgccacccactatcacgagctcacggaactggaaaacatctatccggacatccgcaattacaatgtggtggtgaaggaatacaatgaccagatgatctttctgcgcaagattgagcgtggcggcgctgaccagagttacggcatccaggtggcccggctggctggcatcccggaccgcgttatccgccgtgcccgggaaatcctgcgcaaccttgaggaccacgaaatatcgccccagggcctcaccgcctccatccgccgcaaactgaaccgcaccagcccccagatagagctctttgaggtgctggcggataaagtctcggaaatcgaccccatcgtggatgagatcaaggacctcgacctcgacagcctcacccccatcgaggcctggcaaaaactaaaagacctacaggacagattatgaccaagctcgcccccctcttcgccatactgctggcgctggctttgctgttggcctgctgcggcgccaatcagggcaacctggccggacgcatcaacggccagcccgtcaccgctgaatctttcaacgatgcctaccgcggccattacgccaactttcagtggctcaacaaccgcgccccctcccgcgaagaaagggaactgatcaagcagcaaacctggacagacgccgccaggggcgtgatcctcaggcaatggttcgccaaatacaaaatcagcgccaccccctccgaagtggtggacaccctctccaaaaacatcccctcctacatcctcagctcccccctcttcatgaccgatggcgtcttcgaccccaagatataccaccagtcgctgctttacgactcgccggaaaacctcgccatactgcgccaggatttcctggattggaaggtgcccatcatgaagctgaagcaggaactcatcgtccggaaacttttggacaaaaaagagcgccagctcatcaccggcatcctccagagcagcgcggacgtggaattcaccctgctggaactggccggcatcgacccctatgtttcgcaggatgaagtgcgcgcccattatcagaaaaatctggcggattacctcctgaaaccctttgtcagcctgtcctgcgccaccgtggaggtcctgccttcccgcactgacatccaccacgctaacctctacgccgattccctctatcaggagctcagcgccggaacgccagtctccgccctgttggagggcaaccatcccctcgccgccagcctggttttcaaaaactccggatttctcagcgttgcatccctcgatcccattgtttacaagcaactcagcgaactggaggaaggcgcctggggacggcctctgcaaactgccagcggcaccacgctccaccagttggaaaaacgcaccaagagtatgtgcagcttcaattccctctggctgccctaccgtccctcggcttccaggatcgaagccctgcgtcccgaagccgaactcgcggttaagcttgcccgcctgaaaggccacgccaccgcttgcgaggaaatggacctgccccgctataaagtgcacaaggccaatcccgacagcctctggtatccggatgcccgaatcgtggaagccatccgcgcccagttgcccggtcagccctccggtcatgttttcgacgccctctattcagattccaccagcaagtgggttatagtggaactcaacgctgctgcactcgacgaccaccttcccctgtcctctgtggaagctgatatcagggatttccttgctcacgacaaacgcgaacaactcgccctgcaaatctcccaaaggataatctccggacaggaccccgtccctgccaattccaccatccgcaacattgaaggcctctcccccgcctcccaggcccttggcaaacacacttccgtcatattccacggcatccttcgccgccaccagcaaaacctgctccaggaagcctttatcatggatggcttcgtctggctgccccgcgtgatttccgtctcccgcgatgccagcctcatagtgaacgaggcccaggtccaggccgtttttgccgccagccttcctgacaactggttcgacgtctggatggagcagcaactgcgcaaggccaacatccagaaatacatggactgacagacacaggcagtttcagacacaagagaataaaacccggatggcggtggaacattttgcctgccgcaatgtccccttagccaggccctgagcccctgcgtttatcccccttccacgcctttcgtatgattctcgcatcaaatacgggtatcgtgcgggaggcgtatcacaaatccagcatagagccttaacggccagtcagcaagccacacgctggcgtcgaacgaggaacgagcatcgacggcagcaacaacacttcctgtagtccatgctcactgcgttcgctggactccagggcatcacctcactttcggtgctgttcgcaacccacccaccttcaaagagaaccaaaaaaggccggagcgaaaactccggccttatccactctataaggagagaatcacttcagcagcaccgccttgcgcgaggctgtgagcgctggggattcgatgcggaagaagtaaattccggaggatacggggcggcgtgattcgtcggtgccgtcccagagtatcctgtgggtgcctgcgccgaggggggcctgcagcagacggcgcacaagctggcccttcacgttgtaaacggacagggtgaccggggttgcctccgcgaggtcgaacatgacagtggtgctggggttgaaggggttcggatagttttggtagaggcacgagatcagcggcggggtgtgcggatcgtctgcatccacagggggccaggcgacgctgatgatattcgtggccacgctttccccggcgtcgtagcaggccagcacgtaatagcggtattcgccgttaatggccgggatttcgccccaggcgacatccgtaacgatggccaccagttcaaagggaccggaatgctgcttgcggaagaccttgtagcttagctgtggagaaggcggagcggctggagccgcccagaaaagggaaagcgaatcattggccacgctgtattccagatccgtggccggcgcgaaccaggtgagcagataatcctgcgtgaagctgggggcgctcacgctcagattcacgggaaacacgctctgggactggtgtccggggccggaggcggtcaggttgtgctcgccctccggcagatagagggtgtaggcccctgcggagtttggacggatgctgatggcctggtcgttttgcacgaagagggtggaataatcgtcatccgggcgtgtggtttgcaccgtgccgctcaccttgccggcaaaggggatgaagcctgtggtctgaacgtcatccagataccagccctgcctctggaccgagccgtccgaggcaaaggtccagcggaacctcacggtctgattgggataggcagccagggagaagcgggcctgggtccagccgccgctgttgccggaatatcccggaccattgagtgcggacaggttttggtgggtgtatccgttctccggagtgagcagggtccaggtcacgccgttgttggtggaaatcttcacgttgccgccgtcgtagttctgctcggtgtcaaacttgtggtaaaactccagcacgaaattgctgccgatgaagacgggcggcgaagtgagggtccaatttgcgttgttcgaatactgctggttgatgcgggtgccccagaccttggttccggagtgggcaccggcagtcgaatccgtgccccactcccagccgttggtggcgggctgggcttcaaatgcgccgttgtcgtcctcaaaatcctcggacatgcctgtggttcccacattgagcaggacagtatcgttctgggcatccaccgcctcgcccagataggtgaggtagaaagtgaggttgttgcccacgaccacattgggcgaaaggcttacctcgtaaacggcctggctcatgccgccggcggggatggtggggatgagctgctccgaattcaccagggtgacgtcttcactgaggcacatgatgttgctggtgaggttgtaggcgtccacaaatccgttgttcagatagttcacgatcaggttgaaggtttcgccgggatcggccagtccgttcacattgccctgcagatcgctgatatagatgtcgttgaccacaatggtcggcttcctgatggtgaggttgaggggataagtccactcgttgccgtcgatgctcaccacaaactggagcgggatcacgaggccatcagtacagtcgggcgaggcggtgaccgtgaaaggcaccacattaaaagcgtggccgctgccggggatgtcgggacaggcgctttggggattggcgatggtgaggaactggctctggctggaaacgaaaatatttacgttggtggcggcgttgatgccgaggttgttcagcttgagcccgatctcggcggtttcgcccggctccagccaggaattgccgttggcgtcgttaaggatgagttcccccaccaccagataggcgttttgatgcagcacgggcaccgtggtgatgagcagggcctttccgttgtcaagcggctgcgcggcaggcggatactggttggcaaaagtgtattccaggccgcggaggttggtgtggtcgcggatgcccaccgtggcgtatttgccgtgggtggggctatagccgctgctgccgatatccacgttgttgaagaccttgtactggatcttgatgatgccgtcgcccaggctggagggatagtaaagcggatcgtagaagatcacctggaaggtttcctcgctggtgcggttgtagccgtttttgaggttgttgtactggatgatgaacctgtgttcgttggagtcgaaccactggtagattccgcctccggagaggatcacgaggtcgtcccagaaaggcgcgaccatcggcgaggggccctgtccgccaggcatcctgccattgcggaattcgccgtcgttggttacgccaaaggcgatgaaaccgttcacgcagaccgtgatttggtcatagtccactccgtagaaacggaaagtgaaaggcaggtcgatggtctcgaggacatcgctgtcattctggtcaccttcgtcgtcggagacgccagggtcgtggagtccggtgatttgggtgccgctgcctccgaggctgggcactatctcaatccattcgtagctggggcagtccggataggcggtgtccgagacgtcgtagatgaaatagccgtattcgtcgggacccaggggcgtgttttgcgccactgtgccgatgggcagtgaaaagtgggaggtctgctcgaatccgtcggcattgtagagccttagcctgaatgggatcatcatcccgggtatcagcaggggtcgggcgaagaggccatagccttcaatggaagaggcattcatgcctgccgggatgctgccgaaataggagaggttgtccgttacctccaccaggtcgttgagggcggtgagttcaccgtaaatgtcgttgacgccaaagacggaggagtttttcaccgcgagggtgaggatgccgttttcggaggggtccagcacgttgtcgccgccggcgctcacgctgtggttgatcacgctgaggtcggcgttgaagccgcccaggtagaataacacctgatagctgttggcggcgctgtcggtgagttccagggtgaagcggcaattgtggaaagcggggatgttccggtcaaagctgatgaggaaggggacgctgttctgggcagtctgttccgccgtgatggcgggccaggcgctgttggcctgggtgacggtcaccaactgatcggccgtgctgagcacaccggtgatgccgtcgatggcggcggtggtggtgttgtggagctccacgctcagggcgatggtctccccggcgttgatgaagctgtcgccattgccggaggagccggaactgccgtcatccgcgatggttttggagagatagaccaaagagccggccgcgtcgatcagcagggtctgctgggaaggcttgtgatcgtgtttggaggcggtgatcagcaggtcgccggtcacgaaattgggcaccaggagggtaaccattccgctttcgtccgtgaaacccttggccaccacatcgccataaccatcgttatagatggtaacgctcaccccttccacgggggtcaaagatggatcggaaacctggatgtccacaaaaggggtcccgcgggggatggagtccggggctgatatgaccaggctttggggtatgccaatgaaggtttccacggtgggatcgcccatcaggttgcaccagtgggcagaactgttggcatggctggtattggtctggccgtacatgttgtgcagatagaggcggccgttgagcagggcctcgcccatgctgcgcatcccgtagaggaatatgccgtcgaaaatgccggtcgcgagggcgttgttcaacatcgttttggtggcgatggtggccatgccgatggcggtgagggcgcctctgggaacggcttcggtgcccagacggatgaaggcttcagaggtggtttcctgggaggcataactgccggttccgcaggtcagcatgacggcgtgaggcagccggggaccgttatttagggaattgctggggctccagccgctcatgttgatatagccgcggtagttgaaaaagctcacgccctggttgatgccgttgttgatggtggaggggaaaccgccggtgtagttttcgatgtaagtgtaatcgggattgacttcatggctcatctcgtggatgtactggctattgtaaaccgtggatatgccggagtaggagcggtcgccgatgagcagcatgcggttcagccaggcggcggcatcgggagcgttgtttatgttcttttcgtaggtgtaaaccttgttcaggatggtgatgagctgggtaaggtcctgcacggaaatgcggccgatgaacgcgtcgcccaggaggtcgctgccggccaggtgggtatagggataatcgccttcaccgttgcggccgctgtaggactcaaaccaggccgggatcgggtagttgccgctggtatcgcccagcaggataatgaaatccgggcgggtttccagattgttgtactggctttggatatagttcttgatgctggtggtgctggccccgccggtctgggaggtgctcaccacgttcacggcatagcccttttggcgtttccaggtggcaaattcattcagtttggtcaggaacacagggtcgctgttgttgccgtggatcagcaggatgcgggcgtgggaaggcgcggtctcaagattgcggtaatcggcgaaattggcgatttgggcctcgtatatcttcctgaaagcctggctgtagcccgtataatcgggcagttcgttgaggccgggttcggcagtgaaatccaaggttacctcgatatccctgaaagtggccaggcgcctggtgacgggatcgtattggcagggataaacgttgatctgaaccacgcggaaatcacgcaggatggcgggttctgaggccgttgccaggctggaggggaaaagcccgccggaagggaccgccacgccgtcccagccttccctgcatattttgggctcgtcaagctggctgtattccaccccgccgtgactgtaggaaagggtgaagctgccccggggcgggatggccaccatggtgctgaacacgggaagttccggctggccgggttcgcaggtgccaagcgcgccttccatgcggatttcccggacgctttggcctccgtcttcgccggcggaaaagctgagggcgggcacggaaaccgcgagtttaagctggctgccggtagaccgcgcgaccgagaacgggcttgctgtttcggcgttcagagcggcaaggcagagcagcgccaacatggtgagtgacaggatccttttcattgtatcatccttgtatcgtcaaatcaaaaacctggagttgaggctccaggttatggttgcgttttttgcataaaggttttcttttactttgttcatttgatggcatagatcaggacaccctggtcccgggaggctacgaccagttttcccttgttgaatttggcgttgttggtgtagccggcggatcgaaggttctgcttcaggatgggactgctgggattgctgatgtcaaagaggtagatgccgccactgcctgagctaacggcggccagactgcccataatgtcgatgctggtagcgtagccggtggtgtcgaaggtatgcaccagcaagggttcggcgggcgcaccgatgttcaccacgttcaggccgccctggcggctggcgacgtaggcataattccccgcgaccttcacctgcagggcctggccggggagcgcgatttcgctcaccttctctttggtggcgcggtcgtaaatgaccaatccgcgctgttcggcggccacatagatgtagttgtccgtggcgtccattcccgaagcggtggcgggagtggtgatcacgtaatctgtgcccagatagagtccgccgttgtagcgaacgtacatcaggttgcgtccggctccgaaaaagccctggacgatattgtcatccacaggggcctcaatggcgctgaaagaaatcgattgcaggccgtcagtgccgccggtgatggaatctatcagcctgagcgaatcgggatcggagtaatcgacaatacggattttgtccgcgctcacatactcgcccaggaagagcagtttgtgctcgccgactgccgagatattgcggatgttcaccagggtggcgtccgcgctggggggatagatatccgtccaccaatgctgagagtaatccgtggcatcgatcacggaaatgccgccctggtcctgggccacaaaaatgctctcgttgtcaaaagacaggtccacgggattgccgaccacctgcacctgcttgagcaggctgaggacgtcctggtcctcccaggcgggattgcgccgcgagcatccgcaaaggatgagcagcaccgccgcgaacagtacgatctgctttttcaccatgttcaaatcctcccaggggaataaaatttatgattatgcatatagtagatgcaagaatcgttccgaatctgccacaataactgcggattcctttcccaaagcctttttcgcccacggacaggccgtttgccccttcccactaacatcccgtaaacctccccttaaattcccgcccggccaatgggaactcagcgggaagtattttagatgtgtatgggatggggcaaatggggcttctattgatagtgggtatcaaaatgggaggaagtccacaaattgcgcgaattcatacgaattgcttttccagttacgctaccaactgtggtagataacctaaaataaaggacttacttcccaatcgggcaagtaatccatatgtttggagcccgaaggtcccagaacgattggccgacggggacatcgaccttcctgacgctggcgtcgagcgaggcacgagcatggacgccagcaacatctcctgtagtccatactcgcaagctcgctgcactccaggctcaccaacgttggaaggcaaattcacaaattcacaaccggtaaatatggcttgtgaatttgcaacctgctgatagacgggtaattatgaggctaattcacaaaaaaggggtctcttatacatccgcggaagccgattgtaaacaggatatgatgtatccacgctaccagtctataatacatatagaaatagtatatataatatataatagtattatatattattatatattgatattatatcatctctaccttcccttcatctcttgtttgcggcatgagccactgcaaaccggcattctcccctggtccggctggatataagagataagcgtattttgtgaatttgtcccccaactcactgtgccacaataacacacggattcacaagccatatttaccggttgtgaatttgtgaatctgaccttgccggccttaaggaagtttgaaattagagccctattttggacttgacaaattattccttggtaaatttggtgtataatagctatggggcataatgatgttagcctgtggaacggcctctgtaaaggatcaacaagctatcaaccctccccatgcgacaggagcttcaatgtattataatttgacagacaaaccctggatcagtgtgctacagcttgacgggcattctgccaggctcggcctggctgaggtcctgcgaaaagcacacacactgcgtttggcttacggcaatccgatggaccgcatgtccgttttccgtttcctcctcgccctgggctattggtgttttgccaatacaaaacaagcgccggtatcagataagccactgcctcaggcatggacggactggcttgaacaaaaccaagaatatttcgaattgttcggtgatggccccagattctaccaatccccaggaacatccagaatacgccccagcacggaccttatccacgagcttcccacggcaaacaatttctggcacttccgccatgtgaccgatttcatcgatggcatttgcccagcttgctgcgttaccggtctgctgcgcctgccactctttaccaccgtaggcggcagcggaatcggagccggcatcaacagaactcctcccttctatgccatctggcagggtgatagtctgtcggaatcgatattcctgaattgggaacccacttcccggttgggtgttcctgcctggctgaacccgtttggatcccaaaacgagaaggatgtagccttgctgactggcctcacctggctgccccgcaaggtattcctgcttggcccggtgtcagacggagcaaaatgcagcgcctgcggagaagagcatgagcctctggtctatgcctgcaacaatgaggcggtgaaagtgcctccgaaccttgtctggaacgaccctcacgcgatttaccgggatgacaataatggcctgactgcccaggtggctctgatgtccggggacaaatacactttcgctaacagggattggcataaacccctggtcggcttcttacgggcgaaaggcatgtctcggaccgccacgctgtttttagtgggcttcacaagcgttcaagccaaatgtgtggacgtttgggaaaagaccattgccctatccggaaaaacaagctccgaggaactgctggaccagatatccgaaagagcctactccctgcacaggatgaggaaacaagaccgccggggcgattacaaggaatccgtgggaatcaccgccgtggcggacatcatcccgcacgtagagcatcgggttgacgtccattcgggcgagatggtggaaaacagcggcaatgtctggcaggaagcggatgaagattacggattcttcatgaagcgttttgccgtttctctagtgccggaaattacggttgccgccaagcttgaacgagaacaactggctcggcgcaagccctggcccctaaaaccaaaatcaattaaaaaaccttcatccggaggcgataatgaatgagagcaccgtgaaatttgttcggagcctgggcgaactcaaagagggcgacctgggcttgctcagaaagctcaggggtcgccgtctggatgaatccctgccgggtttcgacctgttttccggcctgtggtggccactccgcagtataagccccaaaacccccaggcggaaggtggtctggctagtcaccaagcttttcgcggaattccgctttgagcaaaagaaaggcgccagcctgccttggctcatgggcagaatatgccgtggacttaaagaagaaaaagagttcccacgtgttttagccaggttcgaccgcttgctcacgctcgagttgaaccaactggaggaaccgctggcgcaagtgctcgcgattttaaaaagacatgacattgccagtctggactgggttgccctcatcgatgacctctccgcttgggaacgggaatcaaacagagcgatatggtcagacacatttatttcagcatttaataatcagcaaggaggaatcaaatgttgattgaaatacacatgatccaaaaccacagcccggccaacctgaaccgggacgacctgggcgcgcccaagacctgttatttcggtggggtgttgcggtcccgcatctccagccagtgcctaaagcggagcatcaggatgagcgatgaattcaaaaacttgctcgggggtatccgtacccgtcggttggccgagttgattacaaaagctacaggacaggactgcaggaatcaggcagaggaagttctgaacaaagccggtttgaaacacgaaaacggacatagtaagatgctggtgttcatgacccggaacaagatcgatgcccttgctcaaattgtcaccagcgaaggcctgagtgttgcagagaaagccaagaaagcggcagatgtaatatcgggggcaatacattcccctgacatcgctctgtgcggaagaatgctcgagcccgataccaaggacaagaacacagacaaggtcaagtgggaaaataccactgttgaagcagccctgcaggtgtcgcacgccatttcaacccacatcgcccgcccagaaatagattactatgtagcagctgatgacgagcctggcgacgacacaggtgctggattcatagacgaggcgatgtttgcttcggcctgtttctacaaatattactcaattgattggaataccttgataatcaacctccagggtaatgaaaagttggcagctcatactgtcggagcctttatccaggccgctgcactcactaatcccagcggaaagcagaacagctttgccgcacataaccttcccgatggaatattggtagaaataaaagagacacctgtcagctatgcaaatgcctttgtgcgaccggtgggaatcgttaaggattctgacttggtagaacaaagcattggccaactggccaactatgtgaaggatataagtgccggtttcttccctggacagatgaaaggcaacgctctgtggttctcgcccaatggacgttatcccctaaagcctcaacagggcacgctggacataaagccagtttgcaacctgctagaacttgttcgcgaagcagttgagatgttgggttttgaatgggatgatgtaaaaaacgagaaagtagagagttgaaatgtcttctccgcctaataccctgttcctgagattggaggctccccttcaggcctggggaagcaatgaggccaaattcgccgtgcgcaggacagccgacgcgcccaccaaatccggagtggcaggcctgctctgcgctgccctgggaatcagccgggccgaagccggacagtattggctgggtgaaattgccaaattgcgcatgggggtgcggatagaccgcccgggcatccgctggtgggattaccatactgtgggagcggagcagaagctgcgcatttctgacctgaaaatgcccaacggcctagttctggttggcactgccctggccaaaaacctgggcgcggacaagatcaaatccaaacccggggctttgctctcccgacgcgagtatttggctgatgccagcttcctggttgcgctccagggtgaaccggatatcgtggcacaactggctgaagcgctgaaaaaaccagtctggacgctttatctggggcgaaaatcctgtcccccctcccgtccggtggatgaacacccgccagggttttatgccagtctgaaagaggctttgcggtcgatcccggcgcaactgagggaaaaaggcgaaccgatacctgacagtgttccctgtgtgctcgactgggttccggcccatgatgacgtgcacgctccgccgaacgccgaagcgcattacgacgtgccggtgtcctttgagcctccccaccacttgccccggctggtgatccgctgtaacctgccattggaccgcaacttcgaggcagagaccgtgctttccggcaaagcctggcaaccgccccgcaaccgggcaaattacgacaatcctgaatacaaaagggtccgcgctgagcgtttggtgatggacaatgccgcctgcatgttctgcaaggcacccgccactactgtgcagcacgtgaattaccgacgcgccggaggcagcgagaagccggaggacttgcgcgccctctgccgcctctgccacgatgcctgcaccatgctggaatatggcagcggcatgaccatggaccgcatagatccctgtgaccccgcctggcgtgagcgcatcttggccaaacgcgaggaaataatcaaattccgctcgctggagcagcgcaggcgcaaactcgatccgaaggaggagaacggatgatgtatctatcccaactgctcatcgacacaggcggcaaccctgaccggccaaggcccgggcgcttgtggctgaacaatatctataatgtccaccggcggctcagcatggctttccccatgcgcaagcgcaaggaaggagacccgaggtttctgcagccctttgaccccgcagattttgaaaagcgccagttcctctttcgggtggacaacaacaccgatggagaaaatcaaagggcgatggttttggtgcagtcgtccctgccgccggattgggactgggctttccagaatgccacgggatttttggcagcccctccccaggttaaggaatacgatccccagttctcagcaggtcagcagctgcgcttccgcatcctcgtgaatgccagtgtcaaacgcaaaatcgacgagttgcgggaaggacccggaggaaaggaaaaaacgggaagggttctgcacaaacgggtcgcccttacctgggacacaaattccaacccaaaggatgcggtggcgcaatggtttgccgccaaggctggcagactgggcttcacgcccggggagaccgaactggtaagcctgggctgggtatacggttccaaaccggagccccggggaaattcgccccggcgtgagaacgaataccgtcccctgagataccgttccgccctgctggaaggttatctgacagtggatgatgcctttctgttccgggaagccttggaaaaaggtatcggcagcgccaaaggaatgggcttcggcctcctttccgtggttccggcaagtgatgcgtaacagagaccttcacctaatgccaaaaatgcgggaccgcttcacctatctctatgtggagcatgccaaaatagacaaagaacaacaggcaatcgcctttcacgatgccatgggctccactcctgttccctgcgctggactggccctgctgatgctggggccaggcgtatccatcacccatgcggccatccttgttttagcagaatgcggctgtttggtggcttgggtgggggaacagggagtccgcttttactcatccgggacagggaccacccgtagttccgccaaccttatgcgtcaggctgccgcctggtcaaatcgagatacgcatctgcggatagttcgcagaatgtatgaattgaggttcaaggaaaaactggacccaaccctctctcttgaacagataaggggaaaagagggagcgagagtacgggatacctatttcagactttcaaaagaattcgatgtgcccatgagtgcgaggaattacgacaggagcaactggaataaaaccgaccccatcaacagagccctgtccgttgccaattcctgtctctatggcatctgccacgccgcgatagtggccgctggctattcacctgccctgggtttcgttcatactggcaaacaactgtcatttgtttatgacattgccgatctttataaaatggaaacctccgtgcccgcggctttcatagccacagccgcaggggtcgataacctggacagaaggacacgcattgcctgccgtgaccagttctatcaatttggtctgctaaagaagatagtggccgacattcacgcccttttcggtattctggaaacttcggacgatgagccagaccttgctgatgtcgatccagccgtgccaggcgggctttggaacccagatgataaagtgagccccggcggcttgtcatggggtctggatgatcctggaggccatgatgatggttctggtgcttgaaaaagttccctctggcctgagaggagaaattacacgctggctcctcgaaatcaaggctggagtatttgtcggtcaggtatcggccatgataagggaaaagctgtgggacaaggccaggtctggttgtgccggtggaacttgtatcatgatttacagcaagcattgcgaacaaggctttggaattgagttttggggtgccgcggaaaggatagtgacagaatgggaaggattgaaattgatgaccaagcatccgtgatccatacttgaagcctgttcaatggcctcaaagcgtctactttcgaagtgtgttccccacctgcgtgggggtgaaccggcgataccccacacgctgttcagcgtcgagaggtgttccccacctgcgtgggggtgaaccgtcaacattcgtggttggttcggattgctgtaagtgttccc

SEQ ID NO: 996 - DNA, 103434 bp, Artificial Sequence
  Synthetic Oligonucleotide
  misc_feature (1)..(86402): n is a, c, g, or t
nnnnnnnnnnnnnnnnnnnnnnnnnnnnnnnnnnnnnnnnnnnnnnnnnnnnnnnnnnnnnnnnnnnnnnnnnnnnnnnnnnnnnnnnnnnnnnnnnnnnnnnnnnnnnnnnnnnnnnnnnnnnnnnnnnnnnnnnnnnnnnnnnnnnnnnnnnnnnnnnnnnnnnnnnnnnnnnnnnnnnnnnnnnnnnnnnnnnnnnnnnnnnnnnnnnnnnnnnnnnnnnnnnnnnnnnnnnnnnnnnnnnnnnnnnnnnnnnnnnnnnnnnnnnnnnnnnnnnnnnnnnnnnnnnnnnnnnnnnnnnnnnnnnnnnnnnnnnnnnnnnnnnnnnnnnnnnnnnnnnnnnnnnnnnnnnnnnnnnnnnnnnnnnnnnnnnnnnnnnnnnnnnnnnnnnnnnnnnnnnnnnnnnnnnnnnnnnnnnnnnnnnnnnnnnnnnnnnnnnnnnnnnnnnnnnnnnnnnnnnnnnnnnnnnnnnnnnnnnnnnnnnnnnnnnnnnnnnnnnnnnnnnnnnnnnnnnnnnnnnnnnnnnnnnnnnnnnnnnnnnnnnnnnnnnnnnnnnnnnnnnnnnnnnnnnnnnnnnnnnnnnnnnnnnnnnnnnnnnnnnnnnnnnnnnnnnnnnnnnnnnnnnnnnnnnnnnnnnnnnnnnnnnnnnnnnnnnnnnnnnnnnnnnnnnnnnnnnnnnnnnnnnnnnnnnnnnnnnnnnnnnnnnnnnnnnnnnnnnnnnnnnnnnnnnnnnnnnnnnnnnnnnnnnnnnnnnnnnnnnnnnnnnnnnnnnnnnnnnnnnnnnnnnnnnnnnnnnnnnnnnnnnnnnnnnnnnnnnnnnnnnnnnnnnnnnnnnnnnnnnnnnnnnnnnnnnnnnnnnnnnnnnnnnnnnnnnnnnnnnnnnnnnnnnnnnnnnnnnnnnnnnnnnnnnnnnnnnnnnnnnnnnnnnnnnnnnnnnnnnnnnnnnnnnnnnnnnnnnnnnnnnnnnnnnnnnnnnnnnnnnnnnnnnnnnnnnnnnnnnnnnnnnnnnnnnnnnnnnnnnnnnnnnnnnnnnnnnnnnnnnnnnnnnnnnnnnnnnnnnnnnnnnnnnnnnnnnnnnnnnnnnnnnnnnnnnnnnnnnnnnnnnnnnnnnnnnnnnnnnnnnnnnnnnnnnnnnnnnnnnnnnnnnnnnnnnnnnnnnnnnnnnnnnnnnnnnnnnnnnnnnnnnnnnnnnnnnnnnnnnnnnnnnnnnnnnnnnnnnnnnnnnnnnnnnnnnnnnnnnnnnnnnnnnnnnnnnnnnnnnnnnnnnnnnnnnnnnnnnnnnnnnnnnnnnnnnnnnnnnnnnnnnnnnnnnnnnnnnnnnnnnnnnnnnnnnnnnnnnnnnnnnnnnnnnnnnnnnnnnnnnnnnnnnnnnnnnnnnnnnnnnnnnnnnnnnnnnnnnnnnnnnnnnnnnnnnnnnnnnnnnnnnnnnnnnnnnnnnnnnnnnnnnnnnnnnnnnnnnnnnnnnnnnnnnnnnnnnnnnnnnnnnnnnnnnnnnnnnnnnnnnnnnnnnnnnnnnnnnnnnnnnnnnnnnnnnnnnnnnnnnnnnnnnnnnnnnnnnnnnnnnnnnnnnnnnnnnnnnnnnnnnnnnnnnnnnnnnnnnnnnnnnnnnnnnnnnnnnnnnnnnnnnnnnnnnnnnnnnnnnnnnnnnnnnnnnnnnnnnnnnnnnnnnnnnnnnnnnnnnnnnnnnnnnnnnnnnnnnnnnnnnnnnnnnnnnnnnnnnnnnnnnnnnnnnnnnnnnnnnnnnnnnnnnnnnnnnnnnnnnnnnnnnnnnnnnnnnnnnnnnnnnnnnnnnnnnnnnnnnnnnnnnnnnnnnnnnnnnnnnnnnnnnnnnnnnnnnnnnnnnnnnnnnnnnnnnnnnnnnnnnnnnnnnnnnnnnnnnnnnnnnnnnnnnnnnnnnnnnnnnnnnnnnnnnnnnnnnnnnnnnnnnnnnnnnnnnnnnnnnnnnnnnnnnnnnnnnnnnnnnnnnnnnnnnnnnnnnnnnnnnnnnnnnnnnnnnnnnnnnnnnnnnnnnnnnnnnnnnnnnnnnnnnnnnnnnnnnnnnnnnnnnnnnnnnnnnnnnnnnnnnnnnnnnnnnnnnnnnnnnnnnnnnnnnnnnnnnnnnnnnnnnnnnnnnnnnnnnnnnnnnnnnnnnnnnnnnnnnnnnnnnnnnnnnnnnnnnnnnnnnnnnnnnnnnnnnnnnnnnnnnnnnnnnnnnnnnnnnnnnnnnnnnnnnnnnnnnnnnnnnnnnnnnnnnnnnnnnnnnnnnnnnnnnnnnnnnnnnnnnnnnnnnnnnnnnnnnnnnnnnnnnnnnnnnnnnnnnnnnnnnnnnnnnnnnnnnnnnnnnnnnnnnnnnnnnnnnnnnnnnnnnnnnnnnnnnnnnnnnnnnnnnnnnnnnnnnnnnnnnnnnnnnnnnnnnnnnnnnnnnnnnnnnnnnnnnnnnnnnnnnnnnnnnnnnnnnnnnnnnnnnnnnnnnnnnnnnnnnnnnnnnnnnnnnnnnnnnnnnnnnnnnnnnnnnnnnnnnnnnnnnnnnnnnnnnnnnnnnnnnnnnnnnnnnnnnnnnnnnnnnnnnnnnnnnnnnnnnnnnnnnnnnnnnnnnnnnnnnnnnnnnnnnnnnnnnnnnnnnnnnnnnnnnnnnnnnnnnnnnnnnnnnnnnnnnnnnnnnnnnnnnnnnnnnnnnnnnnnnnnnnnnnnnnnnnnnnnnnnnnnnnnnnnnnnnnnnnnnnnnnnnnnnnnnnnnnnnnnnnnnnnnnnnnnnnnnnnnnnnnnnnnnnnnnnnnnnnnnnnnnnnnnnnnnnnnnnnnnnnnnnnnnnnnnnnnnnnnnnnnnnnnnnnnnnnnnnnnnnnnnnnnnnnnnnnnnnnnnnnnnnnnnnnnnnnnnnnnnnnnnnnnnnnnnnnnnnnnnnnnnnnnnnnnnnnnnnnnnnnnnnnnnnnnnnnnnnnnnnnnnnnnnnnnnnnnnnnnnnnnnnnnnnnnnnnnnnnnnnnnnnnnnnnnnnnnnnnnnnnnnnnnnnnnnnnnnnnnnnnnnnnnnnnnnnnnnnnnnnnnnnnnnnnnnnnnnnnnnnnnnnnnnnnnnnnnnnnnnnnnnnnnnnnnnnnnnnnnnnnnnnnnnnnnnnnnnnnnnnnnnnnnnnnnnnnnnnnnnnnnnnnnnnnnnnnnnnnnnnnnnnnnnnnnnnnnnnnnnnnnnnnnnnnnnnnnnnnnnnnnnnnnnnnnnnnnnnnnnnnnnnnnnnnnnnnnnnnnnnnnnnnnnnnnnnnnnnnnnnnnnnnnnnnnnnnnnnnnnnnnnnnnnnnnnnnnnnnnnnnnnnnnnnnnnnnnnnnnnnnnnnnnnnnnnnnnnnnnnnnnnnnnnnnnnnnnnnnnnnnnnnnnnnnnnnnnnnnnnnnnnnnnnnnnnnnnnnnnnnnnnnnnnnnnnnnnnnnnnnnnnnnnnnnnnnnnnnnnnnnnnnnnnnnnnnnnnnnnnnnnnnnnnnnnnnnnnnnnnnnnnnnnnnnnnnnnnnnnnnnnnnnnnnnnnnnnnnnnnnnnnnnnnnnnnnnnnnnnnnnnnnnnnnnnnnnnnnnnnnnnnnnnnnnnnnnnnnnnnnnnnnnnnnnnnnnnnnnnnnnnnnnnnnnnnnnnnnnnnnnnnnnnnnnnnnnnnnnnnnnnnnnnnnnnnnnnnnnnnnnnnnnnnnnnnnnnnnnnnnnnnnnnnnnnnnnnnnnnnnnnnnnnnnnnnnnnnnnnnnnnnnnnnnnnnnnnnnnnnnnnnnnnnnnnnnnnnnnnnnnnnnnnnnnnnnnnnnnnnnnnnnnnnnnnnnnnnnnnnnnnnnnnnnnnnnnnnnnnnnnnnnnnnnnnnnnnnnnnnnnnnnnnnnnnnnnnnnnnnnnnnnnnnnnnnnnnnnnnnnnnnnnnnnnnnnnnnnnnnnnnnnnnnnnnnnnnnnnnnnnnnnnnnnnnnnnnnnnnnnnnnnnnnnnnnnnnnnnnnnnnnnnnnnnnnnnnnnnnnnnnnnnnnnnnnnnnnnnnnnnnnnnnnnnnnnnnnnnnnnnnnnnnnnnnnnnnnnnnnnnnnnnnnnnnnnnnnnnnnnnnnnnnnnnnnnnnnnnnnnnnnnnnnnnnnnnnnnnnnnnnnnnnnnnnnnnnnnnnnnnnnnnnnnnnnnnnnnnnnnnnnnnnnnnnnnnnnnnnnnnnnnnnnnnnnnnnnnnnnnnnnnnnnnnnnnnnnnnnnnnnnnnnnnnnnnnnnnnnnnnnnnnnnnnnnnnnnnnnnnnnnnnnnnnnnnnnnnnnnnnnnnnnnnnnnnnnnnnnnnnnnnnnnnnnnnnnnnnnnnnnnnnnnnnnnnnnnnnnnnnnnnnnnnnnnnnnnnnnnnnnnnnnnnnnnnnnnnnnnnnnnnnnnnnnnnnnnnnnnnnnnnnnnnnnnnnnnnnnnnnnnnnnnnnnnnnnnnnnnnnnnnnnnnnnnnnnnnnnnnnnnnnnnnnnnnnnnnnnnnnnnnnnnnnnnnnnnnnnnnnnnnnnnnnnnnnnnnnnnnnnnnnnnnnnnnnnnnnnnnnnnnnnnnnnnnnnnnnnnnnnnnnnnnnnnnnnnnnnnnnnnnnnnnnnnnnnnnnnnnnnnnnnnnnnnnnnnnnnnnnnnnnnnnnnnnnnnnnnnnnnnnnnnnnnnnnnnnnnnnnnnnnnnnnnnnnnnnnnnnnnnnnnnnnnnnnnnnnnnnnnnnnnnnnnnnnnnnnnnnnnnnnnnnnnnnnnnnnnnnnnnnnnnnnnnnnnnnnnnnnnnnnnnnnnnnnnnnnnnnnnnnnnnnnnnnnnnnnnnnnnnnnnnnnnnnnnnnnnnnnnnnnnnnnnnnnnnnnnnnnnnnnnnnnnnnnnnnnnnnnnnnnnnnnnnnnnnnnnnnnnnnnnnnnnnnnnnnnnnnnnnnnnnnnnnnnnnnnnnnnnnnnnnnnnnnnnnnnnnnnnnnnnnnnnnnnnnnnnnnnnnnnnnnnnnnnnnnnnnnnnnnnnnnnnnnnnnnnnnnnnnnnnnnnnnnnnnnnnnnnnnnnnnnnnnnnnnnnnnnnnnnnnnnnnnnnnnnnnnnnnnnnnnnnnnnnnnnnnnnnnnnnnnnnnnnnnnnnnnnnnnnnnnnnnnnnnnnnnnnnnnnnnnnnnnnnnnnnnnnnnnnnnnnnnnnnnnnnnnnnnnnnnnnnnnnnnnnnnnnnnnnnnnnnnnnnnnnnnnnnnnnnnnnnnnnnnnnnnnnnnnnnnnnnnnnnnnnnnnnnnnnnnnnnnnnnnnnnnnnnnnnnnnnnnnnnnnnnnnnnnnnnnnnnnnnnnnnnnnnnnnnnnnnnnnnnnnnnnnnnnnnnnnnnnnnnnnnnnnnnnnnnnnnnnnnnnnnnnnnnnnnnnnnnnnnnnnnnnnnnnnnnnnnnnnnnnnnnnnnnnnnnnnnnnnnnnnnnnnnnnnnnnnnnnnnnnnnnnnnnnnnnnnnnnnnnnnnnnnnnnnnnnnnnnnnnnnnnnnnnnnnnnnnnnnnnnnnnnnnnnnnnnnnnnnnnnnnnnnnnnnnnnnnnnnnnnnnnnnnnnnnnnnnnnnnnnnnnnnnnnnnnnnnnnnnnnnnnnnnnnnnnnnnnnnnnnnnnnnnnnnnnnnnnnnnnnnnnnnnnnnnnnnnnnnnnnnnnnnnnnnnnnnnnnnnnnnnnnnnnnnnnnnnnnnnnnnnnnnnnnnnnnnnnnnnnnnnnnnnnnnnnnnnnnnnnnnnnnnnnnnnnnnnnnnnnnnnnnnnnnnnnnnnnnnnnnnnnnnnnnnnnnnnnnnnnnnnnnnnnnnnnnnnnnnnnnnnnnnnnnnnnnnnnnnnnnnnnnnnnnnnnnnnnnnnnnnnnnnnnnnnnnnnnnnnnnnnnnnnnnnnnnnnnnnnnnnnnnnnnnnnnnnnnnnnnnnnnnnnnnnnnnnnnnnnnnnnnnnnnnnnnnnnnnnnnnnnnnnnnnnnnnnnnnnnnnnnnnnnnnnnnnnnnnnnnnnnnnnnnnnnnnnnnnnnnnnnnnnnnnnnnnnnnnnnnnnnnnnnnnnnnnnnnnnnnnnnnnnnnnnnnnnnnnnnnnnnnnnnnnnnnnnnnnnnnnnnnnnnnnnnnnnnnnnnnnnnnnnnnnnnnnnnnnnnnnnnnnnnnnnnnnnnnnnnnnnnnnnnnnnnnnnnnnnnnnnnnnnnnnnnnnnnnnnnnnnnnnnnnnnnnnnnnnnnnnnnnnnnnnnnnnnnnnnnnnnnnnnnnnnnnnnnnnnnnnnnnnnnnnnnnnnnnnnnnnnnnnnnnnnnnnnnnnnnnnnnnnnnnnnnnnnnnnnnnnnnnnnnnnnnnnnnnnnnnnnnnnnnnnnnnnnnnnnnnnnnnnnnnnnnnnnnnnnnnnnnnnnnnnnnnnnnnnnnnnnnnnnnnnnnnnnnnnnnnnnnnnnnnnnnnnnnnnnnnnnnnnnnnnnnnnnnnnnnnnnnnnnnnnnnnnnnnnnnnnnnnnnnnnnnnnnnnnnnnnnnnnnnnnnnnnnnnnnnnnnnnnnnnnnnnnnnnnnnnnnnnnnnnnnnnnnnnnnnnnnnnnnnnnnnnnnnnnnnnnnnnnnnnnnnnnnnnnnnnnnnnnnnnnnnnnnnnnnnnnnnnnnnnnnnnnnnnnnnnnnnnnnnnnnnnnnnnnnnnnnnnnnnnnnnnnnnnnnnnnnnnnnnnnnnnnnnnnnnnnnnnnnnnnnnnnnnnnnnnnnnnnnnnnnnnnnnnnnnnnnnnnnnnnnnnnnnnnnnnnnnnnnnnnnnnnnnnnnnnnnnnnnnnnnnnnnnnnnnnnnnnnnnnnnnnnnnnnnnnnnnnnnnnnnnnnnnnnnnnnnnnnnnnnnnnnnnnnnnnnnnnnnnnnnnnnnnnnnnnnnnnnnnnnnnnnnnnnnnnnnnnnnnnnnnnnnnnnnnnnnnnnnnnnnnnnnnnnnnnnnnnnnnnnnnnnnnnnnnnnnnnnnnnnnnnnnnnnnnnnnnnnnnnnnnnnnnnnnnnnnnnnnnnnnnnnnnnnnnnnnnnnnnnnnnnnnnnnnnnnnnnnnnnnnnnnnnnnnnnnnnnnnnnnnnnnnnnnnnnnnnnnnnnnnnnnnnnnnnnnnnnnnnnnnnnnnnnnnnnnnnnnnnnnnnnnnnnnnnnnnnnnnnnnnnnnnnnnnnnnnnnnnnnnnnnnnnnnnnnnnnnnnnnnnnnnnnnnnnnnnnnnnnnnnnnnnnnnnnnnnnnnnnnnnnnnnnnnnnnnnnnnnnnnnnnnnnnnnnnnnnnnnnnnnnnnnnnnnnnnnnnnnnnnnnnnnnnnnnnnnnnnnnnnnnnnnnnnnnnnnnnnnnnnnnnnnnnnnnnnnnnnnnnnnnnnnnnnnnnnnnnnnnnnnnnnnnnnnnnnnnnnnnnnnnnnnnnnnnnnnnnnnnnnnnnnnnnnnnnnnnnnnnnnnnnnnnnnnnnnnnnnnnnnnnnnnnnnnnnnnnnnnnnnnnnnnnnnnnnnnnnnnnnnnnnnnnnnnnnnnnnnnnnnnnnnnnnnnnnnnnnnnnnnnnnnnnnnnnnnnnnnnnnnnnnnnnnnnnnnnnnnnnnnnnnnnnnnnnnnnnnnnnnnnnnnnnnnnnnnnnnnnnnnnnnnnnnnnnnnnnnnnnnnnnnnnnnnnnnnnnnnnnnnnnnnnnnnnnnnnnnnnnnnnnnnnnnnnnnnnnnnnnnnnnnnnnnnnnnnnnnnnnnnnnnnnnnnnnnnnnnnnnnnnnnnnnnnnnnnnnnnnnnnnnnnnnnnnnnnnnnnnnnnnnnnnnnnnnnnnnnnnnnnnnnnnnnnnnnnnnnnnnnnnnnnnnnnnnnnnnnnnnnnnnnnnnnnnnnnnnnnnnnnnnnnnnnnnnnnnnnnnnnnnnnnnnnnnnnnnnnnnnnnnnnnnnnnnnnnnnnnnnnnnnnnnnnnnnnnnnnnnnnnnnnnnnnnnnnnnnnnnnnnnnnnnnnnnnnnnnnnnnnnnnnnnnnnnnnnnnnnnnnnnnnnnnnnnnnnnnnnnnnnnnnnnnnnnnnnnnnnnnnnnnnnnnnnnnnnnnnnnnnnnnnnnnnnnnnnnnnnnnnnnnnnnnnnnnnnnnnnnnnnnnnnnnnnnnnnnnnnnnnnnnnnnnnnnnnnnnnnnnnnnnnnnnnnnnnnnnnnnnnnnnnnnnnnnnnnnnnnnnnnnnnnnnnnnnnnnnnnnnnnnnnnnnnnnnnnnnnnnnnnnnnnnnnnnnnnnnnnnnnnnnnnnnnnnnnnnnnnnnnnnnnnnnnnnnnnnnnnnnnnnnnnnnnnnnnnnnnnnnnnnnnnnnnnnnnnnnnnnnnnnnnnnnnnnnnnnnnnnnnnnnnnnnnnnnnnnnnnnnnnnnnnnnnnnnnnnnnnnnnnnnnnnnnnnnnnnnnnnnnnnnnnnnnnnnnnnnnnnnnnnnnnnnnnnnnnnnnnnnnnnnnnnnnnnnnnnnnnnnnnnnnnnnnnnnnnnnnnnnnnnnnnnnnnnnnnnnnnnnnnnnnnnnnnnnnnnnnnnnnnnnnnnnnnnnnnnnnnnnnnnnnnnnnnnnnnnnnnnnnnnnnnnnnnnnnnnnnnnnnnnnnnnnnnnnnnnnnnnnnnnnnnnnnnnnnnnnnnnnnnnnnnnnnnnnnnnnnnnnnnnnnnnnnnnnnnnnnnnnnnnnnnnnnnnnnnnnnnnnnnnnnnnnnnnnnnnnnnnnnnnnnnnnnnnnnnnnnnnnnnnnnnnnnnnnnnnnnnnnnnnnnnnnnnnnnnnnnnnnnnnnnnnnnnnnnnnnnnnnnnnnnnnnnnnnnnnnnnnnnnnnnnnnnnnnnnnnnnnnnnnnnnnnnnnnnnnnnnnnnnnnnnnnnnnnnnnnnnnnnnnnnnnnnnnnnnnnnnnnnnnnnnnnnnnnnnnnnnnnnnnnnnnnnnnnnnnnnnnnnnnnnnnnnnnnnnnnnnnnnnnnnnnnnnnnnnnnnnnnnnnnnnnnnnnnnnnnnnnnnnnnnnnnnnnnnnnnnnnnnnnnnnnnnnnnnnnnnnnnnnnnnnnnnnnnnnnnnnnnnnnnnnnnnnnnnnnnnnnnnnnnnnnnnnnnnnnnnnnnnnnnnnnnnnnnnnnnnnnnnnnnnnnnnnnnnnnnnnnnnnnnnnnnnnnnnnnnnnnnnnnnnnnnnnnnnnnnnnnnnnnnnnnnnnnnnnnnnnnnnnnnnnnnnnnnnnnnnnnnnnnnnnnnnnnnnnnnnnnnnnnnnnnnnnnnnnnnnnnnnnnnnnnnnnnnnnnnnnnnnnnnnnnnnnnnnnnnnnnnnnnnnnnnnnnnnnnnnnnnnnnnnnnnnnnnnnnnnnnnnnnnnnnnnnnnnnnnnnnnnnnnnnnnnnnnnnnnnnnnnnnnnnnnnnnnnnnnnnnnnnnnnnnnnnnnnnnnnnnnnnnnnnnnnnnnnnnnnnnnnnnnnnnnnnnnnnnnnnnnnnnnnnnnnnnnnnnnnnnnnnnnnnnnnnnnnnnnnnnnnnnnnnnnnnnnnnnnnnnnnnnnnnnnnnnnnnnnnnnnnnnnnnnnnnnnnnnnnnnnnnnnnnnnnnnnnnnnnnnnnnnnnnnnnnnnnnnnnnnnnnnnnnnnnnnnnnnnnnnnnnnnnnnnnnnnnnnnnnnnnnnnnnnnnnnnnnnnnnnnnnnnnnnnnnnnnnnnnnnnnnnnnnnnnnnnnnnnnnnnnnnnnnnnnnnnnnnnnnnnnnnnnnnnnnnnnnnnnnnnnnnnnnnnnnnnnnnnnnnnnnnnnnnnnnnnnnnnnnnnnnnnnnnnnnnnnnnnnnnnnnnnnnnnnnnnnnnnnnnnnnnnnnnnnnnnnnnnnnnnnnnnnnnnnnnnnnnnnnnnnnnnnnnnnnnnnnnnnnnnnnnnnnnnnnnnnnnnnnnnnnnnnnnnnnnnnnnnnnnnnnnnnnnnnnnnnnnnnnnnnnnnnnnnnnnnnnnnnnnnnnnnnnnnnnnnnnnnnnnnnnnnnnnnnnnnnnnnnnnnnnnnnnnnnnnnnnnnnnnnnnnnnnnnnnnnnnnnnnnnnnnnnnnnnnnnnnnnnnnnnnnnnnnnnnnnnnnnnnnnnnnnnnnnnnnnnnnnnnnnnnnnnnnnnnnnnnnnnnnnnnnnnnnnnnnnnnnnnnnnnnnnnnnnnnnnnnnnnnnnnnnnnnnnnnnnnnnnnnnnnnnnnnnnnnnnnnnnnnnnnnnnnnnnnnnnnnnnnnnnnnnnnnnnnnnnnnnnnnnnnnnnnnnnnnnnnnnnnnnnnnnnnnnnnnnnnnnnnnnnnnnnnnnnnnnnnnnnnnnnnnnnnnnnnnnnnnnnnnnnnnnnnnnnnnnnnnnnnnnnnnnnnnnnnnnnnnnnnnnnnnnnnnnnnnnnnnnnnnnnnnnnnnnnnnnnnnnnnnnnnnnnnnnnnnnnnnnnnnnnnnnnnnnnnnnnnnnnnnnnnnnnnnnnnnnnnnnnnnnnnnnnnnnnnnnnnnnnnnnnnnnnnnnnnnnnnnnnnnnnnnnnnnnnnnnnnnnnnnnnnnnnnnnnnnnnnnnnnnnnnnnnnnnnnnnnnnnnnnnnnnnnnnnnnnnnnnnnnnnnnnnnnnnnnnnnnnnnnnnnnnnnnnnnnnnnnnnnnnnnnnnnnnnnnnnnnnnnnnnnnnnnnnnnnnnnnnnnnnnnnnnnnnnnnnnnnnnnnnnnnnnnnnnnnnnnnnnnnnnnnnnnnnnnnnnnnnnnnnnnnnnnnnnnnnnnnnnnnnnnnnnnnnnnnnnnnnnnnnnnnnnnnnnnnnnnnnnnnnnnnnnnnnnnnnnnnnnnnnnnnnnnnnnnnnnnnnnnnnnnnnnnnnnnnnnnnnnnnnnnnnnnnnnnnnnnnnnnnnnnnnnnnnnnnnnnnnnnnnnnnnnnnnnnnnnnnnnnnnnnnnnnnnnnnnnnnnnnnnnnnnnnnnnnnnnnnnnnnnnnnnnnnnnnnnnnnnnnnnnnnnnnnnnnnnnnnnnnnnnnnnnnnnnnnnnnnnnnnnnnnnnnnnnnnnnnnnnnnnnnnnnnnnnnnnnnnnnnnnnnnnnnnnnnnnnnnnnnnnnnnnnnnnnnnnnnnnnnnnnnnnnnnnnnnnnnnnnnnnnnnnnnnnnnnnnnnnnnnnnnnnnnnnnnnnnnnnnnnnnnnnnnnnnnnnnnnnnnnnnnnnnnnnnnnnnnnnnnnnnnnnnnnnnnnnnnnnnnnnnnnnnnnnnnnnnnnnnnnnnnnnnnnnnnnnnnnnnnnnnnnnnnnnnnnnnnnnnnnnnnnnnnnnnnnnnnnnnnnnnnnnnnnnnnnnnnnnnnnnnnnnnnnnnnnnnnnnnnnnnnnnnnnnnnnnnnnnnnnnnnnnnnnnnnnnnnnnnnnnnnnnnnnnnnnnnnnnnnnnnnnnnnnnnnnnnnnnnnnnnnnnnnnnnnnnnnnnnnnnnnnnnnnnnnnnnnnnnnnnnnnnnnnnnnnnnnnnnnnnnnnnnnnnnnnnnnnnnnnnnnnnnnnnnnnnnnnnnnnnnnnnnnnnnnnnnnnnnnnnnnnnnnnnnnnnnnnnnnnnnnnnnnnnnnnnnnnnnnnnnnnnnnnnnnnnnnnnnnnnnnnnnnnnnnnnnnnnnnnnnnnnnnnnnnnnnnnnnnnnnnnnnnnnnnnnnnnnnnnnnnnnnnnnnnnnnnnnnnnnnnnnnnnnnnnnnnnnnnnnnnnnnnnnnnnnnnnnnnnnnnnnnnnnnnnnnnnnnnnnnnnnnnnnnnnnnnnnnnnnnnnnnnnnnnnnnnnnnnnnnnnnnnnnnnnnnnnnnnnnnnnnnnnnnnnnnnnnnnnnnnnnnnnnnnnnnnnnnnnnnnnnnnnnnnnnnnnnnnnnnnnnnnnnnnnnnnnnnnnnnnnnnnnnnnnnnnnnnnnnnnnnnnnnnnnnnnnnnnnnnnnnnnnnnnnnnnnnnnnnnnnnnnnnnnnnnnnnnnnnnnnnnnnnnnnnnnnnnnnnnnnnnnnnnnnnnnnnnnnnnnnnnnnnnnnnnnnnnnnnnnnnnnnnnnnnnnnnnnnnnnnnnnnnnnnnnnnnnnnnnnnnnnnnnnnnnnnnnnnnnnnnnnnnnnnnnnnnnnnnnnnnnnnnnnnnnnnnnnnnnnnnnnnnnnnnnnnnnnnnnnnnnnnnnnnnnnnnnnnnnnnnnnnnnnnnnnnnnnnnnnnnnnnnnnnnnnnnnnnnnnnnnnnnnnnnnnnnnnnnnnnnnnnnnnnnnnnnnnnnnnnnnnnnnnnnnnnnnnnnnnnnnnnnnnnnnnnnnnnnnnnnnnnnnnnnnnnnnnnnnnnnnnnnnnnnnnnnnnnnnnnnnnnnnnnnnnnnnnnnnnnnnnnnnnnnnnnnnnnnnnnnnnnnnnnnnnnnnnnnnnnnnnnnnnnnnnnnnnnnnnnnnnnnnnnnnnnnnnnnnnnnnnnnnnnnnnnnnnnnnnnnnnnnnnnnnnnnnnnnnnnnnnnnnnnnnnnnnnnnnnnnnnnnnnnnnnnnnnnnnnnnnnnnnnnnnnnnnnnnnnnnnnnnnnnnnnnnnnnnnnnnnnnnnnnnnnnnnnnnnnnnnnnnnnnnnnnnnnnnnnnnnnnnnnnnnnnnnnnnnnnnnnnnnnnnnnnnnnnnnnnnnnnnnnnnnnnnnnnnnnnnnnnnnnnnnnnnnnnnnnnnnnnnnnnnnnnnnnnnnnnnnnnnnnnnnnnnnnnnnnnnnnnnnnnnnnnnnnnnnnnnnnnnnnnnnnnnnnnnnnnnnnnnnnnnnnnnnnnnnnnnnnnnnnnnnnnnnnnnnnnnnnnnnnnnnnnnnnnnnnnnnnnnnnnnnnnnnnnnnnnnnnnnnnnnnnnnnnnnnnnnnnnnnnnnnnnnnnnnnnnnnnnnnnnnnnnnnnnnnnnnnnnnnnnnnnnnnnnnnnnnnnnnnnnnnnnnnnnnnnnnnnnnnnnnnnnnnnnnnnnnnnnnnnnnnnnnnnnnnnnnnnnnnnnnnnnnnnnnnnnnnnnnnnnnnnnnnnnnnnnnnnnnnnnnnnnnnnnnnnnnnnnnnnnnnnnnnnnnnnnnnnnnnnnnnnnnnnnnnnnnnnnnnnnnnnnnnnnnnnnnnnnnnnnnnnnnnnnnnnnnnnnnnnnnnnnnnnnnnnnnnnnnnnnnnnnnnnnnnnnnnnnnnnnnnnnnnnnnnnnnnnnnnnnnnnnnnnnnnnnnnnnnnnnnnnnnnnnnnnnnnnnnnnnnnnnnnnnnnnnnnnnnnnnnnnnnnnnnnnnnnnnnnnnnnnnnnnnnnnnnnnnnnnnnnnnnnnnnnnnnnnnnnnnnnnnnnnnnnnnnnnnnnnnnnnnnnnnnnnnnnnnnnnnnnnnnnnnnnnnnnnnnnnnnnnnnnnnnnnnnnnnnnnnnnnnnnnnnnnnnnnnnnnnnnnnnnnnnnnnnnnnnnnnnnnnnnnnnnnnnnnnnnnnnnnnnnnnnnnnnnnnnnnnnnnnnnnnnnnnnnnnnnnnnnnnnnnnnnnnnnnnnnnnnnnnnnnnnnnnnnnnnnnnnnnnnnnnnnnnnnnnnnnnnnnnnnnnnnnnnnnnnnnnnnnnnnnnnnnnnnnnnnnnnnnnnnnnnnnnnnnnnnnnnnnnnnnnnnnnnnnnnnnnnnnnnnnnnnnnnnnnnnnnnnnnnnnnnnnnnnnnnnnnnnnnnnnnnnnnnnnnnnnnnnnnnnnnnnnnnnnnnnnnnnnnnnnnnnnnnnnnnnnnnnnnnnnnnnnnnnnnnnnnnnnnnnnnnnnnnnnnnnnnnnnnnnnnnnnnnnnnnnnnnnnnnnnnnnnnnnnnnnnnnnnnnnnnnnnnnnnnnnnnnnnnnnnnnnnnnnnnnnnnnnnnnnnnnnnnnnnnnnnnnnnnnnnnnnnnnnnnnnnnnnnnnnnnnnnnnnnnnnnnnnnnnnnnnnnnnnnnnnnnnnnnnnnnnnnnnnnnnnnnnnnnnnnnnnnnnnnnnnnnnnnnnnnnnnnnnnnnnnnnnnnnnnnnnnnnnnnnnnnnnnnnnnnnnnnnnnnnnnnnnnnnnnnnnnnnnnnnnnnnnnnnnnnnnnnnnnnnnnnnnnnnnnnnnnnnnnnnnnnnnnnnnnnnnnnnnnnnnnnnnnnnnnnnnnnnnnnnnnnnnnnnnnnnnnnnnnnnnnnnnnnnnnnnnnnnnnnnnnnnnnnnnnnnnnnnnnnnnnnnnnnnnnnnnnnnnnnnnnnnnnnnnnnnnnnnnnnnnnnnnnnnnnnnnnnnnnnnnnnnnnnnnnnnnnnnnnnnnnnnnnnnnnnnnnnnnnnnnnnnnnnnnnnnnnnnnnnnnnnnnnnnnnnnnnnnnnnnnnnnnnnnnnnnnnnnnnnnnnnnnnnnnnnnnnnnnnnnnnnnnnnnnnnnnnnnnnnnnnnnnnnnnnnnnnnnnnnnnnnnnnnnnnnnnnnnnnnnnnnnnnnnnnnnnnnnnnnnnnnnnnnnnnnnnnnnnnnnnnnnnnnnnnnnnnnnnnnnnnnnnnnnnnnnnnnnnnnnnnnnnnnnnnnnnnnnnnnnnnnnnnnnnnnnnnnnnnnnnnnnnnnnnnnnnnnnnnnnnnnnnnnnnnnnnnnnnnnnnnnnnnnnnnnnnnnnnnnnnnnnnnnnnnnnnnnnnnnnnnnnnnnnnnnnnnnnnnnnnnnnnnnnnnnnnnnnnnnnnnnnnnnnnnnnnnnnnnnnnnnnnnnnnnnnnnnnnnnnnnnnnnnnnnnnnnnnnnnnnnnnnnnnnnnnnnnnnnnnnnnnnnnnnnnnnnnnnnnnnnnnnnnnnnnnnnnnnnnnnnnnnnnnnnnnnnnnnnnnnnnnnnnnnnnnnnnnnnnnnnnnnnnnnnnnnnnnnnnnnnnnnnnnnnnnnnnnnnnnnnnnnnnnnnnnnnnnnnnnnnnnnnnnnnnnnnnnnnnnnnnnnnnnnnnnnnnnnnnnnnnnnnnnnnnnnnnnnnnnnnnnnnnnnnnnnnnnnnnnnnnnnnnnnnnnnnnnnnnnnnnnnnnnnnnnnnnnnnnnnnnnnnnnnnnnnnnnnnnnnnnnnnnnnnnnnnnnnnnnnnnnnnnnnnnnnnnnnnnnnnnnnnnnnnnnnnnnnnnnnnnnnnnnnnnnnnnnnnnnnnnnnnnnnnnnnnnnnnnnnnnnnnnnnnnnnnnnnnnnnnnnnnnnnnnnnnnnnnnnnnnnnnnnnnnnnnnnnnnnnnnnnnnnnnnnnnnnnnnnnnnnnnnnnnnnnnnnnnnnnnnnnnnnnnnnnnnnnnnnnnnnnnnnnnnnnnnnnnnnnnnnnnnnnnnnnnnnnnnnnnnnnnnnnnnnnnnnnnnnnnnnnnnnnnnnnnnnnnnnnnnnnnnnnnnnnnnnnnnnnnnnnnnnnnnnnnnnnnnnnnnnnnnnnnnnnnnnnnnnnnnnnnnnnnnnnnnnnnnnnnnnnnnnnnnnnnnnnnnnnnnnnnnnnnnnnnnnnnnnnnnnnnnnnnnnnnnnnnnnnnnnnnnnnnnnnnnnnnnnnnnnnnnnnnnnnnnnnnnnnnnnnnnnnnnnnnnnnnnnnnnnnnnnnnnnnnnnnnnnnnnnnnnnnnnnnnnnnnnnnnnnnnnnnnnnnnnnnnnnnnnnnnnnnnnnnnnnnnnnnnnnnnnnnnnnnnnnnnnnnnnnnnnnnnnnnnnnnnnnnnnnnnnnnnnnnnnnnnnnnnnnnnnnnnnnnnnnnnnnnnnnnnnnnnnnnnnnnnnnnnnnnnnnnnnnnnnnnnnnnnnnnnnnnnnnnnnnnnnnnnnnnnnnnnnnnnnnnnnnnnnnnnnnnnnnnnnnnnnnnnnnnnnnnnnnnnnnnnnnnnnnnnnnnnnnnnnnnnnnnnnnnnnnnnnnnnnnnnnnnnnnnnnnnnnnnnnnnnnnnnnnnnnnnnnnnnnnnnnnnnnnnnnnnnnnnnnnnnnnnnnnnnnnnnnnnnnnnnnnnnnnnnnnnnnnnnnnnnnnnnnnnnnnnnnnnnnnnnnnnnnnnnnnnnnnnnnnnnnnnnnnnnnnnnnnnnnnnnnnnnnnnnnnnnnnnnnnnnnnnnnnnnnnnnnnnnnnnnnnnnnnnnnnnnnnnnnnnnnnnnnnnnnnnnnnnnnnnnnnnnnnnnnnnnnnnnnnnnnnnnnnnnnnnnnnnnnnnnnnnnnnnnnnnnnnnnnnnnnnnnnnnnnnnnnnnnnnnnnnnnnnnnnnnnnnnnnnnnnnnnnnnnnnnnnnnnnnnnnnnnnnnnnnnnnnnnnnnnnnnnnnnnnnnnnnnnnnnnnnnnnnnnnnnnnnnnnnnnnnnnnnnnnnnnnnnnnnnnnnnnnnnnnnnnnnnnnnnnnnnnnnnnnnnnnnnnnnnnnnnnnnnnnnnnnnnnnnnnnnnnnnnnnnnnnnnnnnnnnnnnnnnnnnnnnnnnnnnnnnnnnnnnnnnnnnnnnnnnnnnnnnnnnnnnnnnnnnnnnnnnnnnnnnnnnnnnnnnnnnnnnnnnnnnnnnnnnnnnnnnnnnnnnnnnnnnnnnnnnnnnnnnnnnnnnnnnnnnnnnnnnnnnnnnnnnnnnnnnnnnnnnnnnnnnnnnnnnnnnnnnnnnnnnnnnnnnnnnnnnnnnnnnnnnnnnnnnnnnnnnnnnnnnnnnnnnnnnnnnnnnnnnnnnnnnnnnnnnnnnnnnnnnnnnnnnnnnnnnnnnnnnnnnnnnnnnnnnnnnnnnnnnnnnnnnnnnnnnnnnnnnnnnnnnnnnnnnnnnnnnnnnnnnnnnnnnnnnnnnnnnnnnnnnnnnnnnnnnnnnnnnnnnnnnnnnnnnnnnnnnnnnnnnnnnnnnnnnnnnnnnnnnnnnnnnnnnnnnnnnnnnnnnnnnnnnnnnnnnnnnnnnnnnnnnnnnnnnnnnnnnnnnnnnnnnnnnnnnnnnnnnnnnnnnnnnnnnnnnnnnnnnnnnnnnnnnnnnnnnnnnnnnnnnnnnnnnnnnnnnnnnnnnnnnnnnnnnnnnnnnnnnnnnnnnnnnnnnnnnnnnnnnnnnnnnnnnnnnnnnnnnnnnnnnnnnnnnnnnnnnnnnnnnnnnnnnnnnnnnnnnnnnnnnnnnnnnnnnnnnnnnnnnnnnnnnnnnnnnnnnnnnnnnnnnnnnnnnnnnnnnnnnnnnnnnnnnnnnnnnnnnnnnnnnnnnnnnnnnnnnnnnnnnnnnnnnnnnnnnnnnnnnnnnnnnnnnnnnnnnnnnnnnnnnnnnnnnnnnnnnnnnnnnnnnnnnnnnnnnnnnnnnnnnnnnnnnnnnnnnnnnnnnnnnnnnnnnnnnnnnnnnnnnnnnnnnnnnnnnnnnnnnnnnnnnnnnnnnnnnnnnnnnnnnnnnnnnnnnnnnnnnnnnnnnnnnnnnnnnnnnnnnnnnnnnnnnnnnnnnnnnnnnnnnnnnnnnnnnnnnnnnnnnnnnnnnnnnnnnnnnnnnnnnnnnnnnnnnnnnnnnnnnnnnnnnnnnnnnnnnnnnnnnnnnnnnnnnnnnnnnnnnnnnnnnnnnnnnnnnnnnnnnnnnnnnnnnnnnnnnnnnnnnnnnnnnnnnnnnnnnnnnnnnnnnnnnnnnnnnnnnnnnnnnnnnnnnnnnnnnnnnnnnnnnnnnnnnnnnnnnnnnnnnnnnnnnnnnnnnnnnnnnnnnnnnnnnnnnnnnnnnnnnnnnnnnnnnnnnnnnnnnnnnnnnnnnnnnnnnnnnnnnnnnnnnnnnnnnnnnnnnnnnnnnnnnnnnnnnnnnnnnnnnnnnnnnnnnnnnnnnnnnnnnnnnnnnnnnnnnnnnnnnnnnnnnnnnnnnnnnnnnnnnnnnnnnnnnnnnnnnnnnnnnnnnnnnnnnnnnnnnnnnnnnnnnnnnnnnnnnnnnnnnnnnnnnnnnnnnnnnnnnnnnnnnnnnnnnnnnnnnnnnnnnnnnnnnnnnnnnnnnnnnnnnnnnnnnnnnnnnnnnnnnnnnnnnnnnnnnnnnnnnnnnnnnnnnnnnnnnnnnnnnnnnnnnnnnnnnnnnnnnnnnnnnnnnnnnnnnnnnnnnnnnnnnnnnnnnnnnnnnnnnnnnnnnnnnnnnnnnnnnnnnnnnnnnnnnnnnnnnnnnnnnnnnnnnnnnnnnnnnnnnnnnnnnnnnnnnnnnnnnnnnnnnnnnnnnnnnnnnnnnnnnnnnnnnnnnnnnnnnnnnnnnnnnnnnnnnnnnnnnnnnnnnnnnnnnnnnnnnnnnnnnnnnnnnnnnnnnnnnnnnnnnnnnnnnnnnnnnnnnnnnnnnnnnnnnnnnnnnnnnnnnnnnnnnnnnnnnnnnnnnnnnnnnnnnnnnnnnnnnnnnnnnnnnnnnnnnnnnnnnnnnnnnnnnnnnnnnnnnnnnnnnnnnnnnnnnnnnnnnnnnnnnnnnnnnnnnnnnnnnnnnnnnnnnnnnnnnnnnnnnnnnnnnnnnnnnnnnnnnnnnnnnnnnnnnnnnnnnnnnnnnnnnnnnnnnnnnnnnnnnnnnnnnnnnnnnnnnnnnnnnnnnnnnnnnnnnnnnnnnnnnnnnnnnnnnnnnnnnnnnnnnnnnnnnnnnnnnnnnnnnnnnnnnnnnnnnnnnnnnnnnnnnnnnnnnnnnnnnnnnnnnnnnnnnnnnnnnnnnnnnnnnnnnnnnnnnnnnnnnnnnnnnnnnnnnnnnnnnnnnnnnnnnnnnnnnnnnnnnnnnnnnnnnnnnnnnnnnnnnnnnnnnnnnnnnnnnnnnnnnnnnnnnnnnnnnnnnnnnnnnnnnnnnnnnnnnnnnnnnnnnnnnnnnnnnnnnnnnnnnnnnnnnnnnnnnnnnnnnnnnnnnnnnnnnnnnnnnnnnnnnnnnnnnnnnnnnnnnnnnnnnnnnnnnnnnnnnnnnnnnnnnnnnnnnnnnnnnnnnnnnnnnnnnnnnnnnnnnnnnnnnnnnnnnnnnnnnnnnnnnnnnnnnnnnnnnnnnnnnnnnnnnnnnnnnnnnnnnnnnnnnnnnnnnnnnnnnnnnnnnnnnnnnnnnnnnnnnnnnnnnnnnnnnnnnnnnnnnnnnnnnnnnnnnnnnnnnnnnnnnnnnnnnnnnnnnnnnnnnnnnnnnnnnnnnnnnnnnnnnnnnnnnnnnnnnnnnnnnnnnnnnnnnnnnnnnnnnnnnnnnnnnnnnnnnnnnnnnnnnnnnnnnnnnnnnnnnnnnnnnnnnnnnnnnnnnnnnnnnnnnnnnnnnnnnnnnnnnnnnnnnnnnnnnnnnnnnnnnnnnnnnnnnnnnnnnnnnnnnnnnnnnnnnnnnnnnnnnnnnnnnnnnnnnnnnnnnnnnnnnnnnnnnnnnnnnnnnnnnnnnnnnnnnnnnnnnnnnnnnnnnnnnnnnnnnnnnnnnnnnnnnnnnnnnnnnnnnnnnnnnnnnnnnnnnnnnnnnnnnnnnnnnnnnnnnnnnnnnnnnnnnnnnnnnnnnnnnnnnnnnnnnnnnnnnnnnnnnnnnnnnnnnnnnnnnnnnnnnnnnnnnnnnnnnnnnnnnnnnnnnnnnnnnnnnnnnnnnnnnnnnnnnnnnnnnnnnnnnnnnnnnnnnnnnnnnnnnnnnnnnnnnnnnnnnnnnnnnnnnnnnnnnnnnnnnnnnnnnnnnnnnnnnnnnnnnnnnnnnnnnnnnnnnnnnnnnnnnnnnnnnnnnnnnnnnnnnnnnnnnnnnnnnnnnnnnnnnnnnnnnnnnnnnnnnnnnnnnnnnnnnnnnnnnnnnnnnnnnnnnnnnnnnnnnnnnnnnnnnnnnnnnnnnnnnnnnnnnnnnnnnnnnnnnnnnnnnnnnnnnnnnnnnnnnnnnnnnnnnnnnnnnnnnnnnnnnnnnnnnnnnnnnnnnnnnnnnnnnnnnnnnnnnnnnnnnnnnnnnnnnnnnnnnnnnnnnnnnnnnnnnnnnnnnnnnnnnnnnnnnnnnnnnnnnnnnnnnnnnnnnnnnnnnnnnnnnnnnnnnnnnnnnnnnnnnnnnnnnnnnnnnnnnnnnnnnnnnnnnnnnnnnnnnnnnnnnnnnnnnnnnnnnnnnnnnnnnnnnnnnnnnnnnnnnnnnnnnnnnnnnnnnnnnnnnnnnnnnnnnnnnnnnnnnnnnnnnnnnnnnnnnnnnnnnnnnnnnnnnnnnnnnnnnnnnnnnnnnnnnnnnnnnnnnnnnnnnnnnnnnnnnnnnnnnnnnnnnnnnnnnnnnnnnnnnnnnnnnnnnnnnnnnnnnnnnnnnnnnnnnnnnnnnnnnnnnnnnnnnnnnnnnnnnnnnnnnnnnnnnnnnnnnnnnnnnnnnnnnnnnnnnnnnnnnnnnnnnnnnnnnnnnnnnnnnnnnnnnnnnnnnnnnnnnnnnnnnnnnnnnnnnnnnnnnnnnnnnnnnnnnnnnnnnnnnnnnnnnnnnnnnnnnnnnnnnnnnnnnnnnnnnnnnnnnnnnnnnnnnnnnnnnnnnnnnnnnnnnnnnnnnnnnnnnnnnnnnnnnnnnnnnnnnnnnnnnnnnnnnnnnnnnnnnnnnnnnnnnnnnnnnnnnnnnnnnnnnnnnnnnnnnnnnnnnnnnnnnnnnnnnnnnnnnnnnnnnnnnnnnnnnnnnnnnnnnnnnnnnnnnnnnnnnnnnnnnnnnnnnnnnnnnnnnnnnnnnnnnnnnnnnnnnnnnnnnnnnnnnnnnnnnnnnnnnnnnnnnnnnnnnnnnnnnnnnnnnnnnnnnnnnnnnnnnnnnnnnnnnnnnnnnnnnnnnnnnnnnnnnnnnnnnnnnnnnnnnnnnnnnnnnnnnnnnnnnnnnnnnnnnnnnnnnnnnnnnnnnnnnnnnnnnnnnnnnnnnnnnnnnnnnnnnnnnnnnnnnnnnnnnnnnnnnnnnnnnnnnnnnnnnnnnnnnnnnnnnnnnnnnnnnnnnnnnnnnnnnnnnnnnnnnnnnnnnnnnnnnnnnnnnnnnnnnnnnnnnnnnnnnnnnnnnnnnnnnnnnnnnnnnnnnnnnnnnnnnnnnnnnnnnnnnnnnnnnnnnnnnnnnnnnnnnnnnnnnnnnnnnnnnnnnnnnnnnnnnnnnnnnnnnnnnnnnnnnnnnnnnnnnnnnnnnnnnnnnnnnnnnnnnnnnnnnnnnnnnnnnnnnnnnnnnnnnnnnnnnnnnnnnnnnnnnnnnnnnnnnnnnnnnnnnnnnnnnnnnnnnnnnnnnnnnnnnnnnnnnnnnnnnnnnnnnnnnnnnnnnnnnnnnnnnnnnnnnnnnnnnnnnnnnnnnnnnnnnnnnnnnnnnnnnnnnnnnnnnnnnnnnnnnnnnnnnnnnnnnnnnnnnnnnnnnnnnnnnnnnnnnnnnnnnnnnnnnnnnnnnnnnnnnnnnnnnnnnnnnnnnnnnnnnnnnnnnnnnnnnnnnnnnnnnnnnnnnnnnnnnnnnnnnnnnnnnnnnnnnnnnnnnnnnnnnnnnnnnnnnnnnnnnnnnnnnnnnnnnnnnnnnnnnnnnnnnnnnnnnnnnnnnnnnnnnnnnnnnnnnnnnnnnnnnnnnnnnnnnnnnnnnnnnnnnnnnnnnnnnnnnnnnnnnnnnnnnnnnnnnnnnnnnnnnnnnnnnnnnnnnnnnnnnnnnnnnnnnnnnnnnnnnnnnnnnnnnnnnnnnnnnnnnnnnnnnnnnnnnnnnnnnnnnnnnnnnnnnnnnnnnnnnnnnnnnnnnnnnnnnnnnnnnnnnnnnnnnnnnnnnnnnnnnnnnnnnnnnnnnnnnnnnnnnnnnnnnnnnnnnnnnnnnnnnnnnnnnnnnnnnnnnnnnnnnnnnnnnnnnnnnnnnnnnnnnnnnnnnnnnnnnnnnnnnnnnnnnnnnnnnnnnnnnnnnnnnnnnnnnnnnnnnnnnnnnnnnnnnnnnnnnnnnnnnnnnnnnnnnnnnnnnnnnnnnnnnnnnnnnnnnnnnnnnnnnnnnnnnnnnnnnnnnnnnnnnnnnnnnnnnnnnnnnnnnnnnnnnnnnnnnnnnnnnnnnnnnnnnnnnnnnnnnnnnnnnnnnnnnnnnnnnnnnnnnnnnnnnnnnnnnnnnnnnnnnnnnnnnnnnnnnnnnnnnnnnnnnnnnnnnnnnnnnnnnnnnnnnnnnnnnnnnnnnnnnnnnnnnnnnnnnnnnnnnnnnnnnnnnnnnnnnnnnnnnnnnnnnnnnnnnnnnnnnnnnnnnnnnnnnnnnnnnnnnnnnnnnnnnnnnnnnnnnnnnnnnnnnnnnnnnnnnnnnnnnnnnnnnnnnnnnnnnnnnnnnnnnnnnnnnnnnnnnnnnnnnnnnnnnnnnnnnnnnnnnnnnnnnnnnnnnnnnnnnnnnnnnnnnnnnnnnnnnnnnnnnnnnnnnnnnnnnnnnnnnnnnnnnnnnnnnnnnnnnnnnnnnnnnnnnnnnnnnnnnnnnnnnnnnnnnnnnnnnnnnnnnnnnnnnnnnnnnnnnnnnnnnnnnnnnnnnnnnnnnnnnnnnnnnnnnnnnnnnnnnnnnnnnnnnnnnnnnnnnnnnnnnnnnnnnnnnnnnnnnnnnnnnnnnnnnnnnnnnnnnnnnnnnnnnnnnnnnnnnnnnnnnnnnnnnnnnnnnnnnnnnnnnnnnnnnnnnnnnnnnnnnnnnnnnnnnnnnnnnnnnnnnnnnnnnnnnnnnnnnnnnnnnnnnnnnnnnnnnnnnnnnnnnnnnnnnnnnnnnnnnnnnnnnnnnnnnnnnnnnnnnnnnnnnnnnnnnnnnnnnnnnnnnnnnnnnnnnnnnnnnnnnnnnnnnnnnnnnnnnnnnnnnnnnnnnnnnnnnnnnnnnnnnnnnnnnnnnnnnnnnnnnnnnnnnnnnnnnnnnnnnnnnnnnnnnnnnnnnnnnnnnnnnnnnnnnnnnnnnnnnnnnnnnnnnnnnnnnnnnnnnnnnnnnnnnnnnnnnnnnnnnnnnnnnnnnnnnnnnnnnnnnnnnnnnnnnnnnnnnnnnnnnnnnnnnnnnnnnnnnnnnnnnnnnnnnnnnnnnnnnnnnnnnnnnnnnnnnnnnnnnnnnnnnnnnnnnnnnnnnnnnnnnnnnnnnnnnnnnnnnnnnnnnnnnnnnnnnnnnnnnnnnnnnnnnnnnnnnnnnnnnnnnnnnnnnnnnnnnnnnnnnnnnnnnnnnnnnnnnnnnnnnnnnnnnnnnnnnnnnnnnnnnnnnnnnnnnnnnnnnnnnnnnnnnnnnnnnnnnnnnnnnnnnnnnnnnnnnnnnnnnnnnnnnnnnnnnnnnnnnnnnnnnnnnnnnnnnnnnnnnnnnnnnnnnnnnnnnnnnnnnnnnnnnnnnnnnnnnnnnnnnnnnnnnnnnnnnnnnnnnnnnnnnnnnnnnnnnnnnnnnnnnnnnnnnnnnnnnnnnnnnnnnnnnnnnnnnnnnnnnnnnnnnnnnnnnnnnnnnnnnnnnnnnnnnnnnnnnnnnnnnnnnnnnnnnnnnnnnnnnnnnnnnnnnnnnnnnnnnnnnnnnnnnnnnnnnnnnnnnnnnnnnnnnnnnnnnnnnnnnnnnnnnnnnnnnnnnnnnnnnnnnnnnnnnnnnnnnnnnnnnnnnnnnnnnnnnnnnnnnnnnnnnnnnnnnnnnnnnnnnnnnnnnnnnnnnnnnnnnnnnnnnnnnnnnnnnnnnnnnnnnnnnnnnnnnnnnnnnnnnnnnnnnnnnnnnnnnnnnnnnnnnnnnnnnnnnnnnnnnnnnnnnnnnnnnnnnnnnnnnnnnnnnnnnnnnnnnnnnnnnnnnnnnnnnnnnnnnnnnnnnnnnnnnnnnnnnnnnnnnnnnnnnnnnnnnnnnnnnnnnnnnnnnnnnnnnnnnnnnnnnnnnnnnnnnnnnnnnnnnnnnnnnnnnnnnnnnnnnnnnnnnnnnnnnnnnnnnnnnnnnnnnnnnnnnnnnnnnnnnnnnnnnnnnnnnnnnnnnnnnnnnnnnnnnnnnnnnnnnnnnnnnnnnnnnnnnnnnnnnnnnnnnnnnnnnnnnnnnnnnnnnnnnnnnnnnnnnnnnnnnnnnnnnnnnnnnnnnnnnnnnnnnnnnnnnnnnnnnnnnnnnnnnnnnnnnnnnnnnnnnnnnnnnnnnnnnnnnnnnnnnnnnnnnnnnnnnnnnnnnnnnnnnnnnnnnnnnnnnnnnnnnnnnnnnnnnnnnnnnnnnnnnnnnnnnnnnnnnnnnnnnnnnnnnnnnnnnnnnnnnnnnnnnnnnnnnnnnnnnnnnnnnnnnnnnnnnnnnnnnnnnnnnnnnnnnnnnnnnnnnnnnnnnnnnnnnnnnnnnnnnnnnnnnnnnnnnnnnnnnnnnnnnnnnnnnnnnnnnnnnnnnnnnnnnnnnnnnnnnnnnnnnnnnnnnnnnnnnnnnnnnnnnnnnnnnnnnnnnnnnnnnnnnnnnnnnnnnnnnnnnnnnnnnnnnnnnnnnnnnnnnnnnnnnnnnnnnnnnnnnnnnnnnnnnnnnnnnnnnnnnnnnnnnnnnnnnnnnnnnnnnnnnnnnnnnnnnnnnnnnnnnnnnnnnnnnnnnnnnnnnnnnnnnnnnnnnnnnnnnnnnnnnnnnnnnnnnnnnnnnnnnnnnnnnnnnnnnnnnnnnnnnnnnnnnnnnnnnnnnnnnnnnnnnnnnnnnnnnnnnnnnnnnnnnnnnnnnnnnnnnnnnnnnnnnnnnnnnnnnnnnnnnnnnnnnnnnnnnnnnnnnnnnnnnnnnnnnnnnnnnnnnnnnnnnnnnnnnnnnnnnnnnnnnnnnnnnnnnnnnnnnnnnnnnnnnnnnnnnnnnnnnnnnnnnnnnnnnnnnnnnnnnnnnnnnnnnnnnnnnnnnnnnnnnnnnnnnnnnnnnnnnnnnnnnnnnnnnnnnnnnnnnnnnnnnnnnnnnnnnnnnnnnnnnnnnnnnnnnnnnnnnnnnnnnnnnnnnnnnnnnnnnnnnnnnnnnnnnnnnnnnnnnnnnnnnnnnnnnnnnnnnnnnnnnnnnnnnnnnnnnnnnnnnnnnnnnnnnnnnnnnnnnnnnnnnnnnnnnnnnnnnnnnnnnnnnnnnnnnnnnnnnnnnnnnnnnnnnnnnnnnnnnnnnnnnnnnnnnnnnnnnnnnnnnnnnnnnnnnnnnnnnnnnnnnnnnnnnnnnnnnnnnnnnnnnnnnnnnnnnnnnnnnnnnnnnnnnnnnnnnnnnnnnnnnnnnnnnnnnnnnnnnnnnnnnnnnnnnnnnnnnnnnnnnnnnnnnnnnnnnnnnnnnnnnnnnnnnnnnnnnnnnnnnnnnnnnnnnnnnnnnnnnnnnnnnnnnnnnnnnnnnnnnnnnnnnnnnnnnnnnnnnnnnnnnnnnnnnnnnnnnnnnnnnnnnnnnnnnnnnnnnnnnnnnnnnnnnnnnnnnnnnnnnnnnnnnnnnnnnnnnnnnnnnnnnnnnnnnnnnnnnnnnnnnnnnnnnnnnnnnnnnnnnnnnnnnnnnnnnnnnnnnnnnnnnnnnnnnnnnnnnnnnnnnnnnnnnnnnnnnnnnnnnnnnnnnnnnnnnnnnnnnnnnnnnnnnnnnnnnnnnnnnnnnnnnnnnnnnnnnnnnnnnnnnnnnnnnnnnnnnnnnnnnnnnnnnnnnnnnnnnnnnnnnnnnnnnnnnnnnnnnnnnnnnnnnnnnnnnnnnnnnnnnnnnnnnnnnnnnnnnnnnnnnnnnnnnnnnnnnnnnnnnnnnnnnnnnnnnnnnnnnnnnnnnnnnnnnnnnnnnnnnnnnnnnnnnnnnnnnnnnnnnnnnnnnnnnnnnnnnnnnnnnnnnnnnnnnnnnnnnnnnnnnnnnnnnnnnnnnnnnnnnnnnnnnnnnnnnnnnnnnnnnnnnnnnnnnnnnnnnnnnnnnnnnnnnnnnnnnnnnnnnnnnnnnnnnnnnnnnnnnnnnnnnnnnnnnnnnnnnnnnnnnnnnnnnnnnnnnnnnnnnnnnnnnnnnnnnnnnnnnnnnnnnnnnnnnnnnnnnnnnnnnnnnnnnnnnnnnnnnnnnnnnnnnnnnnnnnnnnnnnnnnnnnnnnnnnnnnnnnnnnnnnnnnnnnnnnnnnnnnnnnnnnnnnnnnnnnnnnnnnnnnnnnnnnnnnnnnnnnnnnnnnnnnnnnnnnnnnnnnnnnnnnnnnnnnnnnnnnnnnnnnnnnnnnnnnnnnnnnnnnnnnnnnnnnnnnnnnnnnnnnnnnnnnnnnnnnnnnnnnnnnnnnnnnnnnnnnnnnnnnnnnnnnnnnnnnnnnnnnnnnnnnnnnnnnnnnnnnnnnnnnnnnnnnnnnnnnnnnnnnnnnnnnnnnnnnnnnnnnnnnnnnnnnnnnnnnnnnnnnnnnnnnnnnnnnnnnnnnnnnnnnnnnnnnnnnnnnnnnnnnnnnnnnnnnnnnnnnnnnnnnnnnnnnnnnnnnnnnnnnnnnnnnnnnnnnnnnnnnnnnnnnnnnnnnnnnnnnnnnnnnnnnnnnnnnnnnnnnnnnnnnnnnnnnnnnnnnnnnnnnnnnnnnnnnnnnnnnnnnnnnnnnnnnnnnnnnnnnnnnnnnnnnnnnnnnnnnnnnnnnnnnnnnnnnnnnnnnnnnnnnnnnnnnnnnnnnnnnnnnnnnnnnnnnnnnnnnnnnnnnnnnnnnnnnnnnnnnnnnnnnnnnnnnnnnnnnnnnnnnnnnnnnnnnnnnnnnnnnnnnnnnnnnnnnnnnnnnnnnnnnnnnnnnnnnnnnnnnnnnnnnnnnnnnnnnnnnnnnnnnnnnnnnnnnnnnnnnnnnnnnnnnnnnnnnnnnnnnnnnnnnnnnnnnnnnnnnnnnnnnnnnnnnnnnnnnnnnnnnnnnnnnnnnnnnnnnnnnnnnnnnnnnnnnnnnnnnnnnnnnnnnnnnnnnnnnnnnnnnnnnnnnnnnnnnnnnnnnnnnnnnnnnnnnnnnnnnnnnnnnnnnnnnnnnnnnnnnnnnnnnnnnnnnnnnnnnnnnnnnnnnnnnnnnnnnnnnnnnnnnnnnnnnnnnnnnnnnnnnnnnnnnnnnnnnnnnnnnnnnnnnnnnnnnnnnnnnnnnnnnnnnnnnnnnnnnnnnnnnnnnnnnnnnnnnnnnnnnnnnnnnnnnnnnnnnnnnnnnnnnnnnnnnnnnnnnnnnnnnnnnnnnnnnnnnnnnnnnnnnnnnnnnnnnnnnnnnnnnnnnnnnnnnnnnnnnnnnnnnnnnnnnnnnnnnnnnnnnnnnnnnnnnnnnnnnnnnnnnnnnnnnnnnnnnnnnnnnnnnnnnnnnnnnnnnnnnnnnnnnnnnnnnnnnnnnnnnnnnnnnnnnnnnnnnnnnnnnnnnnnnnnnnnnnnnnnnnnnnnnnnnnnnnnnnnnnnnnnnnnnnnnnnnnnnnnnnnnnnnnnnnnnnnnnnnnnnnnnnnnnnnnnnnnnnnnnnnnnnnnnnnnnnnnnnnnnnnnnnnnnnnnnnnnnnnnnnnnnnnnnnnnnnnnnnnnnnnnnnnnnnnnnnnnnnnnnnnnnnnnnnnnnnnnnnnnnnnnnnnnnnnnnnnnnnnnnnnnnnnnnnnnnnnnnnnnnnnnnnnnnnnnnnnnnnnnnnnnnnnnnnnnnnnnnnnnnnnnnnnnnnnnnnnnnnnnnnnnnnnnnnnnnnnnnnnnnnnnnnnnnnnnnnnnnnnnnnnnnnnnnnnnnnnnnnnnnnnnnnnnnnnnnnnnnnnnnnnnnnnnnnnnnnnnnnnnnnnnnnnnnnnnnnnnnnnnnnnnnnnnnnnnnnnnnnnnnnnnnnnnnnnnnnnnnnnnnnnnnnnnnnnnnnnnnnnnnnnnnnnnnnnnnnnnnnnnnnnnnnnnnnnnnnnnnnnnnnnnnnnnnnnnnnnnnnnnnnnnnnnnnnnnnnnnnnnnnnnnnnnnnnnnnnnnnnnnnnnnnnnnnnnnnnnnnnnnnnnnnnnnnnnnnnnnnnnnnnnnnnnnnnnnnnnnnnnnnnnnnnnnnnnnnnnnnnnnnnnnnnnnnnnnnnnnnnnnnnnnnnnnnnnnnnnnnnnnnnnnnnnnnnnnnnnnnnnnnnnnnnnnnnnnnnnnnnnnnnnnnnnnnnnnnnnnnnnnnnnnnnnnnnnnnnnnnnnnnnnnnnnnnnnnnnnnnnnnnnnnnnnnnnnnnnnnnnnnnnnnnnnnnnnnnnnnnnnnnnnnnnnnnnnnnnnnnnnnnnnnnnnnnnnnnnnnnnnnnnnnnnnnnnnnnnnnnnnnnnnnnnnnnnnnnnnnnnnnnnnnnnnnnnnnnnnnnnnnnnnnnnnnnnnnnnnnnnnnnnnnnnnnnnnnnnnnnnnnnnnnnnnnnnnnnnnnnnnnnnnnnnnnnnnnnnnnnnnnnnnnnnnnnnnnnnnnnnnnnnnnnnnnnnnnnnnnnnnnnnnnnnnnnnnnnnnnnnnnnnnnnnnnnnnnnnnnnnnnnnnnnnnnnnnnnnnnnnnnnnnnnnnnnnnnnnnnnnnnnnnnnnnnnnnnnnnnnnnnnnnnnnnnnnnnnnnnnnnnnnnnnnnnnnnnnnnnnnnnnnnnnnnnnnnnnnnnnnnnnnnnnnnnnnnnnnnnnnnnnnnnnnnnnnnnnnnnnnnnnnnnnnnnnnnnnnnnnnnnnnnnnnnnnnnnnnnnnnnnnnnnnnnnnnnnnnnnnnnnnnnnnnnnnnnnnnnnnnnnnnnnnnnnnnnnnnnnnnnnnnnnnnnnnnnnnnnnnnnnnnnnnnnnnnnnnnnnnnnnnnnnnnnnnnnnnnnnnnnnnnnnnnnnnnnnnnnnnnnnnnnnnnnnnnnnnnnnnnnnnnnnnnnnnnnnnnnnnnnnnnnnnnnnnnnnnnnnnnnnnnnnnnnnnnnnnnnnnnnnnnnnnnnnnnnnnnnnnnnnnnnnnnnnnnnnnnnnnnnnnnnnnnnnnnnnnnnnnnnnnnnnnnnnnnnnnnnnnnnnnnnnnnnnnnnnnnnnnnnnnnnnnnnnnnnnnnnnnnnnnnnnnnnnnnnnnnnnnnnnnnnnnnnnnnnnnnnnnnnnnnnnnnnnnnnnnnnnnnnnnnnnnnnnnnnnnnnnnnnnnnnnnnnnnnnnnnnnnnnnnnnnnnnnnnnnnnnnnnnnnnnnnnnnnnnnnnnnnnnnnnnnnnnnnnnnnnnnnnnnnnnnnnnnnnnnnnnnnnnnnnnnnnnnnnnnnnnnnnnnnnnnnnnnnnnnnnnnnnnnnnnnnnnnnnnnnnnnnnnnnnnnnnnnnnnnnnnnnnnnnnnnnnnnnnnnnnnnnnnnnnnnnnnnnnnnnnnnnnnnnnnnnnnnnnnnnnnnnnnnnnnnnnnnnnnnnnnnnnnnnnnnnnnnnnnnnnnnnnnnnnnnnnnnnnnnnnnnnnnnnnnnnnnnnnnnnnnnnnnnnnnnnnnnnnnnnnnnnnnnnnnnnnnnnnnnnnnnnnnnnnnnnnnnnnnnnnnnnnnnnnnnnnnnnnnnnnnnnnnnnnnnnnnnnnnnnnnnnnnnnnnnnnnnnnnnnnnnnnnnnnnnnnnnnnnnnnnnnnnnnnnnnnnnnnnnnnnnnnnnnnnnnnnnnnnnnnnnnnnnnnnnnnnnnnnnnnnnnnnnnnnnnnnnnnnnnnnnnnnnnnnnnnnnnnnnnnnnnnnnnnnnnnnnnnnnnnnnnnnnnnnnnnnnnnnnnnnnnnnnnnnnnnnnnnnnnnnnnnnnnnnnnnnnnnnnnnnnnnnnnnnnnnnnnnnnnnnnnnnnnnnnnnnnnnnnnnnnnnnnnnnnnnnnnnnnnnnnnnnnnnnnnnnnnnnnnnnnnnnnnnnnnnnnnnnnnnnnnnnnnnnnnnnnnnnnnnnnnnnnnnnnnnnnnnnnnnnnnnnnnnnnnnnnnnnnnnnnnnnnnnnnnnnnnnnnnnnnnnnnnnnnnnnnnnnnnnnnnnnnnnnnnnnnnnnnnnnnnnnnnnnnnnnnnnnnnnnnnnnnnnnnnnnnnnnnnnnnnnnnnnnnnnnnnnnnnnnnnnnnnnnnnnnnnnnnnnnnnnnnnnnnnnnnnnnnnnnnnnnnnnnnnnnnnnnnnnnnnnnnnnnnnnnnnnnnnnnnnnnnnnnnnnnnnnnnnnnnnnnnnnnnnnnnnnnnnnnnnnnnnnnnnnnnnnnnnnnnnnnnnnnnnnnnnnnnnnnnnnnnnnnnnnnnnnnnnnnnnnnnnnnnnnnnnnnnnnnnnnnnnnnnnnnnnnnnnnnnnnnnnnnnnnnnnnnnnnnnnnnnnnnnnnnnnnnnnnnnnnnnnnnnnnnnnnnnnnnnnnnnnnnnnnnnnnnnnnnnnnnnnnnnnnnnnnnnnnnnnnnnnnnnnnnnnnnnnnnnnnnnnnnnnnnnnnnnnnnnnnnnnnnnnnnnnnnnnnnnnnnnnnnnnnnnnnnnnnnnnnnnnnnnnnnnnnnnnnnnnnnnnnnnnnnnnnnnnnnnnnnnnnnnnnnnnnnnnnnnnnnnnnnnnnnnnnnnnnnnnnnnnnnnnnnnnnnnnnnnnnnnnnnnnnnnnnnnnnnnnnnnnnnnnnnnnnnnnnnnnnnnnnnnnnnnnnnnnnnnnnnnnnnnnnnnnnnnnnnnnnnnnnnnnnnnnnnnnnnnnnnnnnnnnnnnnnnnnnnnnnnnnnnnnnnnnnnnnnnnnnnnnnnnnnnnnnnnnnnnnnnnnnnnnnnnnnnnnnnnnnnnnnnnnnnnnnnnnnnnnnnnnnnnnnnnnnnnnnnnnnnnnnnnnnnnnnnnnnnnnnnnnnnnnnnnnnnnnnnnnnnnnnnnnnnnnnnnnnnnnnnnnnnnnnnnnnnnnnnnnnnnnnnnnnnnnnnnnnnnnnnnnnnnnnnnnnnnnnnnnnnnnnnnnnnnnnnnnnnnnnnnnnnnnnnnnnnnnnnnnnnnnnnnnnnnnnnnnnnnnnnnnnnnnnnnnnnnnnnnnnnnnnnnnnnnnnnnnnnnnnnnnnnnnnnnnnnnnnnnnnnnnnnnnnnnnnnnnnnnnnnnnnnnnnnnnnnnnnnnnnnnnnnnnnnnnnnnnnnnnnnnnnnnnnnnnnnnnnnnnnnnnnnnnnnnnnnnnnnnnnnnnnnnnnnnnnnnnnnnnnnnnnnnnnnnnnnnnnnnnnnnnnnnnnnnnnnnnnnnnnnnnnnnnnnnnnnnnnnnnnnnnnnnnnnnnnnnnnnnnnnnnnnnnnnnnnnnnnnnnnnnnnnnnnnnnnnnnnnnnnnnnnnnnnnnnnnnnnnnnnnnnnnnnnnnnnnnnnnnnnnnnnnnnnnnnnnnnnnnnnnnnnnnnnnnnnnnnnnnnnnnnnnnnnnnnnnnnnnnnnnnnnnnnnnnnnnnnnnnnnnnnnnnnnnnnnnnnnnnnnnnnnnnnnnnnnnnnnnnnnnnnnnnnnnnnnnnnnnnnnnnnnnnnnnnnnnnnnnnnnnnnnnnnnnnnnnnnnnnnnnnnnnnnnnnnnnnnnnnnnnnnnnnnnnnnnnnnnnnnnnnnnnnnnnnnnnnnnnnnnnnnnnnnnnnnnnnnnnnnnnnnnnnnnnnnnnnnnnnnnnnnnnnnnnnnnnnnnnnnnnnnnnnnnnnnnnnnnnnnnnnnnnnnnnnnnnnnnnnnnnnnnnnnnnnnnnnnnnnnnnnnnnnnnnnnnnnnnnnnnnnnnnnnnnnnnnnnnnnnnnnnnnnnnnnnnnnnnnnnnnnnnnnnnnnnnnnnnnnnnnnnnnnnnnnnnnnnnnnnnnnnnnnnnnnnnnnnnnnnnnnnnnnnnnnnnnnnnnnnnnnnnnnnnnnnnnnnnnnnnnnnnnnnnnnnnnnnnnnnnnnnnnnnnnnnnnnnnnnnnnnnnnnnnnnnnnnnnnnnnnnnnnnnnnnnnnnnnnnnnnnnnnnnnnnnnnnnnnnnnnnnnnnnnnnnnnnnnnnnnnnnnnnnnnnnnnnnnnnnnnnnnnnnnnnnnnnnnnnnnnnnnnnnnnnnnnnnnnnnnnnnnnnnnnnnnnnnnnnnnnnnnnnnnnnnnnnnnnnnnnnnnnnnnnnnnnnnnnnnnnnnnnnnnnnnnnnnnnnnnnnnnnnnnnnnnnnnnnnnnnnnnnnnnnnnnnnnnnnnnnnnnnnnnnnnnnnnnnnnnnnnnnnnnnnnnnnnnnnnnnnnnnnnnnnnnnnnnnnnnnnnnnnnnnnnnnnnnnnnnnnnnnnnnnnnnnnnnnnnnnnnnnnnnnnnnnnnnnnnnnnnnnnnnnnnnnnnnnnnnnnnnnnnnnnnnnnnnnnnnnnnnnnnnnnnnnnnnnnnnnnnnnnnnnnnnnnnnnnnnnnnnnnnnnnnnnnnnnnnnnnnnnnnnnnnnnnnnnnnnnnnnnnnnnnnnnnnnnnnnnnnnnnnnnnnnnnnnnnnnnnnnnnnnnnnnnnnnnnnnnnnnnnnnnnnnnnnnnnnnnnnnnnnnnnnnnnnnnnnnnnnnnnnnnnnnnnnnnnnnnnnnnnnnnnnnnnnnnnnnnnnnnnnnnnnnnnnnnnnnnnnnnnnnnnnnnnnnnnnnnnnnnnnnnnnnnnnnnnnnnnnnnnnnnnnnnnnnnnnnnnnnnnnnnnnnnnnnnnnnnnnnnnnnnnnnnnnnnnnnnnnnnnnnnnnnnnnnnnnnnnnnnnnnnnnnnnnnnnnnnnnnnnnnnnnnnnnnnnnnnnnnnnnnnnnnnnnnnnnnnnnnnnnnnnnnnnnnnnnnnnnnnnnnnnnnnnnnnnnnnnnnnnnnnnnnnnnnnnnnnnnnnnnnnnnnnnnnnnnnnnnnnnnnnnnnnnnnnnnnnnnnnnnnnnnnnnnnnnnnnnnnnnnnnnnnnnnnnnnnnnnnnnnnnnnnnnnnnnnnnnnnnnnnnnnnnnnnnnnnnnnnnnnnnnnnnnnnnnnnnnnnnnnnnnnnnnnnnnnnnnnnnnnnnnnnnnnnnnnnnnnnnnnnnnnnnnnnnnnnnnnnnnnnnnnnnnnnnnnnnnnnnnnnnnnnnnnnnnnnnnnnnnnnnnnnnnnnnnnnnnnnnnnnnnnnnnnnnnnnnnnnnnnnnnnnnnnnnnnnnnnnnnnnnnnnnnnnnnnnnnnnnnnnnnnnnnnnnnnnnnnnnnnnnnnnnnnnnnnnnnnnnnnnnnnnnnnnnnnnnnnnnnnnnnnnnnnnnnnnnnnnnnnnnnnnnnnnnnnnnnnnnnnnnnnnnnnnnnnnnnnnnnnnnnnnnnnnnnnnnnnnnnnnnnnnnnnnnnnnnnnnnnnnnnnnnnnnnnnnnnnnnnnnnnnnnnnnnnnnnnnnnnnnnnnnnnnnnnnnnnnnnnnnnnnnnnnnnnnnnnnnnnnnnnnnnnnnnnnnnnnnnnnnnnnnnnnnnnnnnnnnnnnnnnnnnnnnnnnnnnnnnnnnnnnnnnnnnnnnnnnnnnnnnnnnnnnnnnnnnnnnnnnnnnnnnnnnnnnnnnnnnnnnnnnnnnnnnnnnnnnnnnnnnnnnnnnnnnnnnnnnnnnnnnnnnnnnnnnnnnnnnnnnnnnnnnnnnnnnnnnnnnnnnnnnnnnnnnnnnnnnnnnnnnnnnnnnnnnnnnnnnnnnnnnnnnnnnnnnnnnnnnnnnnnnnnnnnnnnnnnnnnnnnnnnnnnnnnnnnnnnnnnnnnnnnnnnnnnnnnnnnnnnnnnnnnnnnnnnnnnnnnnnnnnnnnnnnnnnnnnnnnnnnnnnnnnnnnnnnnnnnnnnnnnnnnnnnnnnnnnnnnnnnnnnnnnnnnnnnnnnnnnnnnnnnnnnnnnnnnnnnnnnnnnnnnnnnnnnnnnnnnnnnnnnnnnnnnnnnnnnnnnnnnnnnnnnnnnnnnnnnnnnnnnnnnnnnnnnnnnnnnnnnnnnnnnnnnnnnnnnnnnnnnnnnnnnnnnnnnnnnnnnnnnnnnnnnnnnnnnnnnnnnnnnnnnnnnnnnnnnnnnnnnnnnnnnnnnnnnnnnnnnnnnnnnnnnnnnnnnnnnnnnnnnnnnnnnnnnnnnnnnnnnnnnnnnnnnnnnnnnnnnnnnnnnnnnnnnnnnnnnnnnnnnnnnnnnnnnnnnnnnnnnnnnnnnnnnnnnnnnnnnnnnnnnnnnnnnnnnnnnnnnnnnnnnnnnnnnnnnnnnnnnnnnnnnnnnnnnnnnnnnnnnnnnnnnnnnnnnnnnnnnnnnnnnnnnnnnnnnnnnnnnnnnnnnnnnnnnnnnnnnnnnnnnnnnnnnnnnnnnnnnnnnnnnnnnnnnnnnnnnnnnnnnnnnnnnnnnnnnnnnnnnnnnnnnnnnnnnnnnnnnnnnnnnnnnnnnnnnnnnnnnnnnnnnnnnnnnnnnnnnnnnnnnnnnnnnnnnnnnnnnnnnnnnnnnnnnnnnnnnnnnnnnnnnnnnnnnnnnnnnnnnnnnnnnnnnnnnnnnnnnnnnnnnnnnnnnnnnnnnnnnnnnnnnnnnnnnnnnnnnnnnnnnnnnnnnnnnnnnnnnnnnnnnnnnnnnnnnnnnnnnnnnnnnnnnnnnnnnnnnnnnnnnnnnnnnnnnnnnnnnnnnnnnnnnnnnnnnnnnnnnnnnnnnnnnnnnnnnnnnnnnnnnnnnnnnnnnnnnnnnnnnnnnnnnnnnnnnnnnnnnnnnnnnnnnnnnnnnnnnnnnnnnnnnnnnnnnnnnnnnnnnnnnnnnnnnnnnnnnnnnnnnnnnnnnnnnnnnnnnnnnnnnnnnnnnnnnnnnnnnnnnnnnnnnnnnnnnnnnnnnnnnnnnnnnnnnnnnnnnnnnnnnnnnnnnnnnnnnnnnnnnnnnnnnnnnnnnnnnnnnnnnnnnnnnnnnnnnnnnnnnnnnnnnnnnnnnnnnnnnnnnnnnnnnnnnnnnnnnnnnnnnnnnnnnnnnnnnnnnnnnnnnnnnnnnnnnnnnnnnnnnnnnnnnnnnnnnnnnnnnnnnnnnnnnnnnnnnnnnnnnnnnnnnnnnnnnnnnnnnnnnnnnnnnnnnnnnnnnnnnnnnnnnnnnnnnnnnnnnnnnnnnnnnnnnnnnnnnnnnnnnnnnnnnnnnnnnnnnnnnnnnnnnnnnnnnnnnnnnnnnnnnnnnnnnnnnnnnnnnnnnnnnnnnnnnnnnnnnnnnnnnnnnnnnnnnnnnnnnnnnnnnnnnnnnnnnnnnnnnnnnnnnnnnnnnnnnnnnnnnnnnnnnnnnnnnnnnnnnnnnnnnnnnnnnnnnnnnnnnnnnnnnnnnnnnnnnnnnnnnnnnnnnnnnnnnnnnnnnnnnnnnnnnnnnnnnnnnnnnnnnnnnnnnnnnnnnnnnnnnnnnnnnnnnnnnnnnnnnnnnnnnnnnnnnnnnnnnnnnnnnnnnnnnnnnnnnnnnnnnnnnnnnnnnnnnnnnnnnnnnnnnnnnnnnnnnnnnnnnnnnnnnnnnnnnnnnnnnnnnnnnnnnnnnnnnnnnnnnnnnnnnnnnnnnnnnnnnnnnnnnnnnnnnnnnnnnnnnnnnnnnnnnnnnnnnnnnnnnnnnnnnnnnnnnnnnnnnnnnnnnnnnnnnnnnnnnnnnnnnnnnnnnnnnnnnnnnnnnnnnnnnnnnnnnnnnnnnnnnnnnnnnnnnnnnnnnnnnnnnnnnnnnnnnnnnnnnnnnnnnnnnnnnnnnnnnnnnnnnnnnnnnnnnnnnnnnnnnnnnnnnnnnnnnnnnnnnnnnnnnnnnnnnnnnnnnnnnnnnnnnnnnnnnnnnnnnnnnnnnnnnnnnnnnnnnnnnnnnnnnnnnnnnnnnnnnnnnnnnnnnnnnnnnnnnnnnnnnnnnnnnnnnnnnnnnnnnnnnnnnnnnnnnnnnnnnnnnnnnnnnnnnnnnnnnnnnnnnnnnnnnnnnnnnnnnnnnnnnnnnnnnnnnnnnnnnnnnnnnnnnnnnnnnnnnnnnnnnnnnnnnnnnnnnnnnnnnnnnnnnnnnnnnnnnnnnnnnnnnnnnnnnnnnnnnnnnnnnnnnnnnnnnnnnnnnnnnnnnnnnnnnnnnnnnnnnnnnnnnnnnnnnnnnnnnnnnnnnnnnnnnnnnnnnnnnnnnnnnnnnnnnnnnnnnnnnnnnnnnnnnnnnnnnnnnnnnnnnnnnnnnnnnnnnnnnnnnnnnnnnnnnnnnnnnnnnnnnnnnnnnnnnnnnnnnnnnnnnnnnnnnnnnnnnnnnnnnnnnnnnnnnnnnnnnnnnnnnnnnnnnnnnnnnnnnnnnnnnnnnnnnnnnnnnnnnnnnnnnnnnnnnnnnnnnnnnnnnnnnnnnnnnnnnnnnnnnnnnnnnnnnnnnnnnnnnnnnnnnnnnnnnnnnnnnnnnnnnnnnnnnnnnnnnnnnnnnnnnnnnnnnnnnnnnnnnnnnnnnnnnnnnnnnnnnnnnnnnnnnnnnnnnnnnnnnnnnnnnnnnnnnnnnnnnnnnnnnnnnnnnnnnnnnnnnnnnnnnnnnnnnnnnnnnnnnnnnnnnnnnnnnnnnnnnnnnnnnnnnnnnnnnnnnnnnnnnnnnnnnnnnnnnnnnnnnnnnnnnnnnnnnnnnnnnnnnnnnnnnnnnnnnnnnnnnnnnnnnnnnnnnnnnnnnnnnnnnnnnnnnnnnnnnnnnnnnnnnnnnnnnnnnnnnnnnnnnnnnnnnnnnnnnnnnnnnnnnnnnnnnnnnnnnnnnnnnnnnnnnnnnnnnnnnnnnnnnnnnnnnnnnnnnnnnnnnnnnnnnnnnnnnnnnnnnnnnnnnnnnnnnnnnnnnnnnnnnnnnnnnnnnnnnnnnnnnnnnnnnnnnnnnnnnnnnnnnnnnnnnnnnnnnnnnnnnnnnnnnnnnnnnnnnnnnnnnnnnnnnnnnnnnnnnnnnnnnnnnnnnnnnnnnnnnnnnnnnnnnnnnnnnnnnnnnnnnnnnnnnnnnnnnnnnnnnnnnnnnnnnnnnnnnnnnnnnnnnnnnnnnnnnnnnnnnnnnnnnnnnnnnnnnnnnnnnnnnnnnnnnnnnnnnnnnnnnnnnnnnnnnnnnnnnnnnnnnnnnnnnnnnnnnnnnnnnnnnnnnnnnnnnnnnnnnnnnnnnnnnnnnnnnnnnnnnnnnnnnnnnnnnnnnnnnnnnnnnnnnnnnnnnnnnnnnnnnnnnnnnnnnnnnnnnnnnnnnnnnnnnnnnnnnnnnnnnnnnnnnnnnnnnnnnnnnnnnnnnnnnnnnnnnnnnnnnnnnnnnnnnnnnnnnnnnnnnnnnnnnnnnnnnnnnnnnnnnnnnnnnnnnnnnnnnnnnnnnnnnnnnnnnnnnnnnnnnnnnnnnnnnnnnnnnnnnnnnnnnnnnnnnnnnnnnnnnnnnnnnnnnnnnnnnnnnnnnnnnnnnnnnnnnnnnnnnnnnnnnnnnnnnnnnnnnnnnnnnnnnnnnnnnnnnnnnnnnnnnnnnnnnnnnnnnnnnnnnnnnnnnnnnnnnnnnnnnnnnnnnnnnnnnnnnnnnnnnnnnnnnnnnnnnnnnnnnnnnnnnnnnnnnnnnnnnnnnnnnnnnnnnnnnnnnnnnnnnnnnnnnnnnnnnnnnnnnnnnnnnnnnnnnnnnnnnnnnnnnnnnnnnnnnnnnnnnnnnnnnnnnnnnnnnnnnnnnnnnnnnnnnnnnnnnnnnnnnnnnnnnnnnnnnnnnnnnnnnnnnnnnnnnnnnnnnnnnnnnnnnnnnnnnnnnnnnnnnnnnnnnnnnnnnnnnnnnnnnnnnnnnnnnnnnnnnnnnnnnnnnnnnnnnnnnnnnnnnnnnnnnnnnnnnnnnnnnnnnnnnnnnnnnnnnnnnnnnnnnnnnnnnnnnnnnnnnnnnnnnnnnnnnnnnnnnnnnnnnnnnnnnnnnnnnnnnnnnnnnnnnnnnnnnnnnnnnnnnnnnnnnnnnnnnnnnnnnnnnnnnnnnnnnnnnnnnnnnnnnnnnnnnnnnnnnnnnnnnnnnnnnnnnnnnnnnnnnnnnnnnnnnnnnnnnnnnnnnnnnnnnnnnnnnnnnnnnnnnnnnnnnnnnnnnnnnnnnnnnnnnnnnnnnnnnnnnnnnnnnnnnnnnnnnnnnnnnnnnnnnnnnnnnnnnnnnnnnnnnnnnnnnnnnnnnnnnnnnnnnnnnnnnnnnnnnnnnnnnnnnnnnnnnnnnnnnnnnnnnnnnnnnnnnnnnnnnnnnnnnnnnnnnnnnnnnnnnnnnnnnnnnnnnnnnnnnnnnnnnnnnnnnnnnnnnnnnnnnnnnnnnnnnnnnnnnnnnnnnnnnnnnnnnnnnnnnnnnnnnnnnnnnnnnnnnnnnnnnnnnnnnnnnnnnnnnnnnnnnnnnnnnnnnnnnnnnnnnnnnnnnnnnnnnnnnnnnnnnnnnnnnnnnnnnnnnnnnnnnnnnnnnnnnnnnnnnnnnnnnnnnnnnnnnnnnnnnnnnnnnnnnnnnnnnnnnnnnnnnnnnnnnnnnnnnnnnnnnnnnnnnnnnnnnnnnnnnnnnnnnnnnnnnnnnnnnnnnnnnnnnnnnnnnnnnnnnnnnnnnnnnnnnnnnnnnnnnnnnnnnnnnnnnnnnnnnnnnnnnnnnnnnnnnnnnnnnnnnnnnnnnnnnnnnnnnnnnnnnnnnnnnnnnnnnnnnnnnnnnnnnnnnnnnnnnnnnnnnnnnnnnnnnnnnnnnnnnnnnnnnnnnnnnnnnnnnnnnnnnnnnnnnnnnnnnnnnnnnnnnnnnnnnnnnnnnnnnnnnnnnnnnnnnnnnnnnnnnnnnnnnnnnnnnnnnnnnnnnnnnnnnnnnnnnnnnnnnnnnnnnnnnnnnnnnnnnnnnnnnnnnnnnnnnnnnnnnnnnnnnnnnnnnnnnnnnnnnnnnnnnnnnnnnnnnnnnnnnnnnnnnnnnnnnnnnnnnnnnnnnnnnnnnnnnnnnnnnnnnnnnnnnnnnnnnnnnnnnnnnnnnnnnnnnnnnnnnnnnnnnnnnnnnnnnnnnnnnnnnnnnnnnnnnnnnnnnnnnnnnnnnnnnnnnnnnnnnnnnnnnnnnnnnnnnnnnnnnnnnnnnnnnnnnnnnnnnnnnnnnnnnnnnnnnnnnnnnnnnnnnnnnnnnnnnnnnnnnnnnnnnnnnnnnnnnnnnnnnnnnnnnnnnnnnnnnnnnnnnnnnnnnnnnnnnnnnnnnnnnnnnnnnnnnnnnnnnnnnnnnnnnnnnnnnnnnnnnnnnnnnnnnnnnnnnnnnnnnnnnnnnnnnnnnnnnnnnnnnnnnnnnnnnnnnnnnnnnnnnnnnnnnnnnnnnnnnnnnnnnnnnnnnnnnnnnnnnnnnnnnnnnnnnnnnnnnnnnnnnnnnnnnnnnnnnnnnnnnnnnnnnnnnnnnnnnnnnnnnnnnnnnnnnnnnnnnnnnnnnnnnnnnnnnnnnnnnnnnnnnnnnnnnnnnnnnnnnnnnnnnnnnnnnnnnnnnnnnnnnnnnnnnnnnnnnnnnnnnnnnnnnnnnnnnnnnnnnnnnnnnnnnnnnnnnnnnnnnnnnnnnnnnnnnnnnnnnnnnnnnnnnnnnnnnnnnnnnnnnnnnnnnnnnnnnnnnnnnnnnnnnnnnnnnnnnnnnnnnnnnnnnnnnnnnnnnnnnnnnnnnnnnnnnnnnnnnnnnnnnnnnnnnnnnnnnnnnnnnnnnnnnnnnnnnnnnnnnnnnnnnnnnnnnnnnnnnnnnnnnnnnnnnnnnnnnnnnnnnnnnnnnnnnnnnnnnnnnnnnnnnnnnnnnnnnnnnnnnnnnnnnnnnnnnnnnnnnnnnnnnnnnnnnnnnnnnnnnnnnnnnnnnnnnnnnnnnnnnnnnnnnnnnnnnnnnnnnnnnnnnnnnnnnnnnnnnnnnnnnnnnnnnnnnnnnnnnnnnnnnnnnnnnnnnnnnnnnnnnnnnnnnnnnnnnnnnnnnnnnnnnnnnnnnnnnnnnnnnnnnnnnnnnnnnnnnnnnnnnnnnnnnnnnnnnnnnnnnnnnnnnnnnnnnnnnnnnnnnnnnnnnnnnnnnnnnnnnnnnnnnnnnnnnnnnnnnnnnnnnnnnnnnnnnnnnnnnnnnnnnnnnnnnnnnnnnnnnnnnnnnnnnnnnnnnnnnnnnnnnnnnnnnnnnnnnnnnnnnnnnnnnnnnnnnnnnnnnnnnnnnnnnnnnnnnnnnnnnnnnnnnnnnnnnnnnnnnnnnnnnnnnnnnnnnnnnnnnnnnnnnnnnnnnnnnnnnnnnnnnnnnnnnnnnnnnnnnnnnnnnnnnnnnnnnnnnnnnnnnnnnnnnnnnnnnnnnnnnnnnnnnnnnnnnnnnnnnnnnnnnnnnnnnnnnnnnnnnnnnnnnnnnnnnnnnnnnnnnnnnnnnnnnnnnnnnnnnnnnnnnnnnnnnnnnnnnnnnnnnnnnnnnnnnnnnnnnnnnnnnnnnnnnnnnnnnnnnnnnnnnnnnnnnnnnnnnnnnnnnnnnnnnnnnnnnnnnnnnnnnnnnnnnnnnnnnnnnnnnnnnnnnnnnnnnnnnnnnnnnnnnnnnnnnnnnnnnnnnnnnnnnnnnnnnnnnnnnnnnnnnnnnnnnnnnnnnnnnnnnnnnnnnnnnnnnnnnnnnnnnnnnnnnnnnnnnnnnnnnnnnnnnnnnnnnnnnnnnnnnnnnnnnnnnnnnnnnnnnnnnnnnnnnnnnnnnnnnnnnnnnnnnnnnnnnnnnnnnnnnnnnnnnnnnnnnnnnnnnnnnnnnnnnnnnnnnnnnnnnnnnnnnnnnnnnnnnnnnnnnnnnnnnnnnnnnnnnnnnnnnnnnnnnnnnnnnnnnnnnnnnnnnnnnnnnnnnnnnnnnnnnnnnnnnnnnnnnnnnnnnnnnnnnnnnnnnnnnnnnnnnnnnnnnnnnnnnnnnnnnnnnnnnnnnnnnnnnnnnnnnnnnnnnnnnnnnnnnnnnnnnnnnnnnnnnnnnnnnnnnnnnnnnnnnnnnnnnnnnnnnnnnnnnnnnnnnnnnnnnnnnnnnnnnnnnnnnnnnnnnnnnnnnnnnnnnnnnnnnnnnnnnnnnnnnnnnnnnnnnnnnnnnnnnnnnnnnnnnnnnnnnnnnnnnnnnnnnnnnnnnnnnnnnnnnnnnnnnnnnnnnnnnnnnnnnnnnnnnnnnnnnnnnnnnnnnnnnnnnnnnnnnnnnnnnnnnnnnnnnnnnnnnnnnnnnnnnnnnnnnnnnnnnnnnnnnnnnnnnnnnnnnnnnnnnnnnnnnnnnnnnnnnnnnnnnnnnnnnnnnnnnnnnnnnnnnnnnnnnnnnnnnnnnnnnnnnnnnnnnnnnnnnnnnnnnnnnnnnnnnnnnnnnnnnnnnnnnnnnnnnnnnnnnnnnnnnnnnnnnnnnnnnnnnnnnnnnnnnnnnnnnnnnnnnnnnnnnnnnnnnnnnnnnnnnnnnnnnnnnnnnnnnnnnnnnnnnnnnnnnnnnnnnnnnnnnnnnnnnnnnnnnnnnnnnnnnnnnnnnnnnnnnnnnnnnnnnnnnnnnnnnnnnnnnnnnnnnnnnnnnnnnnnnnnnnnnnnnnnnnnnnnnnnnnnnnnnnnnnnnnnnnnnnnnnnnnnnnnnnnnnnnnnnnnnnnnnnnnnnnnnnnnnnnnnnnnnnnnnnnnnnnnnnnnnnnnnnnnnnnnnnnnnnnnnnnnnnnnnnnnnnnnnnnnnnnnnnnnnnnnnnnnnnnnnnnnnnnnnnnnnnnnnnnnnnnnnnnnnnnnnnnnnnnnnnnnnnnnnnnnnnnnnnnnnnnnnnnnnnnnnnnnnnnnnnnnnnnnnnnnnnnnnnnnnnnnnnnnnnnnnnnnnnnnnnnnnnnnnnnnnnnnnnnnnnnnnnnnnnnnnnnnnnnnnnnnnnnnnnnnnnnnnnnnnnnnnnnnnnnnnnnnnnnnnnnnnnnnnnnnnnnnnnnnnnnnnnnnnnnnnnnnnnnnnnnnnnnnnnnnnnnnnnnnnnnnnnnnnnnnnnnnnnnnnnnnnnnnnnnnnnnnnnnnnnnnnnnnnnnnnnnnnnnnnnnnnnnnnnnnnnnnnnnnnnnnnnnnnnnnnnnnnnnnnnnnnnnnnnnnnnnnnnnnnnnnnnnnnnnnnnnnnnnnnnnnnnnnnnnnnnnnnnnnnnnnnnnnnnnnnnnnnnnnnnnnnnnnnnnnnnnnnnnnnnnnnnnnnnnnnnnnnnnnnnnnnnnnnnnnnnnnnnnnnnnnnnnnnnnnnnnnnnnnnnnnnnnnnnnnnnnnnnnnnnnnnnnnnnnnnnnnnnnnnnnnnnnnnnnnnnnnnnnnnnnnnnnnnnnnnnnnnnnnnnnnnnnnnnnnnnnnnnnnnnnnnnnnnnnnnnnnnnnnnnnnnnnnnnnnnnnnnnnnnnnnnnnnnnnnnnnnnnnnnnnnnnnnnnnnnnnnnnnnnnnnnnnnnnnnnnnnnnnnnnnnnnnnnnnnnnnnnnnnnnnnnnnnnnnnnnnnnnnnnnnnnnnnnnnnnnnnnnnnnnnnnnnnnnnnnnnnnnnnnnnnnnnnnnnnnnnnnnnnnnnnnnnnnnnnnnnnnnnnnnnnnnnnnnnnnnnnnnnnnnnnnnnnnnnnnnnnnnnnnnnnnnnnnnnnnnnnnnnnnnnnnnnnnnnnnnnnnnnnnnnnnnnnnnnnnnnnnnnnnnnnnnnnnnnnnnnnnnnnnnnnnnnnnnnnnnnnnnnnnnnnnnnnnnnnnnnnnnnnnnnnnnnnnnnnnnnnnnnnnnnnnnnnnnnnnnnnnnnnnnnnnnnnnnnnnnnnnnnnnnnnnnnnnnnnnnnnnnnnnnnnnnnnnnnnnnnnnnnnnnnnnnnnnnnnnnnnnnnnnnnnnnnnnnnnnnnnnnnnnnnnnnnnnnnnnnnnnnnnnnnnnnnnnnnnnnnnnnnnnnnnnnnnnnnnnnnnnnnnnnnnnnnnnnnnnnnnnnnnnnnnnnnnnnnnnnnnnnnnnnnnnnnnnnnnnnnnnnnnnnnnnnnnnnnnnnnnnnnnnnnnnnnnnnnnnnnnnnnnnnnnnnnnnnnnnnnnnnnnnnnnnnnnnnnnnnnnnnnnnnnnnnnnnnnnnnnnnnnnnnnnnnnnnnnnnnnnnnnnnnnnnnnnnnnnnnnnnnnnnnnnnnnnnnnnnnnnnnnnnnnnnnnnnnnnnnnnnnnnnnnnnnnnnnnnnnnnnnnnnnnnnnnnnnnnnnnnnnnnnnnnnnnnnnnnnnnnnnnnnnnnnnnnnnnnnnnnnnnnnnnnnnnnnnnnnnnnnnnnnnnnnnnnnnnnnnnnnnnnnnnnnnnnnnnnnnnnnnnnnnnnnnnnnnnnnnnnnnnnnnnnnnnnnnnnnnnnnnnnnnnnnnnnnnnnnnnnnnnnnnnnnnnnnnnnnnnnnnnnnnnnnnnnnnnnnnnnnnnnnnnnnnnnnnnnnnnnnnnnnnnnnnnnnnnnnnnnnnnnnnnnnnnnnnnnnnnnnnnnnnnnnnnnnnnnnnnnnnnnnnnnnnnnnnnnnnnnnnnnnnnnnnnnnnnnnnnnnnnnnnnnnnnnnnnnnnnnnnnnnnnnnnnnnnnnnnnnnnnnnnnnnnnnnnnnnnnnnnnnnnnnnnnnnnnnnnnnnnnnnnnnnnnnnnnnnnnnnnnnnnnnnnnnnnnnnnnnnnnnnnnnnnnnnnnnnnnnnnnnnnnnnnnnnnnnnnnnnnnnnnnnnnnnnnnnnnnnnnnnnnnnnnnnnnnnnnnnnnnnnnnnnnnnnnnnnnnnnnnnnnnnnnnnnnnnnnnnnnnnnnnnnnnnnnnnnnnnnnnnnnnnnnnnnnnnnnnnnnnnnnnnnnnnnnnnnnnnnnnnnnnnnnnnnnnnnnnnnnnnnnnnnnnnnnnnnnnnnnnnnnnnnnnnnnnnnnnnnnnnnnnnnnnnnnnnnnnnnnnnnnnnnnnnnnnnnnnnnnnnnnnnnnnnnnnnnnnnnnnnnnnnnnnnnnnnnnnnnnnnnnnnnnnnnnnnnnnnnnnnnnnnnnnnnnnnnnnnnnnnnnnnnnnnnnnnnnnnnnnnnnnnnnnnnnnnnnnnnnnnnnnnnnnnnnnnnnnnnnnnnnnnnnnnnnnnnnnnnnnnnnnnnnnnnnnnnnnnnnnnnnnnnnnnnnnnnnnnnnnnnnnnnnnnnnnnnnnnnnnnnnnnnnnnnnnnnnnnnnnnnnnnnnnnnnnnnnnnnnnnnnnnnnnnnnnnnnnnnnnnnnnnnnnnnnnnnnnnnnnnnnnnnnnnnnnnnnnnnnnnnnnnnnnnnnnnnnnnnnnnnnnnnnnnnnnnnnnnnnnnnnnnnnnnnnnnnnnnnnnnnnnnnnnnnnnnnnnnnnnnnnnnnnnnnnnnnnnnnnnnnnnnnnnnnnnnnnnnnnnnnnnnnnnnnnnnnnnnnnnnnnnnnnnnnnnnnnnnnnnnnnnnnnnnnnnnnnnnnnnnnnnnnnnnnnnnnnnnnnnnnnnnnnnnnnnnnnnnnnnnnnnnnnnnnnnnnnnnnnnnnnnnnnnnnnnnnnnnnnnnnnnnnnnnnnnnnnnnnnnnnnnnnnnnnnnnnnnnnnnnnnnnnnnnnnnnnnnnnnnnnnnnnnnnnnnnnnnnnnnnnnnnnnnnnnnnnnnnnnnnnnnnnnnnnnnnnnnnnnnnnnnnnnnnnnnnnnnnnnnnnnnnnnnnnnnnnnnnnnnnnnnnnnnnnnnnnnnnnnnnnnnnnnnnnnnnnnnnnnnnnnnnnnnnnnnnnnnnnnnnnnnnnnnnnnnnnnnnnnnnnnnnnnnnnnnnnnnnnnnnnnnnnnnnnnnnnnnnnnnnnnnnnnnnnnnnnnnnnnnnnnnnnnnnnnnnnnnnnnnnnnnnnnnnnnnnnnnnnnnnnnnnnnnnnnnnnnnnnnnnnnnnnnnnnnnnnnnnnnnnnnnnnnnnnnnnnnnnnnnnnnnnnnnnnnnnnnnnnnnnnnnnnnnnnnnnnnnnnnnnnnnnnnnnnnnnnnnnnnnnnnnnnnnnnnnnnnnnnnnnnnnnnnnnnnnnnnnnnnnnnnnnnnnnnnnnnnnnnnnnnnnnnnnnnnnnnnnnnnnnnnnnnnnnnnnnnnnnnnnnnnnnnnnnnnnnnnnnnnnnnnnnnnnnnnnnnnnnnnnnnnnnnnnnnnnnnnnnnnnnnnnnnnnnnnnnnnnnnnnnnnnnnnnnnnnnnnnnnnnnnnnnnnnnnnnnnnnnnnnnnnnnnnnnnnnnnnnnnnnnnnnnnnnnnnnnnnnnnnnnnnnnnnnnnnnnnnnnnnnnnnnnnnnnnnnnnnnnnnnnnnnnnnnnnnnnnnnnnnnnnnnnnnnnnnnnnnnnnnnnnnnnnnnnnnnnnnnnnnnnnnnnnnnnnnnnnnnnnnnnnnnnnnnnnnnnnnnnnnnnnnnnnnnnnnnnnnnnnnnnnnnnnnnnnnnnnnnnnnnnnnnnnnnnnnnnnnnnnnnnnnnnnnnnnnnnnnnnnnnnnnnnnnnnnnnnnnnnnnnnnnnnnnnnnnnnnnnnnnnnnnnnnnnnnnnnnnnnnnnnnnnnnnnnnnnnnnnnnnnnnnnnnnnnnnnnnnnnnnnnnnnnnnnnnnnnnnnnnnnnnnnnnnnnnnnnnnnnnnnnnnnnnnnnnnnnnnnnnnnnnnnnnnnnnnnnnnnnnnnnnnnnnnnnnnnnnnnnnnnnnnnnnnnnnnnnnnnnnnnnnnnnnnnnnnnnnnnnnnnnnnnnnnnnnnnnnnnnnnnnnnnnnnnnnnnnnnnnnnnnnnnnnnnnnnnnnnnnnnnnnnnnnnnnnnnnnnnnnnnnnnnnnnnnnnnnnnnnnnnnnnnnnnnnnnnnnnnnnnnnnnnnnnnnnnnnnnnnnnnnnnnnnnnnnnnnnnnnnnnnnnnnnnnnnnnnnnnnnnnnnnnnnnnnnnnnnnnnnnnnnnnnnnnnnnnnnnnnnnnnnnnnnnnnnnnnnnnnnnnnnnnnnnnnnnnnnnnnnnnnnnnnnnnnnnnnnnnnnnnnnnnnnnnnnnnnnnnnnnnnnnnnnnnnnnnnnnnnnnnnnnnnnnnnnnnnnnnnnnnnnnnnnnnnnnnnnnnnnnnnnnnnnnnnnnnnnnnnnnnnnnnnnnnnnnnnnnnnnnnnnnnnnnnnnnnnnnnnnnnnnnnnnnnnnnnnnnnnnnnnnnnnnnnnnnnnnnnnnnnnnnnnnnnnnnnnnnnnnnnnnnnnnnnnnnnnnnnnnnnnnnnnnnnnnnnnnnnnnnnnnnnnnnnnnnnnnnnnnnnnnnnnnnnnnnnnnnnnnnnnnnnnnnnnnnnnnnnnnnnnnnnnnnnnnnnnnnnnnnnnnnnnnnnnnnnnnnnnnnnnnnnnnnnnnnnnnnnnnnnnnnnnnnnnnnnnnnnnnnnnnnnnnnnnnnnnnnnnnnnnnnnnnnnnnnnnnnnnnnnnnnnnnnnnnnnnnnnnnnnnnnnnnnnnnnnnnnnnnnnnnnnnnnnnnnnnnnnnnnnnnnnnnnnnnnnnnnnnnnnnnnnnnnnnnnnnnnnnnnnnnnnnnnnnnnnnnnnnnnnnnnnnnnnnnnnnnnnnnnnnnnnnnnnnnnnnnnnnnnnnnnnnnnnnnnnnnnnnnnnnnnnnnnnnnnnnnnnnnnnnnnnnnnnnnnnnnnnnnnnnnnnnnnnnnnnnnnnnnnnnnnnnnnnnnnnnnnnnnnnnnnnnnnnnnnnnnnnnnnnnnnnnnnnnnnnnnnnnnnnnnnnnnnnnnnnnnnnnnnnnnnnnnnnnnnnnnnnnnnnnnnnnnnnnnnnnnnnnnnnnnnnnnnnnnnnnnnnnnnnnnnnnnnnnnnnnnnnnnnnnnnnnnnnnnnnnnnnnnnnnnnnnnnnnnnnnnnnnnnnnnnnnnnnnnnnnnnnnnnnnnnnnnnnnnnnnnnnnnnnnnnnnnnnnnnnnnnnnnnnnnnnnnnnnnnnnnnnnnnnnnnnnnnnnnnnnnnnnnnnnnnnnnnnnnnnnnnnnnnnnnnnnnnnnnnnnnnnnnnnnnnnnnnnnnnnnnnnnnnnnnnnnnnnnnnnnnnnnnnnnnnnnnnnnnnnnnnnnnnnnnnnnnnnnnnnnnnnnnnnnnnnnnnnnnnnnnnnnnnnnnnnnnnnnnnnnnnnnnnnnnnnnnnnnnnnnnnnnnnnnnnnnnnnnnnnnnnnnnnnnnnnnnnnnnnnnnnnnnnnnnnnnnnnnnnnnnnnnnnnnnnnnnnnnnnnnnnnnnnnnnnnnnnnnnnnnnnnnnnnnnnnnnnnnnnnnnnnnnnnnnnnnnnnnnnnnnnnnnnnnnnnnnnnnnnnnnnnnnnnnnnnnnnnnnnnnnnnnnnnnnnnnnnnnnnnnnnnnnnnnnnnnnnnnnnnnnnnnnnnnnnnnnnnnnnnnnnnnnnnnnnnnnnnnnnnnnnnnnnnnnnnnnnnnnnnnnnnnnnnnnnnnnnnnnnnnnnnnnnnnnnnnnnnnnnnnnnnnnnnnnnnnnnnnnnnnnnnnnnnnnnnnnnnnnnnnnnnnnnnnnnnnnnnnnnnnnnnnnnnnnnnnnnnnnnnnnnnnnnnnnnnnnnnnnnnnnnnnnnnnnnnnnnnnnnnnnnnnnnnnnnnnnnnnnnnnnnnnnnnnnnnnnnnnnnnnnnnnnnnnnnnnnnnnnnnnnnnnnnnnnnnnnnnnnnnnnnnnnnnnnnnnnnnnnnnnnnnnnnnnnnnnnnnnnnnnnnnnnnnnnnnnnnnnnnnnnnnnnnnnnnnnnnnnnnnnnnnnnnnnnnnnnnnnnnnnnnnnnnnnnnnnnnnnnnnnnnnnnnnnnnnnnnnnnnnnnnnnnnnnnnnnnnnnnnnnnnnnnnnnnnnnnnnnnnnnnnnnnnnnnnnnnnnnnnnnnnnnnnnnnnnnnnnnnnnnnnnnnnnnnnnnnnnnnnnnnnnnnnnnnnnnnnnnnnnnnnnnnnnnnnnnnnnnnnnnnnnnnnnnnnnnnnnnnnnnnnnnnnnnnnnnnnnnnnnnnnnnnnnnnnnnnnnnnnnnnnnnnnnnnnnnnnnnnnnnnnnnnnnnnnnnnnnnnnnnnnnnnnnnnnnnnnnnnnnnnnnnnnnnnnnnnnnnnnnnnnnnnnnnnnnnnnnnnnnnnnnnnnnnnnnnnnnnnnnnnnnnnnnnnnnnnnnnnnnnnnnnnnnnnnnnnnnnnnnnnnnnnnnnnnnnnnnnnnnnnnnnnnnnnnnnnnnnnnnnnnnnnnnnnnnnnnnnnnnnnnnnnnnnnnnnnnnnnnnnnnnnnnnnnnnnnnnnnnnnnnnnnnnnnnnnnnnnnnnnnnnnnnnnnnnnnnnnnnnnnnnnnnnnnnnnnnnnnnnnnnnnnnnnnnnnnnnnnnnnnnnnnnnnnnnnnnnnnnnnnnnnnnnnnnnnnnnnnnnnnnnnnnnnnnnnnnnnnnnnnnnnnnnnnnnnnnnnnnnnnnnnnnnnnnnnnnnnnnnnnnnnnnnnnnnnnnnnnnnnnnnnnnnnnnnnnnnnnnnnnnnnnnnnnnnnnnnnnnnnnnnnnnnnnnnnnnnnnnnnnnnnnnnnnnnnnnnnnnnnnnnnnnnnnnnnnnnnnnnnnnnnnnnnnnnnnnnnnnnnnnnnnnnnnnnnnnnnnnnnnnnnnnnnnnnnnnnnnnnnnnnnnnnnnnnnnnnnnnnnnnnnnnnnnnnnnnnnnnnnnnnnnnnnnnnnnnnnnnnnnnnnnnnnnnnnnnnnnnnnnnnnnnnnnnnnnnnnnnnnnnnnnnnnnnnnnnnnnnnnnnnnnnnnnnnnnnnnnnnnnnnnnnnnnnnnnnnnnnnnnnnnnnnnnnnnnnnnnnnnnnnnnnnnnnnnnnnnnnnnnnnnnnnnnnnnnnnnnnnnnnnnnnnnnnnnnnnnnnnnnnnnnnnnnnnnnnnnnnnnnnnnnnnnnnnnnnnnnnnnnnnnnnnnnnnnnnnnnnnnnnnnnnnnnnnnnnnnnnnnnnnnnnnnnnnnnnnnnnnnnnnnnnnnnnnnnnnnnnnnnnnnnnnnnnnnnnnnnnnnnnnnnnnnnnnnnnnnnnnnnnnnnnnnnnnnnnnnnnnnnnnnnnnnnnnnnnnnnnnnnnnnnnnnnnnnnnnnnnnnnnnnnnnnnnnnnnnnnnnnnnnnnnnnnnnnnnnnnnnnnnnnnnnnnnnnnnnnnnnnnnnnnnnnnnnnnnnnnnnnnnnnnnnnnnnnnnnnnnnnnnnnnnnnnnnnnnnnnnnnnnnnnnnnnnnnnnnnnnnnnnnnnnnnnnnnnnnnnnnnnnnnnnnnnnnnnnnnnnnnnnnnnnnnnnnnnnnnnnnnnnnnnnnnnnnnnnnnnnnnnnnnnnnnnnnnnnnnnnnnnnnnnnnnnnnnnnnnnnnnnnnnnnnnnnnnnnnnnnnnnnnnnnnnnnnnnnnnnnnnnnnnnnnnnnnnnnnnnnnnnnnnnnnnnnnnnnnnnnnnnnnnnnnnnnnnnnnnnnnnnnnnnnnnnnnnnnnnnnnnnnnnnnnnnnnnnnnnnnnnnnnnnnnnnnnnnnnnnnnnnnnnnnnnnnnnnnnnnnnnnnnnnnnnnnnnnnnnnnnnnnnnnnnnnnnnnnnnnnnnnnnnnnnnnnnnnnnnnnnnnnnnnnnnnnnnnnnnnnnnnnnnnnnnnnnnnnnnnnnnnnnnnnnnnnnnnnnnnnnnnnnnnnnnnnnnnnnnnnnnnnnnnnnnnnnnnnnnnnnnnnnnnnnnnnnnnnnnnnnnnnnnnnnnnnnnnnnnnnnnnnnnnnnnnnnnnnnnnnnnnnnnnnnnnnnnnnnnnnnnnnnnnnnnnnnnnnnnnnnnnnnnnnnnnnnnnnnnnnnnnnnnnnnnnnnnnnnnnnnnnnnnnnnnnnnnnnnnnnnnnnnnnnnnnnnnnnnnnnnnnnnnnnnnnnnnnnnnnnnnnnnnnnnnnnnnnnnnnnnnnnnnnnnnnnnnnnnnnnnnnnnnnnnnnnnnnnnnnnnnnnnnnnnnnnnnnnnnnnnnnnnnnnnnnnnnnnnnnnnnnnnnnnnnnnnnnnnnnnnnnnnnnnnnnnnnnnnnnnnnnnnnnnnnnnnnnnnnnnnnnnnnnnnnnnnnnnnnnnnnnnnnnnnnnnnnnnnnnnnnnnnnnnnnnnnnnnnnnnnnnnnnnnnnnnnnnnnnnnnnnnnnnnnnnnnnnnnnnnnnnnnnnnnnnnnnnnnnnnnnnnnnnnnnnnnnnnnnnnnnnnnnnnnnnnnnnnnnnnnnnnnnnnnnnnnnnnnnnnnnnnnnnnnnnnnnnnnnnnnnnnnnnnnnnnnnnnnnnnnnnnnnnnnnnnnnnnnnnnnnnnnnnnnnnnnnnnnnnnnnnnnnnnnnnnnnnnnnnnnnnnnnnnnnnnnnnnnnnnnnnnnnnnnnnnnnnnnnnnnnnnnnnnnnnnnnnnnnnnnnnnnnnnnnnnnnnnnnnnnnnnnnnnnnnnnnnnnnnnnnnnnnnnnnnnnnnnnnnnnnnnnnnnnnnnnnnnnnnnnnnnnnnnnnnnnnnnnnnnnnnnnnnnnnnnnnnnnnnnnnnnnnnnnnnnnnnnnnnnnnnnnnnnnnnnnnnnnnnnnnnnnnnnnnnnnnnnnnnnnnnnnnnnnnnnnnnnnnnnnnnnnnnnnnnnnnnnnnnnnnnnnnnnnnnnnnnnnnnnnnnnnnnnnnnnnnnnnnnnnnnnnnnnnnnnnnnnnnnnnnnnnnnnnnnnnnnnnnnnnnnnnnnnnnnnnnnnnnnnnnnnnnnnnnnnnnnnnnnnnnnnnnnnnnnnnnnnnnnnnnnnnnnnnnnnnnnnnnnnnnnnnnnnnnnnnnnnnnnnnnnnnnnnnnnnnnnnnnnnnnnnnnnnnnnnnnnnnnnnnnnnnnnnnnnnnnnnnnnnnnnnnnnnnnnnnnnnnnnnnnnnnnnnnnnnnnnnnnnnnnnnnnnnnnnnnnnnnnnnnnnnnnnnnnnnnnnnnnnnnnnnnnnnnnnnnnnnnnnnnnnnnnnnnnnnnnnnnnnnnnnnnnnnnnnnnnnnnnnnnnnnnnnnnnnnnnnnnnnnnnnnnnnnnnnnnnnnnnnnnnnnnnnnnnnnnnnnnnnnnnnnnnnnnnnnnnnnnnnnnnnnnnnnnnnnnnnnnnnnnnnnnnnnnnnnnnnnnnnnnnnnnnnnnnnnnnnnnnnnnnnnnnnnnnnnnnnnnnnnnnnnnnnnnnnnnnnnnnnnnnnnnnnnnnnnnnnnnnnnnnnnnnnnnnnnnnnnnnnnnnnnnnnnnnnnnnnnnnnnnnnnnnnnnnnnnnnnnnnnnnnnnnnnnnnnnnnnnnnnnnnnnnnnnnnnnnnnnnnnnnnnnnnnnnnnnnnnnnnnnnnnnnnnnnnnnnnnnnnnnnnnnnnnnnnnnnnnnnnnnnnnnnnnnnnnnnnnnnnnnnnnnnnnnnnnnnnnnnnnnnnnnnnnnnnnnnnnnnnnnnnnnnnnnnnnnnnnnnnnnnnnnnnnnnnnnnnnnnnnnnnnnnnnnnnnnnnnnnnnnnnnnnnnnnnnnnnnnnnnnnnnnnnnnnnnnnnnnnnnnnnnnnnnnnnnnnnnnnnnnnnnnnnnnnnnnnnnnnnnnnnnnnnnnnnnnnnnnnnnnnnnnnnnnnnnnnnnnnnnnnnnnnnnnnnnnnnnnnnnnnnnnnnnnnnnnnnnnnnnnnnnnnnnnnnnnnnnnnnnnnnnnnnnnnnnnnnnnnnnnnnnnnnnnnnnnnnnnnnnnnnnnnnnnnnnnnnnnnnnnnnnnnnnnnnnnnnnnnnnnnnnnnnnnnnnnnnnnnnnnnnnnnnnnnnnnnnnnnnnnnnnnnnnnnnnnnnnnnnnnnnnnnnnnnnnnnnnnnnnnnnnnnnnnnnnnnnnnnnnnnnnnnnnnnnnnnnnnnnnnnnnnnnnnnnnnnnnnnnnnnnnnnnnnnnnnnnnnnnnnnnnnnnnnnnnnnnnnnnnnnnnnnnnnnnnnnnnnnnnnnnnnnnnnnnnnnnnnnnnnnnnnnnnnnnnnnnnnnnnnnnnnnnnnnnnnnnnnnnnnnnnnnnnnnnnnnnnnnnnnnnnnnnnnnnnnnnnnnnnnnnnnnnnnnnnnnnnnnnnnnnnnnnnnnnnnnnnnnnnnnnnnnnnnnnnnnnnnnnnnnnnnnnnnnnnnnnnnnnnnnnnnnnnnnnnnnnnnnnnnnnnnnnnnnnnnnnnnnnnnnnnnnnnnnnnnnnnnnnnnnnnnnnnnnnnnnnnnnnnnnnnnnnnnnnnnnnnnnnnnnnnnnnnnnnnnnnnnnnnnnnnnnnnnnnnnnnnnnnnnnnnnnnnnnnnnnnnnnnnnnnnnnnnnnnnnnnnnnnnnnnnnnnnnnnnnnnnnnnnnnnnnnnnnnnnnnnnnnnnnnnnnnnnnnnnnnnnnnnnnnnnnnnnnnnnnnnnnnnnnnnnnnnnnnnnnnnnnnnnnnnnnnnnnnnnnnnnnnnnnnnnnnnnnnnnnnnnnnnnnnnnnnnnnnnnnnnnnnnnnnnnnnnnnnnnnnnnnnnnnnnnnnnnnnnnnnnnnnnnnnnnnnnnnnnnnnnnnnnnnnnnnnnnnnnnnnnnnnnnnnnnnnnnnnnnnnnnnnnnnnnnnnnnnnnnnnnnnnnnnnnnnnnnnnnnnnnnnnnnnnnnnnnnnnnnnnnnnnnnnnnnnnnnnnnnnnnnnnnnnnnnnnnnnnnnnnnnnnnnnnnnnnnnnnnnnnnnnnnnnnnnnnnnnnnnnnnnnnnnnnnnnnnnnnnnnnnnnnnnnnnnnnnnnnnnnnnnnnnnnnnnnnnnnnnnnnnnnnnnnnnnnnnnnnnnnnnnnnnnnnnnnnnnnnnnnnnnnnnnnnnnnnnnnnnnnnnnnnnnnnnnnnnnnnnnnnnnnnnnnnnnnnnnnnnnnnnnnnnnnnnnnnnnnnnnnnnnnnnnnnnnnnnnnnnnnnnnnnnnnnnnnnnnnnnnnnnnnnnnnnnnnnnnnnnnnnnnnnnnnnnnnnnnnnnnnnnnnnnnnnnnnnnnnnnnnnnnnnnnnnnnnnnnnnnnnnnnnnnnnnnnnnnnnnnnnnnnnnnnnnnnnnnnnnnnnnnnnnnnnnnnnnnnnnnnnnnnnnnnnnnnnnnnnnnnnnnnnnnnnnnnnnnnnnnnnnnnnnnnnnnnnnnnnnnnnnnnnnnnnnnnnnnnnnnnnnnnnnnnnnnnnnnnnnnnnnnnnnnnnnnnnnnnnnnnnnnnnnnnnnnnnnnnnnnnnnnnnnnnnnnnnnnnnnnnnnnnnnnnnnnnnnnnnnnnnnnnnnnnnnnnnnnnnnnnnnnnnnnnnnnnnnnnnnnnnnnnnnnnnnnnnnnnnnnnnnnnnnnnnnnnnnnnnnnnnnnnnnnnnnnnnnnnnnnnnnnnnnnnnnnnnnnnnnnnnnnnnnnnnnnnnnnnnnnnnnnnnnnnnnnnnnnnnnnnnnnnnnnnnnnnnnnnnnnnnnnnnnnnnnnnnnnnnnnnnnnnnnnnnnnnnnnnnnnnnnnnnnnnnnnnnnnnnnnnnnnnnnnnnnnnnnnnnnnnnnnnnnnnnnnnnnnnnnnnnnnnnnnnnnnnnnnnnnnnnnnnnnnnnnnnnnnnnnnnnnnnnnnnnnnnnnnnnnnnnnnnnnnnnnnnnnnnnnnnnnnnnnnnnnnnnnnnnnnnnnnnnnnnnnnnnnnnnnnnnnnnnnnnnnnnnnnnnnnnnnnnnnnnnnnnnnnnnnnnnnnnnnnnnnnnnnnnnnnnnnnnnnnnnnnnnnnnnnnnnnnnnnnnnnnnnnnnnnnnnnnnnnnnnnnnnnnnnnnnnnnnnnnnnnnnnnnnnnnnnnnnnnnnnnnnnnnnnnnnnnnnnnnnnnnnnnnnnnnnnnnnnnnnnnnnnnnnnnnnnnnnnnnnnnnnnnnnnnnnnnnnnnnnnnnnnnnnnnnnnnnnnnnnnnnnnnnnnnnnnnnnnnnnnnnnnnnnnnnnnnnnnnnnnnnnnnnnnnnnnnnnnnnnnnnnnnnnnnnnnnnnnnnnnnnnnnnnnnnnnnnnnnnnnnnnnnnnnnnnnnnnnnnnnnnnnnnnnnnnnnnnnnnnnnnnnnnnnnnnnnnnnnnnnnnnnnnnnnnnnnnnnnnnnnnnnnnnnnnnnnnnnnnnnnnnnnnnnnnnnnnnnnnnnnnnnnnnnnnnnnnnnnnnnnnnnnnnnnnnnnnnnnnnnnnnnnnnnnnnnnnnnnnnnnnnnnnnnnnnnnnnnnnnnnnnnnnnnnnnnnnnnnnnnnnnnnnnnnnnnnnnnnnnnnnnnnnnnnnnnnnnnnnnnnnnnnnnnnnnnnnnnnnnnnnnnnnnnnnnnnnnnnnnnnnnnnnnnnnnnnnnnnnnnnnnnnnnnnnnnnnnnnnnnnnnnnnnnnnnnnnnnnnnnnnnnnnnnnnnnnnnnnnnnnnnnnnnnnnnnnnnnnnnnnnnnnnnnnnnnnnnnnnnnnnnnnnnnnnnnnnnnnnnnnnnnnnnnnnnnnnnnnnnnnnnnnnnnnnnnnnnnnnnnnnnnnnnnnnnnnnnnnnnnnnnnnnnnnnnnnnnnnnnnnnnnnnnnnnnnnnnnnnnnnnnnnnnnnnnnnnnnnnnnnnnnnnnnnnnnnnnnnnnnnnnnnnnnnnnnnnnnnnnnnnnnnnnnnnnnnnnnnnnnnnnnnnnnnnnnnnnnnnnnnnnnnnnnnnnnnnnnnnnnnnnnnnnnnnnnnnnnnnnnnnnnnnnnnnnnnnnnnnnnnnnnnnnnnnnnnnnnnnnnnnnnnnnnnnnnnnnnnnnnnnnnnnnnnnnnnnnnnnnnnnnnnnnnnnnnnnnnnnnnnnnnnnnnnnnnnnnnnnnnnnnnnnnnnnnnnnnnnnnnnnnnnnnnnnnnnnnnnnnnnnnnnnnnnnnnnnnnnnnnnnnnnnnnnnnnnnnnnnnnnnnnnnnnnnnnnnnnnnnnnnnnnnnnnnnnnnnnnnnnnnnnnnnnnnnnnnnnnnnnnnnnnnnnnnnnnnnnnnnnnnnnnnnnnnnnnnnnnnnnnnnnnnnnnnnnnnnnnnnnnnnnnnnnnnnnnnnnnnnnnnnnnnnnnnnnnnnnnnnnnnnnnnnnnnnnnnnnnnnnnnnnnnnnnnnnnnnnnnnnnnnnnnnnnnnnnnnnnnnnnnnnnnnnnnnnnnnnnnnnnnnnnnnnnnnnnnnnnnnnnnnnnnnnnnnnnnnnnnnnnnnnnnnnnnnnnnnnnnnnnnnnnnnnnnnnnnnnnnnnnnnnnnnnnnnnnnnnnnnnnnnnnnnnnnnnnnnnnnnnnnnnnnnnnnnnnnnnnnnnnnnnnnnnnnnnnnnnnnnnnnnnnnnnnnnnnnnnnnnnnnnnnnnnnnnnnnnnnnnnnnnnnnnnnnnnnnnnnnnnnnnnnnnnnnnnnnnnnnnnnnnnnnnnnnnnnnnnnnnnnnnnnnnnnnnnnnnnnnnnnnnnnnnnnnnnnnnnnnnnnnnnnnnnnnnnnnnnnnnnnnnnnnnnnnnnnnnnnnnnnnnnnnnnnnnnnnnnnnnnnnnnnnnnnnnnnnnnnnnnnnnnnnnnnnnnnnnnnnnnnnnnnnnnnnnnnnnnnnnnnnnnnnnnnnnnnnnnnnnnnnnnnnnnnnnnnnnnnnnnnnnnnnnnnnnnnnnnnnnnnnnnnnnnnnnnnnnnnnnnnnnnnnnnnnnnnnnnnnnnnnnnnnnnnnnnnnnnnnnnnnnnnnnnnnnnnnnnnnnnnnnnnnnnnnnnnnnnnnnnnnnnnnnnnnnnnnnnnnnnnnnnnnnnnnnnnnnnnnnnnnnnnnnnnnnnnnnnnnnnnnnnnnnnnnnnnnnnnnnnnnnnnnnnnnnnnnnnnnnnnnnnnnnnnnnnnnnnnnnnnnnnnnnnnnnnnnnnnnnnnnnnnnnnnnnnnnnnnnnnnnnnnnnnnnnnnnnnnnnnnnnnnnnnnnnnnnnnnnnnnnnnnnnnnnnnnnnnnnnnnnnnnnnnnnnnnnnnnnnnnnnnnnnnnnnnnnnnnnnnnnnnnnnnnnnnnnnnnnnnnnnnnnnnnnnnnnnnnnnnnnnnnnnnnnnnnnnnnnnnnnnnnnnnnnnnnnnnnnnnnnnnnnnnnnnnnnnnnnnnnnnnnnnnnnnnnnnnnnnnnnnnnnnnnnnnnnnnnnnnnnnnnnnnnnnnnnnnnnnnnnnnnnnnnnnnnnnnnnnnnnnnnnnnnnnnnnnnnnnnnnnnnnnnnnnnnnnnnnnnnnnnnnnnnnnnnnnnnnnnnnnnnnnnnnnnnnnnnnnnnnnnnnnnnnnnnnnnnnnnnnnnnnnnnnnnnnnnnnnnnnnnnnnnnnnnnnnnnnnnnnnnnnnnnnnnnnnnnnnnnnnnnnnnnnnnnnnnnnnnnnnnnnnnnnnnnnnnnnnnnnnnnnnnnnnnnnnnnnnnnnnnnnnnnnnnnnnnnnnnnnnnnnnnnnnnnnnnnnnnnnnnnnnnnnnnnnnnnnnnnnnnnnnnnnnnnnnnnnnnnnnnnnnnnnnnnnnnnnnnnnnnnnnnnnnnnnnnnnnnnnnnnnnnnnnnnnnnnnnnnnnnnnnnnnnnnnnnnnnnnnnnnnnnnnnnnnnnnnnnnnnnnnnnnnnnnnnnnnnnnnnnnnnnnnnnnnnnnnnnnnnnnnnnnnnnnnnnnnnnnnnnnnnnnnnnnnnnnnnnnnnnnnnnnnnnnnnnnnnnnnnnnnnnnnnnnnnnnnnnnnnnnnnnnnnnnnnnnnnnnnnnnnnnnnnnnnnnnnnnnnnnnnnnnnnnnnnnnnnnnnnnnnnnnnnnnnnnnnnnnnnnnnnnnnnnnnnnnnnnnnnnnnnnnnnnnnnnnnnnnnnnnnnnnnnnnnnnnnnnnnnnnnnnnnnnnnnnnnnnnnnnnnnnnnnnnnnnnnnnnnnnnnnnnnnnnnnnnnnnnnnnnnnnnnnnnnnnnnnnnnnnnnnnnnnnnnnnnnnnnnnnnnnnnnnnnnnnnnnnnnnnnnnnnnnnnnnnnnnnnnnnnnnnnnnnnnnnnnnnnnnnnnnnnnnnnnnnnnnnnnnnnnnnnnnnnnnnnnnnnnnnnnnnnnnnnnnnnnnnnnnnnnnnnnnnnnnnnnnnnnnnnnnnnnnnnnnnnnnnnnnnnnnnnnnnnnnnnnnnnnnnnnnnnnnnnnnnnnnnnnnnnnnnnnnnnnnnnnnnnnnnnnnnnnnnnnnnnnnnnnnnnnnnnnnnnnnnnnnnnnnnnnnnnnnnnnnnnnnnnnnnnnnnnnnnnnnnnnnnnnnnnnnnnnnnnnnnnnnnnnnnnnnnnnnnnnnnnnnnnnnnnnnnnnnnnnnnnnnnnnnnnnnnnnnnnnnnnnnnnnnnnnnnnnnnnnnnnnnnnnnnnnnnnnnnnnnnnnnnnnnnnnnnnnnnnnnnnnnnnnnnnnnnnnnnnnnnnnnnnnnnnnnnnnnnnnnnnnnnnnnnnnnnnnnnnnnnnnnnnnnnnnnnnnnnnnnnnnnnnnnnnnnnnnnnnnnnnnnnnnnnnnnnnnnnnnnnnnnnnnnnnnnnnnnnnnnnnnnnnnnnnnnnnnnnnnnnnnnnnnnnnnnnnnnnnnnnnnnnnnnnnnnnnnnnnnnnnnnnnnnnnnnnnnnnnnnnnnnnnnnnnnnnnnnnnnnnnnnnnnnnnnnnnnnnnnnnnnnnnnnnnnnnnnnnnnnnnnnnnnnnnnnnnnnnnnnnnnnnnnnnnnnnnnnnnnnnnnnnnnnnnnnnnnnnnnnnnnnnnnnnnnnnnnnnnnnnnnnnnnnnnnnnnnnnnnnnnnnnnnnnnnnnnnnnnnnnnnnnnnnnnnnnnnnnnnnnnnnnnnnnnnnnnnnnnnnnnnnnnnnnnnnnnnnnnnnnnnnnnnnnnnnnnnnnnnnnnnnnnnnnnnnnnnnnnnnnnnnnnnnnnnnnnnnnnnnnnnnnnnnnnnnnnnnnnnnnnnnnnnnnnnnnnnnnnnnnnnnnnnnnnnnnnnnnnnnnnnnnnnnnnnnnnnnnnnnnnnnnnnnnnnnnnnnnnnnnnnnnnnnnnnnnnnnnnnnnnnnnnnnnnnnnnnnnnnnnnnnnnnnnnnnnnnnnnnnnnnnnnnnnnnnnnnnnnnnnnnnnnnnnnnnnnnnnnnnnnnnnnnnnnnnnnnnnnnnnnnnnnnnnnnnnnnnnnnnnnnnnnnnnnnnnnnnnnnnnnnnnnnnnnnnnnnnnnnnnnnnnnnnnnnnnnnnnnnnnnnnnnnnnnnnnnnnnnnnnnnnnnnnnnnnnnnnnnnnnnnnnnnnnnnnnnnnnnnnnnnnnnnnnnnnnnnnnnnnnnnnnnnnnnnnnnnnnnnnnnnnnnnnnnnnnnnnnnnnnnnnnnnnnnnnnnnnnnnnnnnnnnnnnnnnnnnnnnnnnnnnnnnnnnnnnnnnnnnnnnnnnnnnnnnnnnnnnnnnnnnnnnnnnnnnnnnnnnnnnnnnnnnnnnnnnnnnnnnnnnnnnnnnnnnnnnnnnnnnnnnnnnnnnnnnnnnnnnnnnnnnnnnnnnnnnnnnnnnnnnnnnnnnnnnnnnnnnnnnnnnnnnnnnnnnnnnnnnnnnnnnnnnnnnnnnnnnnnnnnnnnnnnnnnnnnnnnnnnnnnnnnnnnnnnnnnnnnnnnnnnnnnnnnnnnnnnnnnnnnnnnnnnnnnnnnnnnnnnnnnnnnnnnnnnnnnnnnnnnnnnnnnnnnnnnnnnnnnnnnnnnnnnnnnnnnnnnnnnnnnnnnnnnnnnnnnnnnnnnnnnnnnnnnnnnnnnnnnnnnnnnnnnnnnnnnnnnnnnnnnnnnnnnnnnnnnnnnnnnnnnnnnnnnnnnnnnnnnnnnnnnnnnnnnnnnnnnnnnnnnnnnnnnnnnnnnnnnnnnnnnnnnnnnnnnnnnnnnnnnnnnnnnnnnnnnnnnnnnnnnnnnnnnnnnnnnnnnnnnnnnnnnnnnnnnnnnnnnnnnnnnnnnnnnnnnnnnnnnnnnnnnnnnnnnnnnnnnnnnnnnnnnnnnnnnnnnnnnnnnnnnnnnnnnnnnnnnnnnnnnnnnnnnnnnnnnnnnnnnnnnnnnnnnnnnnnnnnnnnnnnnnnnnnnnnnnnnnnnnnnnnnnnnnnnnnnnnnnnnnnnnnnnnnnnnnnnnnnnnnnnnnnnnnnnnnnnnnnnnnnnnnnnnnnnnnnnnnnnnnnnnnnnnnnnnnnnnnnnnnnnnnnnnnnnnnnnnnnnnnnnnnnnnnnnnnnnnnnnnnnnnnnnnnnnnnnnnnnnnnnnnnnnnnnnnnnnnnnnnnnnnnnnnnnnnnnnnnnnnnnnnnnnnnnnnnnnnnnnnnnnnnnnnnnnnnnnnnnnnnnnnnnnnnnnnnnnnnnnnnnnnnnnnnnnnnnnnnnnnnnnnnnnnnnnnnnnnnnnnnnnnnnnnnnnnnnnnnnnnnnnnnnnnnnnnnnnnnnnnnnnnnnnnnnnnnnnnnnnnnnnnnnnnnnnnnnnnnnnnnnnnnnnnnnnnnnnnnnnnnnnnnnnnnnnnnnnnnnnnnnnnnnnnnnnnnnnnnnnnnnnnnnnnnnnnnnnnnnnnnnnnnnnnnnnnnnnnnnnnnnnnnnnnnnnnnnnnnnnnnnnnnnnnnnnnnnnnnnnnnnnnnnnnnnnnnnnnnnnnnnnnnnnnnnnnnnnnnnnnnnnnnnnnnnnnnnnnnnnnnnnnnnnnnnnnnnnnnnnnnnnnnnnnnnnnnnnnnnnnnnnnnnnnnnnnnnnnnnnnnnnnnnnnnnnnnnnnnnnnnnnnnnnnnnnnnnnnnnnnnnnnnnnnnnnnnnnnnnnnnnnnnnnnnnnnnnnnnnnnnnnnnnnnnnnnnnnnnnnnnnnnnnnnnnnnnnnnnnnnnnnnnnnnnnnnnnnnnnnnnnnnnnnnnnnnnnnnnnnnnnnnnnnnnnnnnnnnnnnnnnnnnnnnnnnnnnnnnnnnnnnnnnnnnnnnnnnnnnnnnnnnnnnnnnnnnnnnnnnnnnnnnnnnnnnnnnnnnnnnnnnnnnnnnnnnnnnnnnnnnnnnnnnnnnnnnnnnnnnnnnnnnnnnnnnnnnnnnnnnnnnnnnnnnnnnnnnnnnnnnnnnnnnnnnnnnnnnnnnnnnnnnnnnnnnnnnnnnnnnnnnnnnnnnnnnnnnnnnnnnnnnnnnnnnnnnnnnnnnnnnnnnnnnnnnnnnnnnnnnnnnnnnnnnnnnnnnnnnnnnnnnnnnnnnnnnnnnnnnnnnnnnnnnnnnnnnnnnnnnnnnnnnnnnnnnnnnnnnnnnnnnnnnnnnnnnnnnnnnnnnnnnnnnnnnnnnnnnnnnnnnnnnnnnnnnnnnnnnnnnnnnnnnnnnnnnnnnnnnnnnnnnnnnnnnnnnnnnnnnnnnnnnnnnnnnnnnnnnnnnnnnnnnnnnnnnnnnnnnnnnnnnnnnnnnnnnnnnnnnnnnnnnnnnnnnnnnnnnnnnnnnnnnnnnnnnnnnnnnnnnnnnnnnnnnnnnnnnnnnnnnnnnnnnnnnnnnnnnnnnnnnnnnnnnnnnnnnnnnnnnnnnnnnnnnnnnnnnnnnnnnnnnnnnnnnnnnnnnnnnnnnnnnnnnnnnnnnnnnnnnnnnnnnnnnnnnnnnnnnnnnnnnnnnnnnnnnnnnnnnnnnnnnnnnnnnnnnnnnnnnnnnnnnnnnnnnnnnnnnnnnnnnnnnnnnnnnnnnnnnnnnnnnnnnnnnnnnnnnnnnnnnnnnnnnnnnnnnnnnnnnnnnnnnnnnnnnnnnnnnnnnnnnnnnnnnnnnnnnnnnnnnnnnnnnnnnnnnnnnnnnnnnnnnnnnnnnnnnnnnnnnnnnnnnnnnnnnnnnnnnnnnnnnnnnnnnnnnnnnnnnnnnnnnnnnnnnnnnnnnnnnnnnnnnnnnnnnnnnnnnnnnnnnnnnnnnnnnnnnnnnnnnnnnnnnnnnnnnnnnnnnnnnnnnnnnnnnnnnnnnnnnnnnnnnnnnnnnnnnnnnnnnnnnnnnnnnnnnnnnnnnnnnnnnnnnnnnnnnnnnnnnnnnnnnnnnnnnnnnnnnnnnnnnnnnnnnnnnnnnnnnnnnnnnnnnnnnnnnnnnnnnnnnnnnnnnnnnnnnnnnnnnnnnnnnnnnnnnnnnnnnnnnnnnnnnnnnnnnnnnnnnnnnnnnnnnnnnnnnnnnnnnnnnnnnnnnnnnnnnnnnnnnnnnnnnnnnnnnnnnnnnnnnnnnnnnnnnnnnnnnnnnnnnnnnnnnnnnnnnnnnnnnnnnnnnnnnnnnnnnnnnnnnnnnnnnnnnnnnnnnnnnnnnnnnnnnnnnnnnnnnnnnnnnnnnnnnnnnnnnnnnnnnnnnnnnnnnnnnnnnnnnnnnnnnnnnnnnnnnnnnnnnnnnnnnnnnnnnnnnnnnnnnnnnnnnnnnnnnnnnnnnnnnnnnnnnnnnnnnnnnnnnnnnnnnnnnnnnnnnnnnnnnnnnnnnnnnnnnnnnnnnnnnnnnnnnnnnnnnnnnnnnnnnnnnnnnnnnnnnnnnnnnnnnnnnnnnnnnnnnnnnnnnnnnnnnnnnnnnnnnnnnnnnnnnnnnnnnnnnnnnnnnnnnnnnnnnnnnnnnnnnnnnnnnnnnnnnnnnnnnnnnnnnnnnnnnnnnnnnnnnnnnnnnnnnnnnnnnnnnnnnnnnnnnnnnnnnnnnnnnnnnnnnnnnnnnnnnnnnnnnnnnnnnnnnnnnnnnnnnnnnnnnnnnnnnnnnnnnnnnnnnnnnnnnnnnnnnnnnnnnnnnnnnnnnnnnnnnnnnnnnnnnnnnnnnnnnnnnnnnnnnnnnnnnnnnnnnnnnnnnnnnnnnnnnnnnnnnnnnnnnnnnnnnnnnnnnnnnnnnnnnnnnnnnnnnnnnnnnnnnnnnnnnnnnnnnnnnnnnnnnnnnnnnnnnnnnnnnnnnnnnnnnnnnnnnnnnnnnnnnnnnnnnnnnnnnnnnnnnnnnnnnnnnnnnnnnnnnnnnnnnnnnnnnnnnnnnnnnnnnnnnnnnnnnnnnnnnnnnnnnnnnnnnnnnnnnnnnnnnnnnnnnnnnnnnnnnnnnnnnnnnnnnnnnnnnnnnnnnnnnnnnnnnnnnnnnnnnnnnnnnnnnnnnnnnnnnnnnnnnnnnnnnnnnnnnnnnnnnnnnnnnnnnnnnnnnnnnnnnnnnnnnnnnnnnnnnnnnnnnnnnnnnnnnnnnnnnnnnnnnnnnnnnnnnnnnnnnnnnnnnnnnnnnnnnnnnnnnnnnnnnnnnnnnnnnnnnnnnnnnnnnnnnnnnnnnnnnnnnnnnnnnnnnnnnnnnnnnnnnnnnnnnnnnnnnnnnnnnnnnnnnnnnnnnnnnnnnnnnnnnnnnnnnnnnnnnnnnnnnnnnnnnnnnnnnnnnnnnnnnnnnnnnnnnnnnnnnnnnnnnnnnnnnnnnnnnnnnnnnnnnnnnnnnnnnnnnnnnnnnnnnnnnnnnnnnnnnnnnnnnnnnnnnnnnnnnnnnnnnnnnnnnnnnnnnnnnnnnnnnnnnnnnnnnnnnnnnnnnnnnnnnnnnnnnnnnnnnnnnnnnnnnnnnnnnnnnnnnnnnnnnnnnnnnnnnnnnnnnnnnnnnnnnnnnnnnnnnnnnnnnnnnnnnnnnnnnnnnnnnnnnnnnnnnnnnnnnnnnnnnnnnnnnnnnnnnnnnnnnnnnnnnnnnnnnnnnnnnnnnnnnnnnnnnnnnnnnnnnnnnnnnnnnnnnnnnnnnnnnnnnnnnnnnnnnnnnnnnnnnnnnnnnnnnnnnnnnnnnnnnnnnnnnnnnnnnnnnnnnnnnnnnnnnnnnnnnnnnnnnnnnnnnnnnnnnnnnnnnnnnnnnnnnnnnnnnnnnnnnnnnnnnnnnnnnnnnnnnnnnnnnnnnnnnnnnnnnnnnnnnnnnnnnnnnnnnnnnnnnnnnnnnnnnnnnnnnnnnnnnnnnnnnnnnnnnnnnnnnnnnnnnnnnnnnnnnnnnnnnnnnnnnnnnnnnnnnnnnnnnnnnnnnnnnnnnnnnnnnnnnnnnnnnnnnnnnnnnnnnnnnnnnnnnnnnnnnnnnnnnnnnnnnnnnnnnnnnnnnnnnnnnnnnnnnnnnnnnnnnnnnnnnnnnnnnnnnnnnnnnnnnnnnnnnnnnnnnnnnnnnnnnnnnnnnnnnnnnnnnnnnnnnnnnnnnnnnnnnnnnnnnnnnnnnnnnnnnnnnnnnnnnnnnnnnnnnnnnnnnnnnnnnnnnnnnnnnnnnnnnnnnnnnnnnnnnnnnnnnnnnnnnnnnnnnnnnnnnnnnnnnnnnnnnnnnnnnnnnnnnnnnnnnnnnnnnnnnnnnnnnnnnnnnnnnnnnnnnnnnnnnnnnnnnnnnnnnnnnnnnnnnnnnnnnnnnnnnnnnnnnnnnnnnnnnnnnnnnnnnnnnnnnnnnnnnnnnnnnnnnnnnnnnnnnnnnnnnnnnnnnnnnnnnnnnnnnnnnnnnnnnnnnnnnnnnnnnnnnnnnnnnnnnnnnnnnnnnnnnnnnnnnnnnnnnnnnnnnnnnnnnnnnnnnnnnnnnnnnnnnnnnnnnnnnnnnnnnnnnnnnnnnnnnnnnnnnnnnnnnnnnnnnnnnnnnnnnnnnnnnnnnnnnnnnnnnnnnnnnnnnnnnnnnnnnnnnnnnnnnnnnnnnnnnnnnnnnnnnnnnnnnnnnnnnnnnnnnnnnnnnnnnnnnnnnnnnnnnnnnnnnnnnnnnnnnnnnnnnnnnnnnnnnnnnnnnnnnnnnnnnnnnnnnnnnnnnnnnnnnnnnnnnnnnnnnnnnnnnnnnnnnnnnnnnnnnnnnnnnnnnnnnnnnnnnnnnnnnnnnnnnnnnnnnnnnnnnnnnnnnnnnnnnnnnnnnnnnnnnnnnnnnnnnnnnnnnnnnnnnnnnnnnnnnnnnnnnnnnnnnnnnnnnnnnnnnnnnnnnnnnnnnnnnnnnnnnnnnnnnnnnnnnnnnnnnnnnnnnnnnnnnnnnnnnnnnnnnnnnnnnnnnnnnnnnnnnnnnnnnnnnnnnnnnnnnnnnnnnnnnnnnnnnnnnnnnnnnnnnnnnnnnnnnnnnnnnnnnnnnnnnnnnnnnnnnnnnnnnnnnnnnnnnnnnnnnnnnnnnnnnnnnnnnnnnnnnnnnnnnnnnnnnnnnnnnnnnnnnnnnnnnnnnnnnnnnnnnnnnnnnnnnnnnnnnnnnnnnnnnnnnnnnnnnnnnnnnnnnnnnnnnnnnnnnnnnnnnnnnnnnnnnnnnnnnnnnnnnnnnnnnnnnnnnnnnnnnnnnnnnnnnnnnnnnnnnnnnnnnnnnnnnnnnnnnnnnnnnnnnnnnnnnnnnnnnnnnnnnnnnnnnnnnnnnnnnnnnnnnnnnnnnnnnnnnnnnnnnnnnnnnnnnnnnnnnnnnnnnnnnnnnnnnnnnnnnnnnnnnnnnnnnnnnnnnnnnnnnnnnnnnnnnnnnnnnnnnnnnnnnnnnnnnnnnnnnnnnnnnnnnnnnnnnnnnnnnnnnnnnnnnnnnnnnnnnnnnnnnnnnnnnnnnnnnnnnnnnnnnnnnnnnnnnnnnnnnnnnnnnnnnnnnnnnnnnnnnnnnnnnnnnnnnnnnnnnnnnnnnnnnnnnnnnnnnnnnnnnnnnnnnnnnnnnnnnnnnnnnnnnnnnnnnnnnnnnnnnnnnnnnnnnnnnnnnnnnnnnnnnnnnnnnnnnnnnnnnnnnnnnnnnnnnnnnnnnnnnnnnnnnnnnnnnnnnnnnnnnnnnnnnnnnnnnnnnnnnnnnnnnnnnnnnnnnnnnnnnnnnnnnnnnnnnnnnnnnnnnnnnnnnnnnnnnnnnnnnnnnnnnnnnnnnnnnnnnnnnnnnnnnnnnnnnnnnnnnnnnnnnnnnnnnnnnnnnnnnnnnnnnnnnnnnnnnnnnnnnnnnnnnnnnnnnnnnnnnnnnnnnnnnnnnnnnnnnnnnnnnnnnnnnnnnnnnnnnnnnnnnnnnnnnnnnnnnnnnnnnnnnnnnnnnnnnnnnnnnnnnnnnnnnnnnnnnnnnnnnnnnnnnnnnnnnnnnnnnnnnnnnnnnnnnnnnnnnnnnnnnnnnnnnnnnnnnnnnnnnnnnnnnnnnnnnnnnnnnnnnnnnnnnnnnnnnnnnnnnnnnnnnnnnnnnnnnnnnnnnnnnnnnnnnnnnnnnnnnnnnnnnnnnnnnnnnnnnnnnnnnnnnnnnnnnnnnnnnnnnnnnnnnnnnnnnnnnnnnnnnnnnnnnnnnnnnnnnnnnnnnnnnnnnnnnnnnnnnnnnnnnnnnnnnnnnnnnnnnnnnnnnnnnnnnnnnnnnnnnnnnnnnnnnnnnnnnnnnnnnnnnnnnnnnnnnnnnnnnnnnnnnnnnnnnnnnnnnnnnnnnnnnnnnnnnnnnnnnnnnnnnnnnnnnnnnnnnnnnnnnnnnnnnnnnnnnnnnnnnnnnnnnnnnnnnnnnnnnnnnnnnnnnnnnnnnnnnnnnnnnnnnnnnnnnnnnnnnnnnnnnnnnnnnnnnnnnnnnnnnnnnnnnnnnnnnnnnnnnnnnnnnnnnnnnnnnnnnnnnnnnnnnnnnnnnnnnnnnnnnnnnnnnnnnnnnnnnnnnnnnnnnnnnnnnnnnnnnnnnnnnnnnnnnnnnnnnnnnnnnnnnnnnnnnnnnnnnnnnnnnnnnnnnnnnnnnnnnnnnnnnnnnnnnnnnnnnnnnnnnnnnnnnnnnnnnnnnnnnnnnnnnnnnnnnnnnnnnnnnnnnnnnnnnnnnnnnnnnnnnnnnnnnnnnnnnnnnnnnnnnnnnnnnnnnnnnnnnnnnnnnnnnnnnnnnnnnnnnnnnnnnnnnnnnnnnnnnnnnnnnnnnnnnnnnnnnnnnnnnnnnnnnnnnnnnnnnnnnnnnnnnnnnnnnnnnnnnnnnnnnnnnnnnnnnnnnnnnnnnnnnnnnnnnnnnnnnnnnnnnnnnnnnnnnnnnnnnnnnnnnnnnnnnnnnnnnnnnnnnnnnnnnnnnnnnnnnnnnnnnnnnnnnnnnnnnnnnnnnnnnnnnnnnnnnnnnnnnnnnnnnnnnnnnnnnnnnnnnnnnnnnnnnnnnnnnnnnnnnnnnnnnnnnnnnnnnnnnnnnnnnnnnnnnnnnnnnnnnnnnnnnnnnnnnnnnnnnnnnnnnnnnnnnnnnnnnnnnnnnnnnnnnnnnnnnnnnnnnnnnnnnnnnnnnnnnnnnnnnnnnnnnnnnnnnnnnnnnnnnnnnnnnnnnnnnnnnnnnnnnnnnnnnnnnnnnnnnnnnnnnnnnnnnnnnnnnnnnnnnnnnnnnnnnnnnnnnnnnnnnnnnnnnnnnnnnnnnnnnnnnnnnnnnnnnnnnnnnnnnnnnnnnnnnnnnnnnnnnnnnnnnnnnnnnnnnnnnnnnnnnnnnnnnnnnnnnnnnnnnnnnnnnnnnnnnnnnnnnnnnnnnnnnnnnnnnnnnnnnnnnnnnnnnnnnnnnnnnnnnnnnnnnnnnnnnnnnnnnnnnnnnnnnnnnnnnnnnnnnnnnnnnnnnnnnnnnnnnnnnnnnnnnnnnnnnnnnnnnnnnnnnnnnnnnnnnnnnnnnnnnnnnnnnnnnnnnnnnnnnnnnnnnnnnnnnnnnnnnnnnnnnnnnnnnnnnnnnnnnnnnnnnnnnnnnnnnnnnnnnnnnnnnnnnnnnnnnnnnnnnnnnnnnnnnnnnnnnnnnnnnnnnnnnnnnnnnnnnnnnnnnnnnnnnnnnnnnnnnnnnnnnnnnnnnnnnnnnnnnnnnnnnnnnnnnnnnnnnnnnnnnnnnnnnnnnnnnnnnnnnnnnnnnnnnnnnnnnnnnnnnnnnnnnnnnnnnnnnnnnnnnnnnnnnnnnnnnnnnnnnnnnnnnnnnnnnnnnnnnnnnnnnnnnnnnnnnnnnnnnnnnnnnnnnnnnnnnnnnnnnnnnnnnnnnnnnnnnnnnnnnnnnnnnnnnnnnnnnnnnnnnnnnnnnnnnnnnnnnnnnnnnnnnnnnnnnnnnnnnnnnnnnnnnnnnnnnnnnnnnnnnnnnnnnnnnnnnnnnnnnnnnnnnnnnnnnnnnnnnnnnnnnnnnnnnnnnnnnnnnnnnnnnnnnnnnnnnnnnnnnnnnnnnnnnnnnnnnnnnnnnnnnnnnnnnnnnnnnnnnnnnnnnnnnnnnnnnnnnnnnnnnnnnnnnnnnnnnnnnnnnnnnnnnnnnnnnnnnnnnnnnnnnnnnnnnnnnnnnnnnnnnnnnnnnnnnnnnnnnnnnnnnnnnnnnnnnnnnnnnnnnnnnnnnnnnnnnnnnnnnnnnnnnnnnnnnnnnnnnnnnnnnnnnnnnnnnnnnnnnnnnnnnnnnnnnnnnnnnnnnnnnnnnnnnnnnnnnnnnnnnnnnnnnnnnnnnnnnnnnnnnnnnnnnnnnnnnnnnnnnnnnnnnnnnnnnnnnnnnnnnnnnnnnnnnnnnnnnnnnnnnnnnnnnnnnnnnnnnnnnnnnnnnnnnnnnnnnnnnnnnnnnnnnnnnnnnnnnnnnnnnnnnnnnnnnnnnnnnnnnnnnnnnnnnnnnnnnnnnnnnnnnnnnnnnnnnnnnnnnnnnnnnnnnnnnnnnnnnnnnnnnnnnnnnnnnnnnnnnnnnnnnnnnnnnnnnnnnnnnnnnnnnnnnnnnnnnnnnnnnnnnnnnnnnnnnnnnnnnnnnnnnnnnnnnnnnnnnnnnnnnnnnnnnnnnnnnnnnnnnnnnnnnnnnnnnnnnnnnnnnnnnnnnnnnnnnnnnnnnnnnnnnnnnnnnnnnnnnnnnnnnnnnnnnnnnnnnnnnnnnnnnnnnnnnnnnnnnnnnnnnnnnnnnnnnnnnnnnnnnnnnnnnnnnnnnnnnnnnnnnnnnnnnnnnnnnnnnnnnnnnnnnnnnnnnnnnnnnnnnnnnnnnnnnnnnnnnnnnnnnnnnnnnnnnnnnnnnnnnnnnnnnnnnnnnnnnnnnnnnnnnnnnnnnnnnnnnnnnnnnnnnnnnnnnnnnnnnnnnnnnnnnnnnnnnnnnnnnnnnnnnnnnnnnnnnnnnnnnnnnnnnnnnnnnnnnnnnnnnnnnnnnnnnnnnnnnnnnnnnnnnnnnnnnnnnnnnnnnnnnnnnnnnnnnnnnnnnnnnnnnnnnnnnnnnnnnnnnnnnnnnnnnnnnnnnnnnnnnnnnnnnnnnnnnnnnnnnnnnnnnnnnnnnnnnnnnnnnnnnnnnnnnnnnnnnnnnnnnnnnnnnnnnnnnnnnnnnnnnnnnnnnnnnnnnnnnnnnnnnnnnnnnnnnnnnnnnnnnnnnnnnnnnnnnnnnnnnnnnnnnnnnnnnnnnnnnnnnnnnnnnnnnnnnnnnnnnnnnnnnnnnnnnnnnnnnnnnnnnnnnnnnnnnnnnnnnnnnnnnnnnnnnnnnnnnnnnnnnnnnnnnnnnnnnnnnnnnnnnnnnnnnnnnnnnnnnnnnnnnnnnnnnnnnnnnnnnnnnnnnnnnnnnnnnnnnnnnnnnnnnnnnnnnnnnnnnnnnnnnnnnnnnnnnnnnnnnnnnnnnnnnnnnnnnnnnnnnnnnnnnnnnnnnnnnnnnnnnnnnnnnnnnnnnnnnnnnnnnnnnnnnnnnnnnnnnnnnnnnnnnnnnnnnnnnnnnnnnnnnnnnnnnnnnnnnnnnnnnnnnnnnnnnnnnnnnnnnnnnnnnnnnnnnnnnnnnnnnnnnnnnnnnnnnnnnnnnnnnnnnnnnnnnnnnnnnnnnnnnnnnnnnnnnnnnnnnnnnnnnnnnnnnnnnnnnnnnnnnnnnnnnnnnnnnnnnnnnnnnnnnnnnnnnnnnnnnnnnnnnnnnnnnnnnnnnnnnnnnnnnnnnnnnnnnnnnnnnnnnnnnnnnnnnnnnnnnnnnnnnnnnnnnnnnnnnnnnnnnnnnnnnnnnnnnnnnnnnnnnnnnnnnnnnnnnnnnnnnnnnnnnnnnnnnnnnnnnnnnnnnnnnnnnnnnnnnnnnnnnnnnnnnnnnnnnnnnnnnnnnnnnnnnnnnnnnnnnnnnnnnnnnnnnnnnnnnnnnnnnnnnnnnnnnnnnnnnnnnnnnnnnnnnnnnnnnnnnnnnnnnnnnnnnnnnnnnnnnnnnnnnnnnnnnnnnnnnnnnnnnnnnnnnnnnnnnnnnnnnnnnnnnnnnnnnnnnnnnnnnnnnnnnnnnnnnnnnnnnnnnnnnnnnnnnnnnnnnnnnnnnnnnnnnnnnnnnnnnnnnnnnnnnnnnnnnnnnnnnnnnnnnnnnnnnnnnnnnnnnnnnnnnnnnnnnnnnnnnnnnnnnnnnnnnnnnnnnnnnnnnnnnnnnnnnnnnnnnnnnnnnnnnnnnnnnnnnnnnnnnnnnnnnnnnnnnnnnnnnnnnnnnnnnnnnnnnnnnnnnnnnnnnnnnnnnnnnnnnnnnnnnnnnnnnnnnnnnnnnnnnnnnnnnnnnnnnnnnnnnnnnnnnnnnnnnnnnnnnnnnnnnnnnnnnnnnnnnnnnnnnnnnnnnnnnnnnnnnnnnnnnnnnnnnnnnnnnnnnnnnnnnnnnnnnnnnnnnnnnnnnnnnnnnnnnnnnnnnnnnnnnnnnnnnnnnnnnnnnnnnnnnnnnnnnnnnnnnnnnnnnnnnnnnnnnnnnnnnnnnnnnnnnnnnnnnnnnnnnnnnnnnnnnnnnnnnnnnnnnnnnnnnnnnnnnnnnnnnnnnnnnnnnnnnnnnnnnnnnnnnnnnnnnnnnnnnnnnnnnnnnnnnnnnnnnnnnnnnnnnnnnnnnnnnnnnnnnnnnnnnnnnnnnnnnnnnnnnnnnnnnnnnnnnnnnnnnnnnnnnnnnnnnnnnnnnnnnnnnnnnnnnnnnnnnnnnnnnnnnnnnnnnnnnnnnnnnnnnnnnnnnnnnnnnnnnnnnnnnnnnnnnnnnnnnnnnnnnnnnnnnnnnnnnnnnnnnnnnnnnnnnnnnnnnnnnnnnnnnnnnnnnnnnnnnnnnnnnnnnnnnnnnnnnnnnnnnnnnnnnnnnnnnnnnnnnnnnnnnnnnnnnnnnnnnnnnnnnnnnnnnnnnnnnnnnnnnnnnnnnnnnnnnnnnnnnnnnnnnnnnnnnnnnnnnnnnnnnnnnnnnnnnnnnnnnnnnnnnnnnnnnnnnnnnnnnnnnnnnnnnnnnnnnnnnnnnnnnnnnnnnnnnnnnnnnnnnnnnnnnnnnnnnnnnnnnnnnnnnnnnnnnnnnnnnnnnnnnnnnnnnnnnnnnnnnnnnnnnnnnnnnnnnnnnnnnnnnnnnnnnnnnnnnnnnnnnnnnnnnnnnnnnnnnnnnnnnnnnnnnnnnnnnnnnnnnnnnnnnnnnnnnnnnnnnnnnnnnnnnnnnnnnnnnnnnnnnnnnnnnnnnnnnnnnnnnnnnnnnnnnnnnnnnnnnnnnnnnnnnnnnnnnnnnnnnnnnnnnnnnnnnnnnnnnnnnnnnnnnnnnnnnnnnnnnnnnnnnnnnnnnnnnnnnnnnnnnnnnnnnnnnnnnnnnnnnnnnnnnnnnnnnnnnnnnnnnnnnnnnnnnnnnnnnnnnnnnnnnnnnnnnnnnnnnnnnnnnnnnnnnnnnnnnnnnnnnnnnnnnnnnnnnnnnnnnnnnnnnnnnnnnnnnnnnnnnnnnnnnnnnnnnnnnnnnnnnnnnnnnnnnnnnnnnnnnnnnnnnnnnnnnnnnnnnnnnnnnnnnnnnnnnnnnnnnnnnnnnnnnnnnnnnnnnnnnnnnnnnnnnnnnnnnnnnnnnnnnnnnnnnnnnnnnnnnnnnnnnnnnnnnnnnnnnnnnnnnnnnnnnnnnnnnnnnnnnnnnnnnnnnnnnnnnnnnnnnnnnnnnnnnnnnnnnnnnnnnnnnnnnnnnnnnnnnnnnnnnnnnnnnnnnnnnnnnnnnnnnnnnnnnnnnnnnnnnnnnnnnnnnnnnnnnnnnnnnnnnnnnnnnnnnnnnnnnnnnnnnnnnnnnnnnnnnnnnnnnnnnnnnnnnnnnnnnnnnnnnnnnnnnnnnnnnnnnnnnnnnnnnnnnnnnnnnnnnnnnnnnnnnnnnnnnnnnnnnnnnnnnnnnnnnnnnnnnnnnnnnnnnnnnnnnnnnnnnnnnnnnnnnnnnnnnnnnnnnnnnnnnnnnnnnnnnnnnnnnnnnnnnnnnnnnnnnnnnnnnnnnnnnnnnnnnnnnnnnnnnnnnnnnnnnnnnnnnnnnnnnnnnnnnnnnnnnnnnnnnnnnnnnnnnnnnnnnnnnnnnnnnnnnnnnnnnnnnnnnnnnnnnnnnnnnnnnnnnnnnnnnnnnnnnnnnnnnnnnnnnnnnnnnnnnnnnnnnnnnnnnnnnnnnnnnnnnnnnnnnnnnnnnnnnnnnnnnnnnnnnnnnnnnnnnnnnnnnnnnnnnnnnnnnnnnnnnnnnnnnnnnnnnnnnnnnnnnnnnnnnnnnnnnnnnnnnnnnnnnnnnnnnnnnnnnnnnnnnnnnnnnnnnnnnnnnnnnnnnnnnnnnnnnnnnnnnnnnnnnnnnnnnnnnnnnnnnnnnnnnnnnnnnnnnnnnnnnnnnnnnnnnnnnnnnnnnnnnnnnnnnnnnnnnnnnnnnnnnnnnnnnnnnnnnnnnnnnnnnnnnnnnnnnnnnnnnnnnnnnnnnnnnnnnnnnnnnnnnnnnnnnnnnnnnnnnnnnnnnnnnnnnnnnnnnnnnnnnnnnnnnnnnnnnnnnnnnnnnnnnnnnnnnnnnnnnnnnnnnnnnnnnnnnnnnnnnnnnnnnnnnnnnnnnnnnnnnnnnnnnnnnnnnnnnnnnnnnnnnnnnnnnnnnnnnnnnnnnnnnnnnnnnnnnnnnnnnnnnnnnnnnnnnnnnnnnnnnnnnnnnnnnnnnnnnnnnnnnnnnnnnnnnnnnnnnnnnnnnnnnnnnnnnnnnnnnnnnnnnnnnnnnnnnnnnnnnnnnnnnnnnnnnnnnnnnnnnnnnnnnnnnnnnnnnnnnnnnnnnnnnnnnnnnnnnnnnnnnnnnnnnnnnnnnnnnnnnnnnnnnnnnnnnnnnnnnnnnnnnnnnnnnnnnnnnnnnnnnnnnnnnnnnnnnnnnnnnnnnnnnnnnnnnnnnnnnnnnnnnnnnnnnnnnnnnnnnnnnnnnnnnnnnnnnnnnnnnnnnnnnnnnnnnnnnnnnnnnnnnnnnnnnnnnnnnnnnnnnnnnnnnnnnnnnnnnnnnnnnnnnnnnnnnnnnnnnnnnnnnnnnnnnnnnnnnnnnnnnnnnnnnnnnnnnnnnnnnnnnnnnnnnnnnnnnnnnnnnnnnnnnnnnnnnnnnnnnnnnnnnnnnnnnnnnnnnnnnnnnnnnnnnnnnnnnnnnnnnnnnnnnnnnnnnnnnnnnnnnnnnnnnnnnnnnnnnnnnnnnnnnnnnnnnnnnnnnnnnnnnnnnnnnnnnnnnnnnnnnnnnnnnnnnnnnnnnnnnnnnnnnnnnnnnnnnnnnnnnnnnnnnnnnnnnnnnnnnnnnnnnnnnnnnnnnnnnnnnnnnnnnnnnnnnnnnnnnnnnnnnnnnnnnnnnnnnnnnnnnnnnnnnnnnnnnnnnnnnnnnnnnnnnnnnnnnnnnnnnnnnnnnnnnnnnnnnnnnnnnnnnnnnnnnnnnnnnnnnnnnnnnnnnnnnnnnnnnnnnnnnnnnnnnnnnnnnnnnnnnnnnnnnnnnnnnnnnnnnnnnnnnnnnnnnnnnnnnnnnnnnnnnnnnnnnnnnnnnnnnnnnnnnnnnnnnnnnnnnnnnnnnnnnnnnnnnnnnnnnnnnnnnnnnnnnnnnnnnnnnnnnnnnnnnnnnnnnnnnnnnnnnnnnnnnnnnnnnnnnnnnnnnnnnnnnnnnnnnnnnnnnnnnnnnnnnnnnnnnnnnnnnnnnnnnnnnnnnnnnnnnnnnnnnnnnnnnnnnnnnnnnnnnnnnnnnnnnnnnnnnnnnnnnnnnnnnnnnnnnnnnnnnnnnnnnnnnnnnnnnnnnnnnnnnnnnnnnnnnnnnnnnnnnnnnnnnnnnnnnnnnnnnnnnnnnnnnnnnnnnnnnnnnnnnnnnnnnnnnnnnnnnnnnnnnnnnnnnnnnnnnnnnnnnnnnnnnnnnnnnnnnnnnnnnnnnnnnnnnnnnnnnnnnnnnnnnnnnnnnnnnnnnnnnnnnnnnnnnnnnnnnnnnnnnnnnnnnnnnnnnnnnnnnnnnnnnnnnnnnnnnnnnnnnnnnnnnnnnnnnnnnnnnnnnnnnnnnnnnnnnnnnnnnnnnnnnnnnnnnnnnnnnnnnnnnnnnnnnnnnnnnnnnnnnnnnnnnnnnnnnnnnnnnnnnnnnnnnnnnnnnnnnnnnnnnnnnnnnnnnnnnnnnnnnnnnnnnnnnnnnnnnnnnnnnnnnnnnnnnnnnnnnnnnnnnnnnnnnnnnnnnnnnnnnnnnnnnnnnnnnnnnnnnnnnnnnnnnnnnnnnnnnnnnnnnnnnnnnnnnnnnnnnnnnnnnnnnnnnnnnnnnnnnnnnnnnnnnnnnnnnnnnnnnnnnnnnnnnnnnnnnnnnnnnnnnnnnnnnnnnnnnnnnnnnnnnnnnnnnnnnnnnnnnnnnnnnnnnnnnnnnnnnnnnnnnnnnnnnnnnnnnnnnnnnnnnnnnnnnnnnnnnnnnnnnnnnnnnnnnnnnnnnnnnnnnnnnnnnnnnnnnnnnnnnnnnnnnnnnnnnnnnnnnnnnnnnnnnnnnnnnnnnnnnnnnnnnnnnnnnnnnnnnnnnnnnnnnnnnnnnnnnnnnnnnnnnnnnnnnnnnnnnnnnnnnnnnnnnnnnnnnnnnnnnnnnnnnnnnnnnnnnnnnnnnnnnnnnnnnnnnnnnnnnnnnnnnnnnnnnnnnnnnnnnnnnnnnnnnnnnnnnnnnnnnnnnnnnnnnnnnnnnnnnnnnnnnnnnnnnnnnnnnnnnnnnnnnnnnnnnnnnnnnnnnnnnnnnnnnnnnnnnnnnnnnnnnnnnnnnnnnnnnnnnnnnnnnnnnnnnnnnnnnnnnnnnnnnnnnnnnnnnnnnnnnnnnnnnnnnnnnnnnnnnnnnnnnnnnnnnnnnnnnnnnnnnnnnnnnnnnnnnnnnnnnnnnnnnnnnnnnnnnnnnnnnnnnnnnnnnnnnnnnnnnnnnnnnnnnnnnnnnnnnnnnnnnnnnnnnnnnnnnnnnnnnnnnnnnnnnnnnnnnnnnnnnnnnnnnnnnnnnnnnnnnnnnnnnnnnnnnnnnnnnnnnnnnnnnnnnnnnnnnnnnnnnnnnnnnnnnnnnnnnnnnnnnnnnnnnnnnnnnnnnnnnnnnnnnnnnnnnnnnnnnnnnnnnnnnnnnnnnnnnnnnnnnnnnnnnnnnnnnnnnnnnnnnnnnnnnnnnnnnnnnnnnnnnnnnnnnnnnnnnnnnnnnnnnnnnnnnnnnnnnnnnnnnnnnnnnnnnnnnnnnnnnnnnnnnnnnnnnnnnnnnnnnnnnnnnnnnnnnnnnnnnnnnnnnnnnnnnnnnnnnnnnnnnnnnnnnnnnnnnnnnnnnnnnnnnnnnnnnnnnnnnnnnnnnnnnnnnnnnnnnnnnnnnnnnnnnnnnnnnnnnnnnnnnnnnnnnnnnnnnnnnnnnnnnnnnnnnnnnnnnnnnnnnnnnnnnnnnnnnnnnnnnnnnnnnnnnnnnnnnnnnnnnnnnnnnnnnnnnnnnnnnnnnnnnnnnnnnnnnnnnnnnnnnnnnnnnnnnnnnnnnnnnnnnnnnnnnnnnnnnnnnnnnnnnnnnnnnnnnnnnnnnnnnnnnnnnnnnnnnnnnnnnnnnnnnnnnnnnnnnnnnnnnnnnnnnnnnnnnnnnnnnnnnnnnnnnnnnnnnnnnnnnnnnnnnnnnnnnnnnnnnnnnnnnnnnnnnnnnnnnnnnnnnnnnnnnnnnnnnnnnnnnnnnnnnnnnnnnnnnnnnnnnnnnnnnnnnnnnnnnnnnnnnnnnnnnnnnnnnnnnnnnnnnnnnnnnnnnnnnnnnnnnnnnnnnnnnnnnnnnnnnnnnnnnnnnnnnnnnnnnnnnnnnnnnnnnnnnnnnnnnnnnnnnnnnnnnnnnnnnnnnnnnnnnnnnnnnnnnnnnnnnnnnnnnnnnnnnnnnnnnnnnnnnnnnnnnnnnnnnnnnnnnnnnnnnnnnnnnnnnnnnnnnnnnnnnnnnnnnnnnnnnnnnnnnnnnnnnnnnnnnnnnnnnnnnnnnnnnnnnnnnnnnnnnnnnnnnnnnnnnnnnnnnnnnnnnnnnnnnnnnnnnnnnnnnnnnnnnnnnnnnnnnnnnnnnnnnnnnnnnnnnnnnnnnnnnnnnnnnnnnnnnnnnnnnnnnnnnnnnnnnnnnnnnnnnnnnnnnnnnnnnnnnnnnnnnnnnnnnnnnnnnnnnnnnnnnnnnnnnnnnnnnnnnnnnnnnnnnnnnnnnnnnnnnnnnnnnnnnnnnnnnnnnnnnnnnnnnnnnnnnnnnnnnnnnnnnnnnnnnnnnnnnnnnnnnnnnnnnnnnnnnnnnnnnnnnnnnnnnnnnnnnnnnnnnnnnnnnnnnnnnnnnnnnnnnnnnnnnnnnnnnnnnnnnnnnnnnnnnnnnnnnnnnnnnnnnnnnnnnnnnnnnnnnnnnnnnnnnnnnnnnnnnnnnnnnnnnnnnnnnnnnnnnnnnnnnnnnnnnnnnnnnnnnnnnnnnnnnnnnnnnnnnnnnnnnnnnnnnnnnnnnnnnnnnnnnnnnnnnnnnnnnnnnnnnnnnnnnnnnnnnnnnnnnnnnnnnnnnnnnnnnnnnnnnnnnnnnnnnnnnnnnnnnnnnnnnnnnnnnnnnnnnnnnnnnnnnnnnnnnnnnnnnnnnnnnnnnnnnnnnnnnnnnnnnnnnnnnnnnnnnnnnnnnnnnnnnnnnnnnnnnnnnnnnnnnnnnnnnnnnnnnnnnnnnnnnnnnnnnnnnnnnnnnnnnnnnnnnnnnnnnnnnnnnnnnnnnnnnnnnnnnnnnnnnnnnnnnnnnnnnnnnnnnnnnnnnnnnnnnnnnnnnnnnnnnnnnnnnnnnnnnnnnnnnnnnnnnnnnnnnnnnnnnnnnnnnnnnnnnnnnnnnnnnnnnnnnnnnnnnnnnnnnnnnnnnnnnnnnnnnnnnnnnnnnnnnnnnnnnnnnnnnnnnnnnnnnnnnnnnnnnnnnnnnnnnnnnnnnnnnnnnnnnnnnnnnnnnnnnnnnnnnnnnnnnnnnnnnnnnnnnnnnnnnnnnnnnnnnnnnnnnnnnnnnnnnnnnnnnnnnnnnnnnnnnnnnnnnnnnnnnnnnnnnnnnnnnnnnnnnnnnnnnnnnnnnnnnnnnnnnnnnnnnnnnnnnnnnnnnnnnnnnnnnnnnnnnnnnnnnnnnnnnnnnnnnnnnnnnnnnnnnnnnnnnnnnnnnnnnnnnnnnnnnnnnnnnnnnnnnnnnnnnnnnnnnnnnnnnnnnnnnnnnnnnnnnnnnnnnnnnnnnnnnnnnnnnnnnnnnnnnnnnnnnnnnnnnnnnnnnnnnnnnnnnnnnnnnnnnnnnnnnnnnnnnnnnnnnnnnnnnnnnnnnnnnnnnnnnnnnnnnnnnnnnnnnnnnnnnnnnnnnnnnnnnnnnnnnnnnnnnnnnnnnnnnnnnnnnnnnnnnnnnnnnnnnnnnnnnnnnnnnnnnnnnnnnnnnnnnnnnnnnnnnnnnnnnnnnnnnnnnnnnnnnnnnnnnnnnnnnnnnnnnnnnnnnnnnnnnnnnnnnnnnnnnnnnnnnnnnnnnnnnnnnnnnnnnnnnnnnnnnnnnnnnnnnnnnnnnnnnnnnnnnnnnnnnnnnnnnnnnnnnnnnnnnnnnnnnnnnnnnnnnnnnnnnnnnnnnnnnnnnnnnnnnnnnnnnnnnnnnnnnnnnnnnnnnnnnnnnnnnnnnnnnnnnnnnnnnnnnnnnnnnnnnnnnnnnnnnnnnnnnnnnnnnnnnnnnnnnnnnnnnnnnnnnnnnnnnnnnnnnnnnnnnnnnnnnnnnnnnnnnnnnnnnnnnnnnnnnnnnnnnnnnnnnnnnnnnnnnnnnnnnnnnnnnnnnnnnnnnnnnnnnnnnnnnnnnnnnnnnnnnnnnnnnnnnnnnnnnnnnnnnnnnnnnnnnnnnnnnnnnnnnnnnnnnnnnnnnnnnnnnnnnnnnnnnnnnnnnnnnnnnnnnnnnnnnnnnnnnnnnnnnnnnnnnnnnnnnnnnnnnnnnnnnnnnnnnnnnnnnnnnnnnnnnnnnnnnnnnnnnnnnnnnnnnnnnnnnnnnnnnnnnnnnnnnnnnnnnnnnnnnnnnnnnnnnnnnnnnnnnnnnnnnnnnnnnnnnnnnnnnnnnnnnnnnnnnnnnnnnnnnnnnnnnnnnnnnnnnnnnnnnnnnnnnnnnnnnnnnnnnnnnnnnnnnnnnnnnnnnnnnnnnnnnnnnnnnnnnnnnnnnnnnnnnnnnnnnnnnnnnnnnnnnnnnnnnnnnnnnnnnnnnnnnnnnnnnnnnnnnnnnnnnnnnnnnnnnnnnnnnnnnnnnnnnnnnnnnnnnnnnnnnnnnnnnnnnnnnnnnnnnnnnnnnnnnnnnnnnnnnnnnnnnnnnnnnnnnnnnnnnnnnnnnnnnnnnnnnnnnnnnnnnnnnnnnnnnnnnnnnnnnnnnnnnnnnnnnnnnnnnnnnnnnnnnnnnnnnnnnnnnnnnnnnnnnnnnnnnnnnnnnnnnnnnnnnnnnnnnnnnnnnnnnnnnnnnnnnnnnnnnnnnnnnnnnnnnnnnnnnnnnnnnnnnnnnnnnnnnnnnnnnnnnnnnnnnnnnnnnnnnnnnnnnnnnnnnnnnnnnnnnnnnnnnnnnnnnnnnnnnnnnnnnnnnnnnnnnnnnnnnnnnnnnnnnnnnnnnnnnnnnnnnnnnnnnnnnnnnnnnnnnnnnnnnnnnnnnnnnnnnnnnnnnnnnnnnnnnnnnnnnnnnnnnnnnnnnnnnnnnnnnnnnnnnnnnnnnnnnnnnnnnnnnnnnnnnnnnnnnnnnnnnnnnnnnnnnnnnnnnnnnnnnnnnnnnnnnnnnnnnnnnnnnnnnnnnnnnnnnnnnnnnnnnnnnnnnnnnnnnnnnnnnnnnnnnnnnnnnnnnnnnnnnnnnnnnnnnnnnnnnnnnnnnnnnnnnnnnnnnnnnnnnnnnnnnnnnnnnnnnnnnnnnnnnnnnnnnnnnnnnnnnnnnnnnnnnnnnnnnnnnnnnnnnnnnnnnnnnnnnnnnnnnnnnnnnnnnnnnnnnnnnnnnnnnnnnnnnnnnnnnnnnnnnnnnnnnnnnnnnnnnnnnnnnnnnnnnnnnnnnnnnnnnnnnnnnnnnnnnnnnnnnnnnnnnnnnnnnnnnnnnnnnnnnnnnnnnnnnnnnnnnnnnnnnnnnnnnnnnnnnnnnnnnnnnnnnnnnnnnnnnnnnnnnnnnnnnnnnnnnnnnnnnnnnnnnnnnnnnnnnnnnnnnnnnnnnnnnnnnnnnnnnnnnnnnnnnnnnnnnnnnnnnnnnnnnnnnnnnnnnnnnnnnnnnnnnnnnnnnnnnnnnnnnnnnnnnnnnnnnnnnnnnnnnnnnnnnnnnnnnnnnnnnnnnnnnnnnnnnnnnnnnnnnnnnnnnnnnnnnnnnnnnnnnnnnnnnnnnnnnnnnnnnnnnnnnnnnnnnnnnnnnnnnnnnnnnnnnnnnnnnnnnnnnnnnnnnnnnnnnnnnnnnnnnnnnnnnnnnnnnnnnnnnnnnnnnnnnnnnnnnnnnnnnnnnnnnnnnnnnnnnnnnnnnnnnnnnnnnnnnnnnnnnnnnnnnnnnnnnnnnnnnnnnnnnnnnnnnnnnnnnnnnnnnnnnnnnnnnnnnnnnnnnnnnnnnnnnnnnnnnnnnnnnnnnnnnnnnnnnnnnnnnnnnnnnnnnnnnnnnnnnnnnnnnnnnnnnnnnnnnnnnnnnnnnnnnnnnnnnnnnnnnnnnnnnnnnnnnnnnnnnnnnnnnnnnnnnnnnnnnnnnnnnnnnnnnnnnnnnnnnnnnnnnnnnnnnnnnnnnnnnnnnnnnnnnnnnnnnnnnnnnnnnnnnnnnnnnnnnnnnnnnnnnnnnnnnnnnnnnnnnnnnnnnnnnnnnnnnnnnnnnnnnnnnnnnnnnnnnnnnnnnnnnnnnnnnnnnnnnnnnnnnnnnnnnnnnnnnnnnnnnnnnnnnnnnnnnnnnnnnnnnnnnnnnnnnnnnnnnnnnnnnnnnnnnnnnnnnnnnnnnnnnnnnnnnnnnnnnnnnnnnnnnnnnnnnnnnnnnnnnnnnnnnnnnnnnnnnnnnnnnnnnnnnnnnnnnnnnnnnnnnnnnnnnnnnnnnnnnnnnnnnnnnnnnnnnnnnnnnnnnnnnnnnnnnnnnnnnnnnnnnnnnnnnnnnnnnnnnnnnnnnnnnnnnnnnnnnnnnnnnnnnnnnnnnnnnnnnnnnnnnnnnnnnnnnnnnnnnnnnnnnnnnnnnnnnnnnnnnnnnnnnnnnnnnnnnnnnnnnnnnnnnnnnnnnnnnnnnnnnnnnnnnnnnnnnnnnnnnnnnnnnnnnnnnnnnnnnnnnnnnnnnnnnnnnnnnnnnnnnnnnnnnnnnnnnnnnnnnnnnnnnnnnnnnnnnnnnnnnnnnnnnnnnnnnnnnnnnnnnnnnnnnnnnnnnnnnnnnnnnnnnnnnnnnnnnnnnnnnnnnnnnnnnnnnnnnnnnnnnnnnnnnnnnnnnnnnnnnnnnnnnnnnnnnnnnnnnnnnnnnnnnnnnnnnnnnnnnnnnnnnnnnnnnnnnnnnnnnnnnnnnnnnnnnnnnnnnnnnnnnnnnnnnnnnnnnnnnnnnnnnnnnnnnnnnnnnnnnnnnnnnnnnnnnnnnnnnnnnnnnnnnnnnnnnnnnnnnnnnnnnnnnnnnnnnnnnnnnnnnnnnnnnnnnnnnnnnnnnnnnnnnnnnnnnnnnnnnnnnnnnnnnnnnnnnnnnnnnnnnnnnnnnnnnnnnnnnnnnnnnnnnnnnnnnnnnnnnnnnnnnnnnnnnnnnnnnnnnnnnnnnnnnnnnnnnnnnnnnnnnnnnnnnnnnnnnnnnnnnnnnnnnnnnnnnnnnnnnnnnnnnnnnnnnnnnnnnnnnnnnnnnnnnnnnnnnnnnnnnnnnnnnnnnnnnnnnnnnnnnnnnnnnnnnnnnnnnnnnnnnnnnnnnnnnnnnnnnnnnnnnnnnnnnnnnnnnnnnnnnnnnnnnnnnnnnnnnnnnnnnnnnnnnnnnnnnnnnnnnnnnnnnnnnnnnnnnnnnnnnnnnnnnnnnnnnnnnnnnnnnnnnnnnnnnnnnnnnnnnnnnnnnnnnnnnnnnnnnnnnnnnnnnnnnnnnnnnnnnnnnnnnnnnnnnnnnnnnnnnnnnnnnnnnnnnnnnnnnnnnnnnnnnnnnnnnnnnnnnnnnnnnnnnnnnnnnnnnnnnnnnnnnnnnnnnnnnnnnnnnnnnnnnnnnnnnnnnnnnnnnnnnnnnnnnnnnnnnnnnnnnnnnnnnnnnnnnnnnnnnnnnnnnnnnnnnnnnnnnnnnnnnnnnnnnnnnnnnnnnnnnnnnnnnnnnnnnnnnnnnnnnnnnnnnnnnnnnnnnnnnnnnnnnnnnnnnnnnnnnnnnnnnnnnnnnnnnnnnnnnnnnnnnnnnnnnnnnnnnnnnnnnnnnnnnnnnnnnnnnnnnnnnnnnnnnnnnnnnnnnnnnnnnnnnnnnnnnnnnnnnnnnnnnnnnnnnnnnnnnnnnnnnnnnnnnnnnnnnnnnnnnnnnnnnnnnnnnnnnnnnnnnnnnnnnnnnnnnnnnnnnnnnnnnnnnnnnnnnnnnnnnnnnnnnnnnnnnnnnnnnnnnnnnnnnnnnnnnnnnnnnnnnnnnnnnnnnnnnnnnnnnnnnnnnnnnnnnnnnnnnnnnnnnnnnnnnnnnnnnnnnnnnnnnnnnnnnnnnnnnnnnnnnnnnnnnnnnnnnnnnnnnnnnnnnnnnnnnnnnnnnnnnnnnnnnnnnnnnnnnnnnnnnnnnnnnnnnnnnnnnnnnnnnnnnnnnnnnnnnnnnnnnnnnnnnnnnnnnnnnnnnnnnnnnnnnnnnnnnnnnnnnnnnnnnnnnnnnnnnnnnnnnnnnnnnnnnnnnnnnnnnnnnnnnnnnnnnnnnnnnnnnnnnnnnnnnnnnnnnnnnnnnnnnnnnnnnnnnnnnnnnnnnnnnnnnnnnnnnnnnnnnnnnnnnnnnnnnnnnnnnnnnnnnnnnnnnnnnnnnnnnnnnnnnnnnnnnnnnnnnnnnnnnnnnnnnnnnnnnnnnnnnnnnnnnnnnnnnnnnnnnnnnnnnnnnnnnnnnnnnnnnnnnnnnnnnnnnnnnnnnnnnnnnnnnnnnnnnnnnnnnnnnnnnnnnnnnnnnnnnnnnnnnnnnnnnnnnnnnnnnnnnnnnnnnnnnnnnnnnnnnnnnnnnnnnnnnnnnnnnnnnnnnnnnnnnnnnnnnnnnnnnnnnnnnnnnnnnnnnnnnnnnnnnnnnnnnnnnnnnnnnnnnnnnnnnnnnnnnnnnnnnnnnnnnnnnnnnnnnnnnnnnnnnnnnnnnnnnnnnnnnnnnnnnnnnnnnnnnnnnnnnnnnnnnnnnnnnnnnnnnnnnnnnnnnnnnnnnnnnnnnnnnnnnnnnnnnnnnnnnnnnnnnnnnnnnnnnnnnnnnnnnnnnnnnnnnnnnnnnnnnnnnnnnnnnnnnnnnnnnnnnnnnnnnnnnnnnnnnnnnnnnnnnnnnnnnnnnnnnnnnnnnnnnnnnnnnnnnnnnnnnnnnnnnnnnnnnnnnnnnnnnnnnnnnnnnnnnnnnnnnnnnnnnnnnnnnnnnnnnnnnnnnnnnnnnnnnnnnnnnnnnnnnnnnnnnnnnnnnnnnnnnnnnnnnnnnnnnnnnnnnnnnnnnnnnnnnnnnnnnnnnnnnnnnnnnnnnnnnnnnnnnnnnnnnnnnnnnnnnnnnnnnnnnnnnnnnnnnnnnnnnnnnnnnnnnnnnnnnnnnnnnnnnnnnnnnnnnnnnnnnnnnnnnnnnnnnnnnnnnnnnnnnnnnnnnnnnnnnnnnnnnnnnnnnnnnnnnnnnnnnnnnnnnnnnnnnnnnnnnnnnnnnnnnnnnnnnnnnnnnnnnnnnnnnnnnnnnnnnnnnnnnnnnnnnnnnnnnnnnnnnnnnnnnnnnnnnnnnnnnnnnnnnnnnnnnnnnnnnnnnnnnnnnnnnnnnnnnnnnnnnnnnnnnnnnnnnnnnnnnnnnnnnnnnnnnnnnnnnnnnnnnnnnnnnnnnnnnnnnnnnnnnnnnnnnnnnnnnnnnnnnnnnnnnnnnnnnnnnnnnnnnnnnnnnnnnnnnnnnnnnnnnnnnnnnnnnnnnnnnnnnnnnnnnnnnnnnnnnnnnnnnnnnnnnnnnnnnnnnnnnnnnnnnnnnnnnnnnnnnnnnnnnnnnnnnnnnnnnnnnnnnnnnnnnnnnnnnnnnnnnnnnnnnnnnnnnnnnnnnnnnnnnnnnnnnnnnnnnnnnnnnnnnnnnnnnnnnnnnnnnnnnnnnnnnnnnnnnnnnnnnnnnnnnnnnnnnnnnnnnnnnnnnnnnnnnnnnnnnnnnnnnnnnnnnnnnnnnnnnnnnnnnnnnnnnnnnnnnnnnnnnnnnnnnnnnnnnnnnnnnnnnnnnnnnnnnnnnnnnnnnnnnnnnnnnnnnnnnnnnnnnnnnnnnnnnnnnnnnnnnnnnnnnnnnnnnnnnnnnnnnnnnnnnnnnnnnnnnnnnnnnnnnnnnnnnnnnnnnnnnnnnnnnnnnnnnnnnnnnnnnnnnnnnnnnnnnnnnnnnnnnnnnnnnnnnnnnnnnnnnnnnnnnnnnnnnnnnnnnnnnnnnnnnnnnnnnnnnnnnnnnnnnnnnnnnnnnnnnnnnnnnnnnnnnnnnnnnnnnnnnnnnnnnnnnnnnnnnnnnnnnnnnnnnnnnnnnnnnnnnnnnnnnnnnnnnnnnnnnnnnnnnnnnnnnnnnnnnnnnnnnnnnnnnnnnnnnnnnnnnnnnnnnnnnnnnnnnnnnnnnnnnnnnnnnnnnnnnnnnnnnnnnnnnnnnnnnnnnnnnnnnnnnnnnnnnnnnnnnnnnnnnnnnnnnnnnnnnnnnnnnnnnnnnnnnnnnnnnnnnnnnnnnnnnnnnnnnnnnnnnnnnnnnnnnnnnnnnnnnnnnnnnnnnnnnnnnnnnnnnnnnnnnnnnnnnnnnnnnnnnnnnnnnnnnnnnnnnnnnnnnnnnnnnnnnnnnnnnnnnnnnnnnnnnnnnnnnnnnnnnnnnnnnnnnnnnnnnnnnnnnnnnnnnnnnnnnnnnnnnnnnnnnnnnnnnnnnnnnnnnnnnnnnnnnnnnnnnnnnnnnnnnnnnnnnnnnnnnnnnnnnnnnnnnnnnnnnnnnnnnnnnnnnnnnnnnnnnnnnnnnnnnnnnnnnnnnnnnnnnnnnnnnnnnnnnnnnnnnnnnnnnnnnnnnnnnnnnnnnnnnnnnnnnnnnnnnnnnnnnnnnnnnnnnnnnnnnnnnnnnnnnnnnnnnnnnnnnnnnnnnnnnnnnnnnnnnnnnnnnnnnnnnnnnnnnnnnnnnnnnnnnnnnnnnnnnnnnnnnnnnnnnnnnnnnnnnnnnnnnnnnnnnnnnnnnnnnnnnnnnnnnnnnnnnnnnnnnnnnnnnnnnnnnnnnnnnnnnnnnnnnnnnnnnnnnnnnnnnnnnnnnnnnnnnnnnnnnnnnnnnnnnnnnnnnnnnnnnnnnnnnnnnnnnnnnnnnnnnnnnnnnnnnnnnnnnnnnnnnnnnnnnnnnnnnnnnnnnnnnnnnnnnnnnnnnnnnnnnnnnnnnnnnnnnnnnnnnnnnnnnnnnnnnnnnnnnnnnnnnnnnnnnnnnnnnnnnnnnnnnnnnnnnnnnnnnnnnnnnnnnnnnnnnnnnnnnnnnnnnnnnnnnnnnnnnnnnnnnnnnnnnnnnnnnnnnnnnnnnnnnnnnnnnnnnnnnnnnnnnnnnnnnnnnnnnnnnnnnnnnnnnnnnnnnnnnnnnnnnnnnnnnnnnnnnnnnnnnnnnnnnnnnnnnnnnnnnnnnnnnnnnnnnnnnnnnnnnnnnnnnnnnnnnnnnnnnnnnnnnnnnnnnnnnnnnnnnnnnnnnnnnnnnnnnnnnnnnnnnnnnnnnnnnnnnnnnnnnnnnnnnnnnnnnnnnnnnnnnnnnnnnnnnnnnnnnnnnnnnnnnnnnnnnnnnnnnnnnnnnnnnnnnnnnnnnnnnnnnnnnnnnnnnnnnnnnnnnnnnnnnnnnnnnnnnnnnnnnnnnnnnnnnnnnnnnnnnnnnnnnnnnnnnnnnnnnnnnnnnnnnnnnnnnnnnnnnnnnnnnnnnnnnnnnnnnnnnnnnnnnnnnnnnnnnnnnnnnnnnnnnnnnnnnnnnnnnnnnnnnnnnnnnnnnnnnnnnnnnnnnnnnnnnnnnnnnnnnnnnnnnnnnnnnnnnnnnnnnnnnnnnnnnnnnnnnnnnnnnnnnnnnnnnnnnnnnnnnnnnnnnnnnnnnnnnnnnnnnnnnnnnnnnnnnnnnnnnnnnnnnnnnnnnnnnnnnnnnnnnnnnnnnnnnnnnnnnnnnnnnnnnnnnnnnnnnnnnnnnnnnnnnnnnnnnnnnnnnnnnnnnnnnnnnnnnnnnnnnnnnnnnnnnnnnnnnnnnnnnnnnnnnnnnnnnnnnnnnnnnnnnnnnnnnnnnnnnnnnnnnnnnnnnnnnnnnnnnnnnnnnnnnnnnnnnnnnnnnnnnnnnnnnnnnnnnnnnnnnnnnnnnnnnnnnnnnnnnnnnnnnnnnnnnnnnnnnnnnnnnnnnnnnnnnnnnnnnnnnnnnnnnnnnnnnnnnnnnnnnnnnnnnnnnnnnnnnnnnnnnnnnnnnnnnnnnnnnnnnnnnnnnnnnnnnnnnnnnnnnnnnnnnnnnnnnnnnnnnnnnnnnnnnnnnnnnnnnnnnnnnnnnnnnnnnnnnnnnnnnnnnnnnnnnnnnnnnnnnnnnnnnnnnnnnnnnnnnnnnnnnnnnnnnnnnnnnnnnnnnnnnnnnnnnnnnnnnnnnnnnnnnnnnnnnnnnnnnnnnnnnnnnnnnnnnnnnnnnnnnnnnnnnnnnnnnnnnnnnnnnnnnnnnnnnnnnnnnnnnnnnnnnnnnnnnnnnnnnnnnnnnnnnnnnnnnnnnnnnnnnnnnnnnnnnnnnnnnnnnnnnnnnnnnnnnnnnnnnnnnnnnnnnnnnnnnnnnnnnnnnnnnnnnnnnnnnnnnnnnnnnnnnnnnnnnnnnnnnnnnnnnnnnnnnnnnnnnnnnnnnnnnnnnnnnnnnnnnnnnnnnnnnnnnnnnnnnnnnnnnnnnnnnnnnnnnnnnnnnnnnnnnnnnnnnnnnnnnnnnnnnnnnnnnnnnnnnnnnnnnnnnnnnnnnnnnnnnnnnnnnnnnnnnnnnnnnnnnnnnnnnnnnnnnnnnnnnnnnnnnnnnnnnnnnnnnnnnnnnnnnnnnnnnnnnnnnnnnnnnnnnnnnnnnnnnnnnnnnnnnnnnnnnnnnnnnnnnnnnnnnnnnnnnnnnnnnnnnnnnnnnnnnnnnnnnnnnnnnnnnnnnnnnnnnnnnnnnnnnnnnnnnnnnnnnnnnnnnnnnnnnnnnnnnnnnnnnnnnnnnnnnnnnnnnnnnnnnnnnnnnnnnnnnnnnnnnnnnnnnnnnnnnnnnnnnnnnnnnnnnnnnnnnnnnnnnnnnnnnnnnnnnnnnnnnnnnnnnnnnnnnnnnnnnnnnnnnnnnnnnnnnnnnnnnnnnnnnnnnnnnnnnnnnnnnnnnnnnnnnnnnnnnnnnnnnnnnnnnnnnnnnnnnnnnnnnnnnnnnnnnnnnnnnnnnnnnnnnnnnnnnnnnnnnnnnnnnnnnnnnnnnnnnnnnnnnnnnnnnnnnnnnnnnnnnnnnnnnnnnnnnnnnnnnnnnnnnnnnnnnnnnnnnnnnnnnnnnnnnnnnnnnnnnnnnnnnnnnnnnnnnnnnnnnnnnnnnnnnnnnnnnnnnnnnnnnnnnnnnnnnnnnnnnnnnnnnnnnnnnnnnnnnnnnnnnnnnnnnnnnnnnnnnnnnnnnnnnnnnnnnnnnnnnnnnnnnnnnnnnnnnnnnnnnnnnnnnnnnnnnnnnnnnnnnnnnnnnnnnnnnnnnnnnnnnnnnnnnnnnnnnnnnnnnnnnnnnnnnnnnnnnnnnnnnnnnnnnnnnnnnnnnnnnnnnnnnnnnnnnnnnnnnnnnnnnnnnnnnnnnnnnnnnnnnnnnnnnnnnnnnnnnnnnnnnnnnnnnnnnnnnnnnnnnnnnnnnnnnnnnnnnnnnnnnnnnnnnnnnnnnnnnnnnnnnnnnnnnnnnnnnnnnnnnnnnnnnnnnnnnnnnnnnnnnnnnnnnnnnnnnnnnnnnnnnnnnnnnnnnnnnnnnnnnnnnnnnnnnnnnnnnnnnnnnnnnnnnnnnnnnnnnnnnnnnnnnnnnnnnnnnnnnnnnnnnnnnnnnnnnnnnnnnnnnnnnnnnnnnnnnnnnnnnnnnnnnnnnnnnnnnnnnnnnnnnnnnnnnnnnnnnnnnnnnnnnnnnnnnnnnnnnnnnnnnnnnnnnnnnnnnnnnnnnnnnnnnnnnnnnnnnnnnnnnnnnnnnnnnnnnnnnnnnnnnnnnnnnnnnnnnnnnnnnnnnnnnnnnnnnnnnnnnnnnnnnnnnnnnnnnnnnnnnnnnnnnnnnnnnnnnnnnnnnnnnnnnnnnnnnnnnnnnnnnnnnnnnnnnnnnnnnnnnnnnnnnnnnnnnnnnnnnnnnnnnnnnnnnnnnnnnnnnnnnnnnnnnnnnnnnnnnnnnnnnnnnnnnnnnnnnnnnnnnnnnnnnnnnnnnnnnnnnnnnnnnnnnnnnnnnnnnnnnnnnnnnnnnnnnnnnnnnnnnnnnnnnnnnnnnnnnnnnnnnnnnnnnnnnnnnnnnnnnnnnnnnnnnnnnnnnnnnnnnnnnnnnnnnnnnnnnnnnnnnnnnnnnnnnnnnnnnnnnnnnnnnnnnnnnnnnnnnnnnnnnnnnnnnnnnnnnnnnnnnnnnnnnnnnnnnnnnnnnnnnnnnnnnnnnnnnnnnnnnnnnnnnnnnnnnnnnnnnnnnnnnnnnnnnnnnnnnnnnnnnnnnnnnnnnnnnnnnnnnnnnnnnnnnnnnnnnnnnnnnnnnnnnnnnnnnnnnnnnnnnnnnnnnnnnnnnnnnnnnnnnnnnnnnnnnnnnnnnnnnnnnnnnnnnnnnnnnnnnnnnnnnnnnnnnnnnnnnnnnnnnnnnnnnnnnnnnnnnnnnnnnnnnnnnnnnnnnnnnnnnnnnnnnnnnnnnnnnnnnnnnnnnnnnnnnnnnnnnnnnnnnnnnnnnnnnnnnnnnnnnnnnnnnnnnnnnnnnnnnnnnnnnnnnnnnnnnnnnnnnnnnnnnnnnnnnnnnnnnnnnnnnnnnnnnnnnnnnnnnnnnnnnnnnnnnnnnnnnnnnnnnnnnnnnnnnnnnnnnnnnnnnnnnnnnnnnnnnnnnnnnnnnnnnnnnnnnnnnnnnnnnnnnnnnnnnnnnnnnnnnnnnnnnnnnnnnnnnnnnnnnnnnnnnnnnnnnnnnnnnnnnnnnnnnnnnnnnnnnnnnnnnnnnnnnnnnnnnnnnnnnnnnnnnnnnnnnnnnnnnnnnnnnnnnnnnnnnnnnnnnnnnnnnnnnnnnnnnnnnnnnnnnnnnnnnnnnnnnnnnnnnnnnnnnnnnnnnnnnnnnnnnnnnnnnnnnnnnnnnnnnnnnnnnnnnnnnnnnnnnnnnnnnnnnnnnnnnnnnnnnnnnnnnnnnnnnnnnnnnnnnnnnnnnnnnnnnnnnnnnnnnnnnnnnnnnnnnnnnnnnnnnnnnnnnnnnnnnnnnnnnnnnnnnnnnnggtgctcgaccccttgccccacgggtaaacgaacaccctgccggtcacggtccgccccgagcagtcgtgccggcggtcgatcacctcgccggtcctggcgtccaggccgccccataggctgatgggcctggccgagacaaccgcctcgccggcggccgatccggcgacgacggcgcgtccccgcatcgttcttttcttcggggccgtcccgctggttttgctcatcccggccgcctccgtatcactcgccccgccacggctgaacgcacgcaatcgcccacggacccgaacgccactttcacgcccagtgagcccggcgaatagtacgcgcacttgcccgagttggtcatcagcaccttggcgtcgcggcggatcatgggcgtgtggaatacgcacgtgtcccgcgtgatccgcgcgccgaaggcctcgaactccgccagccagttggtccgctcgaccagcgccagcgactgctggcaggtcagcagggcgacgtccaccccgtcggccgccctggcgggcgcaacctcgcggatcgcctcgaccagcgagcggaactcggcgaacgaaagatgcgggcagcccaggacaaccacgtcgagcttggcgccttgctcggccccggccaggtcgtcccaggatcggtaccagtcatcagggccgatgtccacgacgcgctcgggcttgcggtgctgcaaggccgcctcggcggtcggggcctcgggcgtcaggccgacggcatgaaagagcgccaccgaccccgccgacgccgcggccgcgccgaacgccttcaactgatcgtccgtcgcggcggcaggcatgccctcaatcacggggatcttctcgccgaccatcgcgccgatcaggtggccaagcacggggtaaaagacttcctccgccagcagggccggccagaaccccaccagccgcagcagccactgcccgcgtcggttttccgtcaggtgcaggccacactttggcactcggccggtgatggcggcgcagatgtccaggtagtccgcgtagcggttggtccgcgcgcctaaaacgctgttggcgtagcagatcgcgttggactcgccccatgcgatctgctggccgaaacgcggcgtgaggtagccctggtagggcgcacacgaccacgtggggacgcagcccatgtcggtgtaggcttttgcctggcggagggccttggcggcgaactgctcgtcggagacgaactgccgccagtcctggaggtccagcgggcccatgttgagggttgtcggcacgaggacctttccgccggcggcggcgagcttctcggcgaactccaggcccgcgtcgctcatgagcccgcagccgtcgatgtgcgcctgcgaaacgtccatcaactcgtccgcgccgtacacctcggccatgcgaacgatgatcgacatcgccatccggcacgcctggccgcaccggccgtcgagcatccgcctgtcgtcttcgctcagggcaatcgtcatacggttcttcccgcggccttcgcccgcgcctggccggcctgccgcgcgcggcgcaagcggccattttccccaattcccgcccgcctggcaagtgtttgtgggggccgctcttgttttgcatcgcggcgcggcgggcgtataatgtccgccttgttggctgagcctccgtgcaggtgggccttgctcgtatcgcaggcgctggcgggcatggtcagggctttgcccgctatgtgctgggagcttagagccaagaccatctttgggaccagagagcgaccatgacgacttcttcgttgcaggcgttgcaggatcgtttcggcaggaacgtggtctttcagatgaacgtgcgtctgaccgacggcggcgacaagctcggggaggtcatctcggccgtcaccgcggccggggcgcacatcgggcaggtcaacctcggcaaggttctcaaggcgtcgatgatctacgagatccgcgtctttgccgccggcgacgagcagatggccgccgtgggcaagtccgtcggcgcgatcgccggcatcgaggtcgtcgacgtgctggacctggcgatggagagccaccgcggcgggtcctgcgagatgcgaagccgcgtgcccataacctccaacaccgacctgcggatcgtctacacgcccggcgtggcgcgggtctgcaaggccatcgaggccgaccccgccaaggcgcgcgagctgaccaacatcgccaacaaggtcgccatcgtcaccgacggcacggccatactcggcctgggcgacatcggctgcctggccgggctgccggtaatggaaggcaagtcggcgatcttctgggagttcgcccgcatctcggccgagccgatcctgatcgacacccgcgaccccaaggagttcatcaacgtctgcgagcggattgcctgcacgtttggggccatccaggtcgaggacgtcgcggccccgcagtgcttcgagatcacccgcacgctcgacgagcgcctgccgataccggtcttccacgacgaccagcacggcacggccaccatagtcctggccgggctatacagcgcgcttcgcaagaccggcaggcgaatgaaggacatcacctgcgcgattgccggcgccggtgcggccgggaccgccattgccgacctgctcatgcgagccggcgtgccggacgtggtcctggccgactccaagggcatcgtccatcgcgggcgcaaggagggcatgaacagcgaaaaggccgccctggccgagcggaccaacccgcggaacatcaccggttcaatcgccgaggccatgaaggggcgggaactgttcatcggcgtgtccaggccgaacctggtcacgcgggacatggtccgctcgatggccaaggacccgatcgtctttgcgctggccaacccggtcagcgagatcagcgtcgccgacgcctacaaggccggcgcggccatcgccgccgacgggcggatgatgaacaacgcccttgcctacccgggcatattccgcggcgcgctggactcggccgcccggtcgatcaccatcgagatgatgatggcggcgtccgaggccctggcgaacatagtgcccgagggcgaactgcttcccgagatgatggaccccgccacgcaccaggccgtcgccgcggccgtgcgcggagcggtgtgaaagaagaaaaagaagaagaagcaaccacagagacacagagccgcggagagtaagagaagaatcaaccacagagtcacagagagtaacagaagaagcaagctgttgttgtttcttgccctctgtgcctctgtggtcaatgatcggacacttgctcaacggagcaacgaatgaaagcactgatcgtctacggcggctgggccgggcacgagcccgggccggtcagcgagatcatcgccaaggccctgcgggaccacgggtttgaggtgtcgctgtcggacacgctcgacagcttcaaccggctcgatgccctgctggagctggacctcatcgtgccgcactggacggccggaaagatcaccaacgagcagagccgcaacctccgcagcgccgtcgagcggggcgtcggcctggcgggctgtcacggcggtatgggcgacgccttccgcgacaaccccgactatcagttcatggtcggcgggcagtgggtggctcatccgggcgaccggctgacgtacacggttcacatcctggaccacgccgaccccatcacggcggacctcaagagcttcagcaccaccagcgagcagtactacatgcacgtggacccgtcgaaccacgtgctggcgacgaccacgttcgagtgcaacggctgcaccatgccggtcgtgtggaagcgcatgtggggcaagggacgggtcttctacagttcgctgggtcactgcgccaaggagttcgccagcgtgcccgaggtcctgactctgctggagcgcggcatggtctgggccgcccaaggccgggccgcggcgaggtgagttcatggacacgacgcaaacggcaacggcaaagctgtcgcggcacgacctggacattctccgccgcctgggccagcgcaaggcgcagatcgccgccgacggcgccaacgccgagcggcgggcggcgtggtacgcccacgacgcgggcgagccgtcggcccggcctatggtcctggcggagatcttcggcgtgcgagacccgcacccgcccgtcggcgacgccgacctccgctgccgcgacgaatgggcgcgccggatcgaacgctcgctgcttcagcagatataccagttcgacgtgctcaaggacgaccacgtcgtcgagccctggatacagaccaactggaaggtcacggtcagcgattacggcgtgcaggccgtcgtgcacacttccgacgccgacgtgacgctcggcgcgcggaactgggacccgcccatcaaggacatcgacgccgacttcgccaagctccatccgcggacgtacagcgtggaccgcgacgccaccgccgccgaggccgcccgcctcgccgaggtcttcaagggcgtcctgccggtcaggatccgcggcaagttctggtggtccatgggcctgacctggccggcgatagatctcatcggcctggaaaacctcatgctgctgatgtacgacaacccccagggcctgcacaggctcatgggcctgctccgcgacgaccacctggcgtacgcacagtggatcgagggccaggggctgctgacgctcgacaacgagaacgattacatcggctccggctcgatgggctacacgcgcgacctgccggccggcgattgccgccagggcggcccggtgcgcctcaaagatctgtgggtcctttccgagagccaggaaaccgtcggcgtcgggccggaactgttcgagcagttcatcttcccataccagctaagccttgtcgagcggttcggcaagtgctactacggctgctgcgagccggtgaacaaccgctggcacatcctcagccggctgcccaacctcgcccgcgtcagcgtctcgccctgggcggacgaggacttcatggccgaggcgtgcgggcagcgccgcgtctactcccgcaagcccaacccgacgcagatatctaccgggcggttcgacgaggccgccatccgggccgacctgcgccgcacgctggaggccaccggccgacatgcctgccggacggagatcatcatgaaggacgtccacaccctccacgacgagcccggccggctcgcacgctgggtcgcgctggcaaggcaggagatcgaccgctggggcgccggcgcagccagagtgtagagagtagaaagtagagagtagaaagtagaaagtagagaggagagaggagagaggagaaaagcagagaggagagaggagagaggagacctgccggcaatcggtccccaggagaaatccttattgtcgatcggatcggcccgtctgcgggtgccatggttcggcgtgctacgagcatgcgtcgcgttccaccatctcgcacaggacgtggtagatcacctgatgggcctgctgtattgccggggtgtgtgtttccggcacggcaagcaggacgtcggcaagcgcggcgcacgccccgccgcccgccccggtgagtgcgattgtaaccatgccgagctcgcgcgcctttcgaagtccggccacgacgttgggcgagttgcccgacgtgctgatggcgatcgccacgtccccggcccggccgagggcctcgatctgccgcgcgaagacagcctcgtagccgtagtcgttggcaaggctcgtgagcaccgcggcgtcggcggtaagcgccacggcgcgcagggcccgccgctccttcaggaaccggccgacaagctcgccggcgacgtgttgtgcgtcggccgcggacccgccgttgccgaacagcagcacgccgccgccgccgcggcagctctcgactatcagttcgacggccttggcgatccgcccggcaagggcgcgccccgcgtcctgaatggtccgggcggcggcgtcgaaacggtcacgaatctcgtcgtctgtcatctgagacgatctcctttcgcaggcgcaggagctccctgaacgccctgaggatcacgctgagtttcgcccccgtctgccggccggcaacgcggggacggtggctgacgggcacttccgccagcgtaaagcccgcgcgcacggcgcgggcgagaatctccgcgtcgatcagcgcgccggtggacttcatgtcgatgcggtcgaatatctcccggcgatagagcttgaacgcgctgtcgacgtcccggcagcggacgctcagcagccgcgtcacgagccggctccacagccaggcgttgagccggcggatcaggctgtcccgccggtgccggcggaagccgctgacgatgtcgtaacgcccaatcaggtccagcagcgcgggcagctcggctatgtcgaactggccgtcgccgtcggtgtagaagaccagctccttcgtcgccgcgcgaaacccgctgacaagggccgcgccgtaaccgcggttgaccgggtgatgcacgccacggatccgcgggtccccggcggcgagatcgtcaatgatcgccccggtgcggtcccggctgccgtcgtcgacgaggattacctcaaaatcgtcgctgacggtcggcagaaatgccatcgcctcgccgaccacgcggcggacgttgtcctgctcgttgtagcacgggtagaagacgctcagtgcgtacttccgccgcggcgatttgtcctctgccgtcacgcggtttctccggggccggtgcgggccttcgggcccttctcgcccagccagaataccaacccgggcaccgagagcaacatcggagtcagccgcgccagaagcgccaaggcaagcacggccgaagagtccgcgccgcccgcgaagaacaggacgtacatgccctccacaagccccagcccgccgatgctgacgggaatggccgcgagaatgtaaattaccggcacgaataggaagtagagcgatatgccggccggcaggtccagggccaggcccaggcaggcgactccgccggccagcagaagatgcacgccgagcgtcatagccccgacgacggcggcgtccctcgggcagcgcggcaggcgctgaagcgtggcaacggccaggcggaagttctccgccttcggcaggcgggctatgaggcgatccagccccgccagccgcccgacgcgccggctgaagagcaccagtccggcggcaatgatgaccgcaagggtcgccagtatcgccccggcagccctgtgggtctgtgggctccgccaggtcgccagcgccatcaccccggccagcgcggacatgcccgccaggccgacgaaacggtcaagcaggaccgtcgccaccgccaccgttcgcgcggtggtccggcgggtgaccaggtacgcgcggatcacgtcgccgccggtggcgccgggcaaaaagaagttgaagaagtgcccgacgtacatcagccggatcgtggcccagaggcccacgcccagcgactcgcggcgcatcaggtaccaccagcggacgcccatgagggtgagctgaccggcaaggatgaccgcggcgagtatgtaaaagcccgggcgaagccgacccagcacccgcgacatgccggggtgaaccacctgcccgccggtgtcgcggaactccgccgtcctgtccgcggagaaccaggccgcctcccggcccggcaaggccacgagaatctgcccgccgcgctgctcaagcacgcgcagggaccgcccgtcgcggtcgagaacataatcgtgccacgacacgccggacgccacccaccagaccagcccggccgtaacggccagcttggccaaaaacgccgccgctttgccaacacgcataaccaccgtcggaatctcccgggctccaaaggcccatcatccttatatcggcacttggggagattcgccgtacaggtctccaagagcatacatgaaagccgtggcatgggcgtcccgcccatgagtggcatgggcgtctcggccatgagtggcatgggcgtcccgcccatgagtggcatgggcgtcccgcccgtggcatccctggacacccgcgatccccttcgtcaacgcgccgcgggcgcaagcaggttgcgggcgtgggcgatggtggcgtcggtggcgcgcgtgccggccatcatctcggccagttcccggacgcgatcctcgccggtgagcactcggaccttggcgatggtctggcgggcgccgtcggcctcgacgacttccttgcggatctggaggtggtggtcggcgcaggcggcgatctgggacaggtgggttatgcagatgatctggcatgagcagtcttgctgatcggcctgggcgggcgaggcgccgccggcctgtgtcgcgccgccggcgggcgaggcgccctcggctcgcggcccggccttgccgtgcgcgccgcattcggcgccgggactttcagcctgccgccgccccgcgatcttccgccggccctcggcctgccgcttgtggcctgggcgctggccgtgagcgagggcacgcatcttccggccgatggtcgcgccgaggcggtcgcctatgttcgcgtcgatctcgtcgaagaccagcacgctcacttggtccttgtcggcgagaatcgtcttgagggccagcatgatccgcgagatctccccgccgctggcgatcttgcgaagcgggagcgtctcctggccggggttcgtgcggacgaggaactccatctcgtccaggcccgtcgagtcgatggccgggtcgtcgggggcgcgagaagccaggctgacctcgaacgtcgcctcgtgcatctccaggtcgcggaactgggcctcgacgagcggctttagcctcgcggccgccttgcggcgaagggcgcttaggcgctggcccgtcgcggccagggcctcgcccagattggcgatccggcggtcgagctcgccgagggcctgggcgtcggcgtcgagccgctcgacctccagggcggtctggcggcggtagtccagcacggcggccacggcatcgccgcccggctcggccgagcgggcgtacttgtggatcatcttgttgagcacgtccagccgctcctcgacggcggccaactccgacggatccgcctccagcgactcctggtatcggtccagcgcgcgggccgcgtcgccaagcagttcgcccgcctgctcgatctgagccgagaggttggtcaggcccgcgtccgtccgcaccagttcctggccgcagcgccgaaccgcgccgagacgatccagcaccgtgtcgtcgccgtcgcgaagggcgccgagcatctgggccgagaggtcctgaaggtgcgcggcgttgcgcagcacgttgtagcggtcgcggacccgctcgtactggccgacgcgcagaccggcggagtcgatctcctcgatctggaagcggtagagctccagcgcctcgagccgcttgtcctcggactggcgcagctcggccaggcggcgctggcagtcgcgaagctcgcccagcgtctgggcgaactggcgccgcgtgtcggccgcgtcggcgaaggagtcgaggatggcgacctggttggccggcttgagcaggaactgctggtcgtgctggccgtgaatgtccacgagcaactggcccgcctggcggagcatgccggccgtcgcgggcaggccgttgaccgacacgctcgaccgcccgcccgacgagacccggcgggtgatgagtatcggctcgccggcggacaggggctgatcgaggatctcccccagccgccgggccaggtcgccgccggcaacctcgaatagcccgctgacgcgggcctcggaacatcccggccggacgaacgtcgcggcgtcctgcccgccgtcgcgaaggcccagcagaagctccagcgcgcccaggatgaggctcttgcccgcgccggtctggcccgtaaagacgttcagcccgccgcccaggtcgatgtcgatgttctcgatgatcgccagattcgatatgtgcagttctcgaagcatgactacatgttcggtatttgtacgggaaagtcaacaggaaaaacgcttgtggtcaagaaagtcctggggcctgggattggcctggaattggcggccggcggcatgagcgaatcccggcagcgccactcctgggaacgccaatctcctgattggcgccgcctggcggtgtgaagaaagaagaaggccgatcgggagattggcgttcccggccctttcccggcccacgcgctcccggcggcacagttggcgttctggccggcgttctcggcaatcgcttcgccgtgggccaggatcgattacactgcttggatatatacttcacattattgccggcgtcaagtaaaatcctggatattcgtggaccggggtattcgggctgcacggtgtcccgcgtggcccgcggcatgcgccgccagcttgtccggagagcgaaacgcaaacgccgccccagaaagctcctggtcgagaccgggctcggcaatggatcgtacaagcggttcttgaaaggaaagcacgcatgaacttcaacctcctggaagaagggttcatccccgtcttatggtctgacggcaaagtggggcgggtgggaatacggcgtgctttggcggaggcaggcggcattcgccaaatcgcggcatcaaatccgatggataacgtcgcactgctgcggttcctgctggcggtgctttactggtgccaaggcccgccgccgagtcagggcgagaaggacaaaatcctcgctggagccggatttccgccaggttggttcggcaaacttgaccagcagaaggactgtttcaacttgcttggggagggaaagcggttttatcaggacaagaccgccaagcggtgcaggccaacaacggaactgctccaggaacttccgaccggcaacaacttccgacacttccggaggtcggacaatccacgggacggactgtgtcccgcttgttgtgcgttaggcctcatgaggcttcctctattctctgtcagcggattgccggacttgaaagcgggcataaacggaaccccgccaatctacgtcattccacttggagagacgttgctcggcacactctgcctaaactggacccgccgggaatcgctcggaagccccacgtgggagtgttcccaggagcacaccgcacccgacgcggcgatccctcttctggccgggcttacggcactggccaggcgcgtctggcttcacgagccgaccgaaccgggcccgtgcagtggatgcggcagccagcagcaatcgctaatacgaacgtgcgaattccaaagtgcaggagcgaagcagagcaagtcctgggatgaccctcacgtcgtttacgtgcagaaggcgaattcgacgggcgacgtggaaaggcgttccatgaccgctcccgatctgacaaagtcttccttccgccttgacaggccctgggccacattgatggcggcactcctgtcatcggacaaacatcggtgcgtttccggcacgacgaggttaatggtagtcgggtttgccaccgaccaggcgaagaacatagacgtatgggaacgcatttgcactctgccaccttgcgcatcaggtcaatcttccgatcctgcgggcgaagcgatcacaatctggaacgagcaaggcagaaagattccgtggcgaatgaagccgaagaactcggagtctgacggttcccaattcgttagcgccgttgccagcatccgtccgcacgtggaggcccgcgtctcatccaatttggcggacctcctttcccagccggaaaaagcctggccgaaagccgtcgatgaatatcggcaaattctgcccgccgtcgctgggtcgctcgcgccggggttcacggttaaggcgacaaggaggcgaggcgagatcgcgcgtgctttgccggatatgacgccaaaggcccatgccgagccgaagaagcccaaaacaaagaagggggccacgaaatgaatcccacacccaccgaggaattcattcgcacgctgcaagccctaaagcccggcgacctcggccggctgcggaatctgaccgatcttgctctagacgaatcggtggacgggttcgacctgttcgccgggctctggtggccgctcaggcagaagaaccagaaagccccccgtcggcaagtcgcctggctcatcgccaagttgtatgccttccggcctctggctcaaaccagcggggcaacgctcgcgcttctgcttggcggagtacatattcacatccaggataagcaaacgaaaggccgccaccagcagcgattcgatgaattgctactgcttccgctagctcaaatcgaaccggccttgcgatggggcctgacgcagattgcggacaacggcaaagggctggattgggtccggctcaccgatgatctgtccatatgggaacgggaacagacacgcctgaaatggtccggggaattcctgggccttatctgatcaaaaccgtaccagaaggagaacaccatgctgatcgagattcatgccattcagaaccacagcccggccaacctcaaccgcgacgacctgggcgcgccgaagacctgctacttcggcggagtaatgcgatcccgcatttccagccagtgcctcaagcggagcatccgcaccagcgagcaattcaagctgctctgcgggggaatacgcaccaggcagcttgccagactaatcgcggaaagcgtgaccggcaaggccgatgtcaagaaacgcgccgcgaagatactcgacaagtgcgggatcaaatccaaggacgacaagaagagcgacatgctcgtctataccacgcatgaggcgatcggcgccatagccaagctcctgtcggaaaacgacgacccgaccgatcaacttgccgagcaatgcgggaagctcatatcgcaactcgtcgccgttcccgatatggcgctcagcggcagaatgcttgaaaccggcgttctggccgaaaccacagtcgatgcgtccttgcaggttgcccatgcaatctcgacccacgaggcccgcccggaagtcgattactacgtcgccgcggacgatatacccggtgacgatgccggcgccggctttgtggatgaggccatgttcgcttccgcctgcttctacaagtacttctcgatccactgggaacagttgctggagaacctccacggattccagggcaacaaagagcacctggccgcccacaccgtcggcgcattcctccgcggcgcggccctgaccactcccaccggcaagcagaacagtttcgccgcccacaacccgccggaaggaatgctcgtcgaaatcaggcagaaccccatcagctacgccaacgccttcgccaacccagtgccgtgtaaaggtccacgagacatggtccgagagagcatcgccggactcggacaatacgtccacgacctggacattggctatggcaagcccgacagtcggttctggttctcccccaatctgcggcacgccttgaaggccacggaagacaagaaggagatcgccctgaccaacaacaatctcaagtcccttgacgaacttgtcgtcgcggtcgtgcgggctatcgggttcgattgggccgaggtgcagaccgtcacaatgaagtaaggaggtcgcgacgatgaacgcaaatactctcctgcttcggctcgaagggccgctgcaatcctggggcggccacgagtcgaagttcgtcattcgaaggaccgctgacgcgcccaccaagtccgggattgttggcctgctttgcgccgcgatgggaatctcccggacggatgcccggcaaaggcttgctgccctcaatgccctgctaatgggcgtccgcgtcgatcgtcccggcgttcgatggtgggactaccataccgtcggagcgcgcatggaaatgcccaccgccgagggcaagaccaagcccggcgccatgctcacccgccgggaatacctctgcgacgccagtttccttgtcgcacttcagggcgatcccggcttgctgcgagacgcaaaagaaaagctggtctaccctaaatggccgatgtttctcggccgaagaagctgcccgccgtcgctgccgcttgtcgggcgcatagacgaaccggacacgggcgatttcccggaccttacgtccgcactgcgctctgtcccctggcgcccgcgacttgccggcgacgagcggcccgagtttctcgaatgcgttctggaatggcggccctccgccgacgagcccgaagccccggccgtcgccgaagtctggtacgacgtggcccagtccttcgacgttccggggcaccacccgcggttcgttgtccggacccagttgaccgtcggcgacggtaaggatattgccattcaccccaaaccgcgccaaacccgcactcccgcgccgccgcgcccgcgagcggattacggtaacagcgagtataggaagcgccgccaagaacgcctcgattccgaccacggcttgtgcgtcttctgcaaggccccggccggtaccgttcagcacatcacctaccgccgcgccggcgggggtgaaacaccagaggacctgcgcgcgctttgccgcctctgccacgacgcagtgacgatgatcgagtacggcctgggcatgggcctggaccgcatcaacccggaattgcccgagtggcgggacaagatcatcgccaagcgtgatgagatcgtcgccttccgctccatggagacccgccgtcggcggcttgcgcccgaggaggtcgagtaatgtttatctcaacgctactcatcaatgttggcgataaccccgatcgcccacgccccggccggctgtggctccgcaatctctaccgcgtccatcaacgcctctgcatggcgtttccagacaaggacagggatcgcaagcaacgtgaccccgaaatgcttcaaccctacaacccagacgatttcggggacggccaggtccatgttccgcgacacaacaacgccggcttcctgttccgcgtcgatcctcagcccggcggaatggctgtcattctggttctgtcagcaatcgagcccgactgggactacgccttcggactcaagccgggattacttgacgaccgcgggcggcctgtcggcaacgccgggcatctgctggccgggccgccggaaaagccccggcccctgaaactgaccatcgagtccggcaaacggttccgattccggctccgggcaaacccaaccatgaaggtccacaagctgcacgcgagctcgcgccgcacaacgccgctgacaaagaacgggcggcgcgtgccggttcctgctaccaaggagggccttctcggctggctttgcaagcagggcgcccgcacaggcttccgtgtcgaaggcgaaccgctgatccaacccgggtacgtatatgtcagcaaggacggcaagccgggtcaagggcatcgccttcgctccgtgatttacgaaggcattctcgaagtcacggactccgacgcattcgccaaggcccttgccgccggcatcggcccggccaagggctacggcttcggcctgctttccgtcgcgcccctgcgcgactgagtgaacccgcccggcgatgaggccgcggcgcgttctttgacaagtaaacagggtgcaggaaggttcaaactcaacacgccggccccaaatgccgataacagcaacgggaaatgggtggcctatgcagaaccttcaggaattgccgcgtttcggcgacaagctcagctacctctacgtcgagcatgccgtcatcgaccagcacgagaaatccatcgccgtccaccgtgccgaccaggtgacgcccgtcccggccgcggcgctggccctgcttatcctcggacccggcaccaccatcacccacgccgcagtcaaggccctggccgatgacaactgccaggtcgtctgggttggcgagcacgccgtcaggttctatgcccacggcctgggcgggtcgcgccacagccgaaacctcctgcgccaggcacgactggtcagcaacgacgtcacccgcctccaggtcgtcatccgaatgtacgcctttagattcaccgaacgcctcgaccccggcctgacgctccagcagatcaggggaaaggaaggcatccgagtccgccaggcatacgccgaggcttcacgcgaaaccggcgttgtctgggccgggcgaaattaccagcggaacgagtggtccgccgccgaccccgtcaaccgggccctctcgtccgctaacgcctgcctctacggcctcgtccacgccgccatcatttccggcggctacagccccgcgatgggattcgtccataccggcaagcagttgtcattcgtttacgacgtggccgacctctacaaggccgacctgaccatcccgctggccttccgcgcagttgcggccgggacaaccgatatcgaacggaacgtccgaatcgcctgccgagaggcattccgcaccggccgactcatcgagcaaatcctgccggacatcgaggaagtcctgaaagtcccggacgccggcgaggacgagttcgccgacgaccccgccaagccgggcgaatactggacgcccaggtgcctcaccgaggacatgcccatcagccgggtgctcaaactggaccccgacaccctgccaaagcgcaaaggaacaactcgccatgatagtgatgatagtggaacgggcgacaccgtctctgcggggtgaactgacccgatggctcatccagcccaagacgggcgtcttcatcggccgcctgcccgcccgcgtccgcgacctgctttggcagcgggtccaaaaagccctggcaaaacgcggcgccgccgtgatggcctactccagcaacaccgaacaggggtttaccctacaaacgctcggccggaccagcaaactcgtcgaagacttcgatggcctttttcttgcttcaacgcgcgcaagtccttaaaatacgttcaacttgccagtgtcttccccacgcacgtgggggtgaaccgtccacgacgtaggaagaagaaggaagaaggtcgtcttccccacgcacgtgggggtgaaccagggagtactcggcatgaatcccgccggctaccgtct

SEQ ID NO: 997 - DNA, 103788 bp, Artificial Sequence
  Synthetic Oligonucleotide
  misc_feature (1)..(86855): n is a, c, g, or t
nnnnnnnnnnnnnnnnnnnnnnnnnnnnnnnnnnnnnnnnnnnnnnnnnnnnnnnnnnnnnnnnnnnnnnnnnnnnnnnnnnnnnnnnnnnnnnnnnnnnnnnnnnnnnnnnnnnnnnnnnnnnnnnnnnnnnnnnnnnnnnnnnnnnnnnnnnnnnnnnnnnnnnnnnnnnnnnnnnnnnnnnnnnnnnnnnnnnnnnnnnnnnnnnnnnnnnnnnnnnnnnnnnnnnnnnnnnnnnnnnnnnnnnnnnnnnnnnnnnnnnnnnnnnnnnnnnnnnnnnnnnnnnnnnnnnnnnnnnnnnnnnnnnnnnnnnnnnnnnnnnnnnnnnnnnnnnnnnnnnnnnnnnnnnnnnnnnnnnnnnnnnnnnnnnnnnnnnnnnnnnnnnnnnnnnnnnnnnnnnnnnnnnnnnnnnnnnnnnnnnnnnnnnnnnnnnnnnnnnnnnnnnnnnnnnnnnnnnnnnnnnnnnnnnnnnnnnnnnnnnnnnnnnnnnnnnnnnnnnnnnnnnnnnnnnnnnnnnnnnnnnnnnnnnnnnnnnnnnnnnnnnnnnnnnnnnnnnnnnnnnnnnnnnnnnnnnnnnnnnnnnnnnnnnnnnnnnnnnnnnnnnnnnnnnnnnnnnnnnnnnnnnnnnnnnnnnnnnnnnnnnnnnnnnnnnnnnnnnnnnnnnnnnnnnnnnnnnnnnnnnnnnnnnnnnnnnnnnnnnnnnnnnnnnnnnnnnnnnnnnnnnnnnnnnnnnnnnnnnnnnnnnnnnnnnnnnnnnnnnnnnnnnnnnnnnnnnnnnnnnnnnnnnnnnnnnnnnnnnnnnnnnnnnnnnnnnnnnnnnnnnnnnnnnnnnnnnnnnnnnnnnnnnnnnnnnnnnnnnnnnnnnnnnnnnnnnnnnnnnnnnnnnnnnnnnnnnnnnnnnnnnnnnnnnnnnnnnnnnnnnnnnnnnnnnnnnnnnnnnnnnnnnnnnnnnnnnnnnnnnnnnnnnnnnnnnnnnnnnnnnnnnnnnnnnnnnnnnnnnnnnnnnnnnnnnnnnnnnnnnnnnnnnnnnnnnnnnnnnnnnnnnnnnnnnnnnnnnnnnnnnnnnnnnnnnnnnnnnnnnnnnnnnnnnnnnnnnnnnnnnnnnnnnnnnnnnnnnnnnnnnnnnnnnnnnnnnnnnnnnnnnnnnnnnnnnnnnnnnnnnnnnnnnnnnnnnnnnnnnnnnnnnnnnnnnnnnnnnnnnnnnnnnnnnnnnnnnnnnnnnnnnnnnnnnnnnnnnnnnnnnnnnnnnnnnnnnnnnnnnnnnnnnnnnnnnnnnnnnnnnnnnnnnnnnnnnnnnnnnnnnnnnnnnnnnnnnnnnnnnnnnnnnnnnnnnnnnnnnnnnnnnnnnnnnnnnnnnnnnnnnnnnnnnnnnnnnnnnnnnnnnnnnnnnnnnnnnnnnnnnnnnnnnnnnnnnnnnnnnnnnnnnnnnnnnnnnnnnnnnnnnnnnnnnnnnnnnnnnnnnnnnnnnnnnnnnnnnnnnnnnnnnnnnnnnnnnnnnnnnnnnnnnnnnnnnnnnnnnnnnnnnnnnnnnnnnnnnnnnnnnnnnnnnnnnnnnnnnnnnnnnnnnnnnnnnnnnnnnnnnnnnnnnnnnnnnnnnnnnnnnnnnnnnnnnnnnnnnnnnnnnnnnnnnnnnnnnnnnnnnnnnnnnnnnnnnnnnnnnnnnnnnnnnnnnnnnnnnnnnnnnnnnnnnnnnnnnnnnnnnnnnnnnnnnnnnnnnnnnnnnnnnnnnnnnnnnnnnnnnnnnnnnnnnnnnnnnnnnnnnnnnnnnnnnnnnnnnnnnnnnnnnnnnnnnnnnnnnnnnnnnnnnnnnnnnnnnnnnnnnnnnnnnnnnnnnnnnnnnnnnnnnnnnnnnnnnnnnnnnnnnnnnnnnnnnnnnnnnnnnnnnnnnnnnnnnnnnnnnnnnnnnnnnnnnnnnnnnnnnnnnnnnnnnnnnnnnnnnnnnnnnnnnnnnnnnnnnnnnnnnnnnnnnnnnnnnnnnnnnnnnnnnnnnnnnnnnnnnnnnnnnnnnnnnnnnnnnnnnnnnnnnnnnnnnnnnnnnnnnnnnnnnnnnnnnnnnnnnnnnnnnnnnnnnnnnnnnnnnnnnnnnnnnnnnnnnnnnnnnnnnnnnnnnnnnnnnnnnnnnnnnnnnnnnnnnnnnnnnnnnnnnnnnnnnnnnnnnnnnnnnnnnnnnnnnnnnnnnnnnnnnnnnnnnnnnnnnnnnnnnnnnnnnnnnnnnnnnnnnnnnnnnnnnnnnnnnnnnnnnnnnnnnnnnnnnnnnnnnnnnnnnnnnnnnnnnnnnnnnnnnnnnnnnnnnnnnnnnnnnnnnnnnnnnnnnnnnnnnnnnnnnnnnnnnnnnnnnnnnnnnnnnnnnnnnnnnnnnnnnnnnnnnnnnnnnnnnnnnnnnnnnnnnnnnnnnnnnnnnnnnnnnnnnnnnnnnnnnnnnnnnnnnnnnnnnnnnnnnnnnnnnnnnnnnnnnnnnnnnnnnnnnnnnnnnnnnnnnnnnnnnnnnnnnnnnnnnnnnnnnnnnnnnnnnnnnnnnnnnnnnnnnnnnnnnnnnnnnnnnnnnnnnnnnnnnnnnnnnnnnnnnnnnnnnnnnnnnnnnnnnnnnnnnnnnnnnnnnnnnnnnnnnnnnnnnnnnnnnnnnnnnnnnnnnnnnnnnnnnnnnnnnnnnnnnnnnnnnnnnnnnnnnnnnnnnnnnnnnnnnnnnnnnnnnnnnnnnnnnnnnnnnnnnnnnnnnnnnnnnnnnnnnnnnnnnnnnnnnnnnnnnnnnnnnnnnnnnnnnnnnnnnnnnnnnnnnnnnnnnnnnnnnnnnnnnnnnnnnnnnnnnnnnnnnnnnnnnnnnnnnnnnnnnnnnnnnnnnnnnnnnnnnnnnnnnnnnnnnnnnnnnnnnnnnnnnnnnnnnnnnnnnnnnnnnnnnnnnnnnnnnnnnnnnnnnnnnnnnnnnnnnnnnnnnnnnnnnnnnnnnnnnnnnnnnnnnnnnnnnnnnnnnnnnnnnnnnnnnnnnnnnnnnnnnnnnnnnnnnnnnnnnnnnnnnnnnnnnnnnnnnnnnnnnnnnnnnnnnnnnnnnnnnnnnnnnnnnnnnnnnnnnnnnnnnnnnnnnnnnnnnnnnnnnnnnnnnnnnnnnnnnnnnnnnnnnnnnnnnnnnnnnnnnnnnnnnnnnnnnnnnnnnnnnnnnnnnnnnnnnnnnnnnnnnnnnnnnnnnnnnnnnnnnnnnnnnnnnnnnnnnnnnnnnnnnnnnnnnnnnnnnnnnnnnnnnnnnnnnnnnnnnnnnnnnnnnnnnnnnnnnnnnnnnnnnnnnnnnnnnnnnnnnnnnnnnnnnnnnnnnnnnnnnnnnnnnnnnnnnnnnnnnnnnnnnnnnnnnnnnnnnnnnnnnnnnnnnnnnnnnnnnnnnnnnnnnnnnnnnnnnnnnnnnnnnnnnnnnnnnnnnnnnnnnnnnnnnnnnnnnnnnnnnnnnnnnnnnnnnnnnnnnnnnnnnnnnnnnnnnnnnnnnnnnnnnnnnnnnnnnnnnnnnnnnnnnnnnnnnnnnnnnnnnnnnnnnnnnnnnnnnnnnnnnnnnnnnnnnnnnnnnnnnnnnnnnnnnnnnnnnnnnnnnnnnnnnnnnnnnnnnnnnnnnnnnnnnnnnnnnnnnnnnnnnnnnnnnnnnnnnnnnnnnnnnnnnnnnnnnnnnnnnnnnnnnnnnnnnnnnnnnnnnnnnnnnnnnnnnnnnnnnnnnnnnnnnnnnnnnnnnnnnnnnnnnnnnnnnnnnnnnnnnnnnnnnnnnnnnnnnnnnnnnnnnnnnnnnnnnnnnnnnnnnnnnnnnnnnnnnnnnnnnnnnnnnnnnnnnnnnnnnnnnnnnnnnnnnnnnnnnnnnnnnnnnnnnnnnnnnnnnnnnnnnnnnnnnnnnnnnnnnnnnnnnnnnnnnnnnnnnnnnnnnnnnnnnnnnnnnnnnnnnnnnnnnnnnnnnnnnnnnnnnnnnnnnnnnnnnnnnnnnnnnnnnnnnnnnnnnnnnnnnnnnnnnnnnnnnnnnnnnnnnnnnnnnnnnnnnnnnnnnnnnnnnnnnnnnnnnnnnnnnnnnnnnnnnnnnnnnnnnnnnnnnnnnnnnnnnnnnnnnnnnnnnnnnnnnnnnnnnnnnnnnnnnnnnnnnnnnnnnnnnnnnnnnnnnnnnnnnnnnnnnnnnnnnnnnnnnnnnnnnnnnnnnnnnnnnnnnnnnnnnnnnnnnnnnnnnnnnnnnnnnnnnnnnnnnnnnnnnnnnnnnnnnnnnnnnnnnnnnnnnnnnnnnnnnnnnnnnnnnnnnnnnnnnnnnnnnnnnnnnnnnnnnnnnnnnnnnnnnnnnnnnnnnnnnnnnnnnnnnnnnnnnnnnnnnnnnnnnnnnnnnnnnnnnnnnnnnnnnnnnnnnnnnnnnnnnnnnnnnnnnnnnnnnnnnnnnnnnnnnnnnnnnnnnnnnnnnnnnnnnnnnnnnnnnnnnnnnnnnnnnnnnnnnnnnnnnnnnnnnnnnnnnnnnnnnnnnnnnnnnnnnnnnnnnnnnnnnnnnnnnnnnnnnnnnnnnnnnnnnnnnnnnnnnnnnnnnnnnnnnnnnnnnnnnnnnnnnnnnnnnnnnnnnnnnnnnnnnnnnnnnnnnnnnnnnnnnnnnnnnnnnnnnnnnnnnnnnnnnnnnnnnnnnnnnnnnnnnnnnnnnnnnnnnnnnnnnnnnnnnnnnnnnnnnnnnnnnnnnnnnnnnnnnnnnnnnnnnnnnnnnnnnnnnnnnnnnnnnnnnnnnnnnnnnnnnnnnnnnnnnnnnnnnnnnnnnnnnnnnnnnnnnnnnnnnnnnnnnnnnnnnnnnnnnnnnnnnnnnnnnnnnnnnnnnnnnnnnnnnnnnnnnnnnnnnnnnnnnnnnnnnnnnnnnnnnnnnnnnnnnnnnnnnnnnnnnnnnnnnnnnnnnnnnnnnnnnnnnnnnnnnnnnnnnnnnnnnnnnnnnnnnnnnnnnnnnnnnnnnnnnnnnnnnnnnnnnnnnnnnnnnnnnnnnnnnnnnnnnnnnnnnnnnnnnnnnnnnnnnnnnnnnnnnnnnnnnnnnnnnnnnnnnnnnnnnnnnnnnnnnnnnnnnnnnnnnnnnnnnnnnnnnnnnnnnnnnnnnnnnnnnnnnnnnnnnnnnnnnnnnnnnnnnnnnnnnnnnnnnnnnnnnnnnnnnnnnnnnnnnnnnnnnnnnnnnnnnnnnnnnnnnnnnnnnnnnnnnnnnnnnnnnnnnnnnnnnnnnnnnnnnnnnnnnnnnnnnnnnnnnnnnnnnnnnnnnnnnnnnnnnnnnnnnnnnnnnnnnnnnnnnnnnnnnnnnnnnnnnnnnnnnnnnnnnnnnnnnnnnnnnnnnnnnnnnnnnnnnnnnnnnnnnnnnnnnnnnnnnnnnnnnnnnnnnnnnnnnnnnnnnnnnnnnnnnnnnnnnnnnnnnnnnnnnnnnnnnnnnnnnnnnnnnnnnnnnnnnnnnnnnnnnnnnnnnnnnnnnnnnnnnnnnnnnnnnnnnnnnnnnnnnnnnnnnnnnnnnnnnnnnnnnnnnnnnnnnnnnnnnnnnnnnnnnnnnnnnnnnnnnnnnnnnnnnnnnnnnnnnnnnnnnnnnnnnnnnnnnnnnnnnnnnnnnnnnnnnnnnnnnnnnnnnnnnnnnnnnnnnnnnnnnnnnnnnnnnnnnnnnnnnnnnnnnnnnnnnnnnnnnnnnnnnnnnnnnnnnnnnnnnnnnnnnnnnnnnnnnnnnnnnnnnnnnnnnnnnnnnnnnnnnnnnnnnnnnnnnnnnnnnnnnnnnnnnnnnnnnnnnnnnnnnnnnnnnnnnnnnnnnnnnnnnnnnnnnnnnnnnnnnnnnnnnnnnnnnnnnnnnnnnnnnnnnnnnnnnnnnnnnnnnnnnnnnnnnnnnnnnnnnnnnnnnnnnnnnnnnnnnnnnnnnnnnnnnnnnnnnnnnnnnnnnnnnnnnnnnnnnnnnnnnnnnnnnnnnnnnnnnnnnnnnnnnnnnnnnnnnnnnnnnnnnnnnnnnnnnnnnnnnnnnnnnnnnnnnnnnnnnnnnnnnnnnnnnnnnnnnnnnnnnnnnnnnnnnnnnnnnnnnnnnnnnnnnnnnnnnnnnnnnnnnnnnnnnnnnnnnnnnnnnnnnnnnnnnnnnnnnnnnnnnnnnnnnnnnnnnnnnnnnnnnnnnnnnnnnnnnnnnnnnnnnnnnnnnnnnnnnnnnnnnnnnnnnnnnnnnnnnnnnnnnnnnnnnnnnnnnnnnnnnnnnnnnnnnnnnnnnnnnnnnnnnnnnnnnnnnnnnnnnnnnnnnnnnnnnnnnnnnnnnnnnnnnnnnnnnnnnnnnnnnnnnnnnnnnnnnnnnnnnnnnnnnnnnnnnnnnnnnnnnnnnnnnnnnnnnnnnnnnnnnnnnnnnnnnnnnnnnnnnnnnnnnnnnnnnnnnnnnnnnnnnnnnnnnnnnnnnnnnnnnnnnnnnnnnnnnnnnnnnnnnnnnnnnnnnnnnnnnnnnnnnnnnnnnnnnnnnnnnnnnnnnnnnnnnnnnnnnnnnnnnnnnnnnnnnnnnnnnnnnnnnnnnnnnnnnnnnnnnnnnnnnnnnnnnnnnnnnnnnnnnnnnnnnnnnnnnnnnnnnnnnnnnnnnnnnnnnnnnnnnnnnnnnnnnnnnnnnnnnnnnnnnnnnnnnnnnnnnnnnnnnnnnnnnnnnnnnnnnnnnnnnnnnnnnnnnnnnnnnnnnnnnnnnnnnnnnnnnnnnnnnnnnnnnnnnnnnnnnnnnnnnnnnnnnnnnnnnnnnnnnnnnnnnnnnnnnnnnnnnnnnnnnnnnnnnnnnnnnnnnnnnnnnnnnnnnnnnnnnnnnnnnnnnnnnnnnnnnnnnnnnnnnnnnnnnnnnnnnnnnnnnnnnnnnnnnnnnnnnnnnnnnnnnnnnnnnnnnnnnnnnnnnnnnnnnnnnnnnnnnnnnnnnnnnnnnnnnnnnnnnnnnnnnnnnnnnnnnnnnnnnnnnnnnnnnnnnnnnnnnnnnnnnnnnnnnnnnnnnnnnnnnnnnnnnnnnnnnnnnnnnnnnnnnnnnnnnnnnnnnnnnnnnnnnnnnnnnnnnnnnnnnnnnnnnnnnnnnnnnnnnnnnnnnnnnnnnnnnnnnnnnnnnnnnnnnnnnnnnnnnnnnnnnnnnnnnnnnnnnnnnnnnnnnnnnnnnnnnnnnnnnnnnnnnnnnnnnnnnnnnnnnnnnnnnnnnnnnnnnnnnnnnnnnnnnnnnnnnnnnnnnnnnnnnnnnnnnnnnnnnnnnnnnnnnnnnnnnnnnnnnnnnnnnnnnnnnnnnnnnnnnnnnnnnnnnnnnnnnnnnnnnnnnnnnnnnnnnnnnnnnnnnnnnnnnnnnnnnnnnnnnnnnnnnnnnnnnnnnnnnnnnnnnnnnnnnnnnnnnnnnnnnnnnnnnnnnnnnnnnnnnnnnnnnnnnnnnnnnnnnnnnnnnnnnnnnnnnnnnnnnnnnnnnnnnnnnnnnnnnnnnnnnnnnnnnnnnnnnnnnnnnnnnnnnnnnnnnnnnnnnnnnnnnnnnnnnnnnnnnnnnnnnnnnnnnnnnnnnnnnnnnnnnnnnnnnnnnnnnnnnnnnnnnnnnnnnnnnnnnnnnnnnnnnnnnnnnnnnnnnnnnnnnnnnnnnnnnnnnnnnnnnnnnnnnnnnnnnnnnnnnnnnnnnnnnnnnnnnnnnnnnnnnnnnnnnnnnnnnnnnnnnnnnnnnnnnnnnnnnnnnnnnnnnnnnnnnnnnnnnnnnnnnnnnnnnnnnnnnnnnnnnnnnnnnnnnnnnnnnnnnnnnnnnnnnnnnnnnnnnnnnnnnnnnnnnnnnnnnnnnnnnnnnnnnnnnnnnnnnnnnnnnnnnnnnnnnnnnnnnnnnnnnnnnnnnnnnnnnnnnnnnnnnnnnnnnnnnnnnnnnnnnnnnnnnnnnnnnnnnnnnnnnnnnnnnnnnnnnnnnnnnnnnnnnnnnnnnnnnnnnnnnnnnnnnnnnnnnnnnnnnnnnnnnnnnnnnnnnnnnnnnnnnnnnnnnnnnnnnnnnnnnnnnnnnnnnnnnnnnnnnnnnnnnnnnnnnnnnnnnnnnnnnnnnnnnnnnnnnnnnnnnnnnnnnnnnnnnnnnnnnnnnnnnnnnnnnnnnnnnnnnnnnnnnnnnnnnnnnnnnnnnnnnnnnnnnnnnnnnnnnnnnnnnnnnnnnnnnnnnnnnnnnnnnnnnnnnnnnnnnnnnnnnnnnnnnnnnnnnnnnnnnnnnnnnnnnnnnnnnnnnnnnnnnnnnnnnnnnnnnnnnnnnnnnnnnnnnnnnnnnnnnnnnnnnnnnnnnnnnnnnnnnnnnnnnnnnnnnnnnnnnnnnnnnnnnnnnnnnnnnnnnnnnnnnnnnnnnnnnnnnnnnnnnnnnnnnnnnnnnnnnnnnnnnnnnnnnnnnnnnnnnnnnnnnnnnnnnnnnnnnnnnnnnnnnnnnnnnnnnnnnnnnnnnnnnnnnnnnnnnnnnnnnnnnnnnnnnnnnnnnnnnnnnnnnnnnnnnnnnnnnnnnnnnnnnnnnnnnnnnnnnnnnnnnnnnnnnnnnnnnnnnnnnnnnnnnnnnnnnnnnnnnnnnnnnnnnnnnnnnnnnnnnnnnnnnnnnnnnnnnnnnnnnnnnnnnnnnnnnnnnnnnnnnnnnnnnnnnnnnnnnnnnnnnnnnnnnnnnnnnnnnnnnnnnnnnnnnnnnnnnnnnnnnnnnnnnnnnnnnnnnnnnnnnnnnnnnnnnnnnnnnnnnnnnnnnnnnnnnnnnnnnnnnnnnnnnnnnnnnnnnnnnnnnnnnnnnnnnnnnnnnnnnnnnnnnnnnnnnnnnnnnnnnnnnnnnnnnnnnnnnnnnnnnnnnnnnnnnnnnnnnnnnnnnnnnnnnnnnnnnnnnnnnnnnnnnnnnnnnnnnnnnnnnnnnnnnnnnnnnnnnnnnnnnnnnnnnnnnnnnnnnnnnnnnnnnnnnnnnnnnnnnnnnnnnnnnnnnnnnnnnnnnnnnnnnnnnnnnnnnnnnnnnnnnnnnnnnnnnnnnnnnnnnnnnnnnnnnnnnnnnnnnnnnnnnnnnnnnnnnnnnnnnnnnnnnnnnnnnnnnnnnnnnnnnnnnnnnnnnnnnnnnnnnnnnnnnnnnnnnnnnnnnnnnnnnnnnnnnnnnnnnnnnnnnnnnnnnnnnnnnnnnnnnnnnnnnnnnnnnnnnnnnnnnnnnnnnnnnnnnnnnnnnnnnnnnnnnnnnnnnnnnnnnnnnnnnnnnnnnnnnnnnnnnnnnnnnnnnnnnnnnnnnnnnnnnnnnnnnnnnnnnnnnnnnnnnnnnnnnnnnnnnnnnnnnnnnnnnnnnnnnnnnnnnnnnnnnnnnnnnnnnnnnnnnnnnnnnnnnnnnnnnnnnnnnnnnnnnnnnnnnnnnnnnnnnnnnnnnnnnnnnnnnnnnnnnnnnnnnnnnnnnnnnnnnnnnnnnnnnnnnnnnnnnnnnnnnnnnnnnnnnnnnnnnnnnnnnnnnnnnnnnnnnnnnnnnnnnnnnnnnnnnnnnnnnnnnnnnnnnnnnnnnnnnnnnnnnnnnnnnnnnnnnnnnnnnnnnnnnnnnnnnnnnnnnnnnnnnnnnnnnnnnnnnnnnnnnnnnnnnnnnnnnnnnnnnnnnnnnnnnnnnnnnnnnnnnnnnnnnnnnnnnnnnnnnnnnnnnnnnnnnnnnnnnnnnnnnnnnnnnnnnnnnnnnnnnnnnnnnnnnnnnnnnnnnnnnnnnnnnnnnnnnnnnnnnnnnnnnnnnnnnnnnnnnnnnnnnnnnnnnnnnnnnnnnnnnnnnnnnnnnnnnnnnnnnnnnnnnnnnnnnnnnnnnnnnnnnnnnnnnnnnnnnnnnnnnnnnnnnnnnnnnnnnnnnnnnnnnnnnnnnnnnnnnnnnnnnnnnnnnnnnnnnnnnnnnnnnnnnnnnnnnnnnnnnnnnnnnnnnnnnnnnnnnnnnnnnnnnnnnnnnnnnnnnnnnnnnnnnnnnnnnnnnnnnnnnnnnnnnnnnnnnnnnnnnnnnnnnnnnnnnnnnnnnnnnnnnnnnnnnnnnnnnnnnnnnnnnnnnnnnnnnnnnnnnnnnnnnnnnnnnnnnnnnnnnnnnnnnnnnnnnnnnnnnnnnnnnnnnnnnnnnnnnnnnnnnnnnnnnnnnnnnnnnnnnnnnnnnnnnnnnnnnnnnnnnnnnnnnnnnnnnnnnnnnnnnnnnnnnnnnnnnnnnnnnnnnnnnnnnnnnnnnnnnnnnnnnnnnnnnnnnnnnnnnnnnnnnnnnnnnnnnnnnnnnnnnnnnnnnnnnnnnnnnnnnnnnnnnnnnnnnnnnnnnnnnnnnnnnnnnnnnnnnnnnnnnnnnnnnnnnnnnnnnnnnnnnnnnnnnnnnnnnnnnnnnnnnnnnnnnnnnnnnnnnnnnnnnnnnnnnnnnnnnnnnnnnnnnnnnnnnnnnnnnnnnnnnnnnnnnnnnnnnnnnnnnnnnnnnnnnnnnnnnnnnnnnnnnnnnnnnnnnnnnnnnnnnnnnnnnnnnnnnnnnnnnnnnnnnnnnnnnnnnnnnnnnnnnnnnnnnnnnnnnnnnnnnnnnnnnnnnnnnnnnnnnnnnnnnnnnnnnnnnnnnnnnnnnnnnnnnnnnnnnnnnnnnnnnnnnnnnnnnnnnnnnnnnnnnnnnnnnnnnnnnnnnnnnnnnnnnnnnnnnnnnnnnnnnnnnnnnnnnnnnnnnnnnnnnnnnnnnnnnnnnnnnnnnnnnnnnnnnnnnnnnnnnnnnnnnnnnnnnnnnnnnnnnnnnnnnnnnnnnnnnnnnnnnnnnnnnnnnnnnnnnnnnnnnnnnnnnnnnnnnnnnnnnnnnnnnnnnnnnnnnnnnnnnnnnnnnnnnnnnnnnnnnnnnnnnnnnnnnnnnnnnnnnnnnnnnnnnnnnnnnnnnnnnnnnnnnnnnnnnnnnnnnnnnnnnnnnnnnnnnnnnnnnnnnnnnnnnnnnnnnnnnnnnnnnnnnnnnnnnnnnnnnnnnnnnnnnnnnnnnnnnnnnnnnnnnnnnnnnnnnnnnnnnnnnnnnnnnnnnnnnnnnnnnnnnnnnnnnnnnnnnnnnnnnnnnnnnnnnnnnnnnnnnnnnnnnnnnnnnnnnnnnnnnnnnnnnnnnnnnnnnnnnnnnnnnnnnnnnnnnnnnnnnnnnnnnnnnnnnnnnnnnnnnnnnnnnnnnnnnnnnnnnnnnnnnnnnnnnnnnnnnnnnnnnnnnnnnnnnnnnnnnnnnnnnnnnnnnnnnnnnnnnnnnnnnnnnnnnnnnnnnnnnnnnnnnnnnnnnnnnnnnnnnnnnnnnnnnnnnnnnnnnnnnnnnnnnnnnnnnnnnnnnnnnnnnnnnnnnnnnnnnnnnnnnnnnnnnnnnnnnnnnnnnnnnnnnnnnnnnnnnnnnnnnnnnnnnnnnnnnnnnnnnnnnnnnnnnnnnnnnnnnnnnnnnnnnnnnnnnnnnnnnnnnnnnnnnnnnnnnnnnnnnnnnnnnnnnnnnnnnnnnnnnnnnnnnnnnnnnnnnnnnnnnnnnnnnnnnnnnnnnnnnnnnnnnnnnnnnnnnnnnnnnnnnnnnnnnnnnnnnnnnnnnnnnnnnnnnnnnnnnnnnnnnnnnnnnnnnnnnnnnnnnnnnnnnnnnnnnnnnnnnnnnnnnnnnnnnnnnnnnnnnnnnnnnnnnnnnnnnnnnnnnnnnnnnnnnnnnnnnnnnnnnnnnnnnnnnnnnnnnnnnnnnnnnnnnnnnnnnnnnnnnnnnnnnnnnnnnnnnnnnnnnnnnnnnnnnnnnnnnnnnnnnnnnnnnnnnnnnnnnnnnnnnnnnnnnnnnnnnnnnnnnnnnnnnnnnnnnnnnnnnnnnnnnnnnnnnnnnnnnnnnnnnnnnnnnnnnnnnnnnnnnnnnnnnnnnnnnnnnnnnnnnnnnnnnnnnnnnnnnnnnnnnnnnnnnnnnnnnnnnnnnnnnnnnnnnnnnnnnnnnnnnnnnnnnnnnnnnnnnnnnnnnnnnnnnnnnnnnnnnnnnnnnnnnnnnnnnnnnnnnnnnnnnnnnnnnnnnnnnnnnnnnnnnnnnnnnnnnnnnnnnnnnnnnnnnnnnnnnnnnnnnnnnnnnnnnnnnnnnnnnnnnnnnnnnnnnnnnnnnnnnnnnnnnnnnnnnnnnnnnnnnnnnnnnnnnnnnnnnnnnnnnnnnnnnnnnnnnnnnnnnnnnnnnnnnnnnnnnnnnnnnnnnnnnnnnnnnnnnnnnnnnnnnnnnnnnnnnnnnnnnnnnnnnnnnnnnnnnnnnnnnnnnnnnnnnnnnnnnnnnnnnnnnnnnnnnnnnnnnnnnnnnnnnnnnnnnnnnnnnnnnnnnnnnnnnnnnnnnnnnnnnnnnnnnnnnnnnnnnnnnnnnnnnnnnnnnnnnnnnnnnnnnnnnnnnnnnnnnnnnnnnnnnnnnnnnnnnnnnnnnnnnnnnnnnnnnnnnnnnnnnnnnnnnnnnnnnnnnnnnnnnnnnnnnnnnnnnnnnnnnnnnnnnnnnnnnnnnnnnnnnnnnnnnnnnnnnnnnnnnnnnnnnnnnnnnnnnnnnnnnnnnnnnnnnnnnnnnnnnnnnnnnnnnnnnnnnnnnnnnnnnnnnnnnnnnnnnnnnnnnnnnnnnnnnnnnnnnnnnnnnnnnnnnnnnnnnnnnnnnnnnnnnnnnnnnnnnnnnnnnnnnnnnnnnnnnnnnnnnnnnnnnnnnnnnnnnnnnnnnnnnnnnnnnnnnnnnnnnnnnnnnnnnnnnnnnnnnnnnnnnnnnnnnnnnnnnnnnnnnnnnnnnnnnnnnnnnnnnnnnnnnnnnnnnnnnnnnnnnnnnnnnnnnnnnnnnnnnnnnnnnnnnnnnnnnnnnnnnnnnnnnnnnnnnnnnnnnnnnnnnnnnnnnnnnnnnnnnnnnnnnnnnnnnnnnnnnnnnnnnnnnnnnnnnnnnnnnnnnnnnnnnnnnnnnnnnnnnnnnnnnnnnnnnnnnnnnnnnnnnnnnnnnnnnnnnnnnnnnnnnnnnnnnnnnnnnnnnnnnnnnnnnnnnnnnnnnnnnnnnnnnnnnnnnnnnnnnnnnnnnnnnnnnnnnnnnnnnnnnnnnnnnnnnnnnnnnnnnnnnnnnnnnnnnnnnnnnnnnnnnnnnnnnnnnnnnnnnnnnnnnnnnnnnnnnnnnnnnnnnnnnnnnnnnnnnnnnnnnnnnnnnnnnnnnnnnnnnnnnnnnnnnnnnnnnnnnnnnnnnnnnnnnnnnnnnnnnnnnnnnnnnnnnnnnnnnnnnnnnnnnnnnnnnnnnnnnnnnnnnnnnnnnnnnnnnnnnnnnnnnnnnnnnnnnnnnnnnnnnnnnnnnnnnnnnnnnnnnnnnnnnnnnnnnnnnnnnnnnnnnnnnnnnnnnnnnnnnnnnnnnnnnnnnnnnnnnnnnnnnnnnnnnnnnnnnnnnnnnnnnnnnnnnnnnnnnnnnnnnnnnnnnnnnnnnnnnnnnnnnnnnnnnnnnnnnnnnnnnnnnnnnnnnnnnnnnnnnnnnnnnnnnnnnnnnnnnnnnnnnnnnnnnnnnnnnnnnnnnnnnnnnnnnnnnnnnnnnnnnnnnnnnnnnnnnnnnnnnnnnnnnnnnnnnnnnnnnnnnnnnnnnnnnnnnnnnnnnnnnnnnnnnnnnnnnnnnnnnnnnnnnnnnnnnnnnnnnnnnnnnnnnnnnnnnnnnnnnnnnnnnnnnnnnnnnnnnnnnnnnnnnnnnnnnnnnnnnnnnnnnnnnnnnnnnnnnnnnnnnnnnnnnnnnnnnnnnnnnnnnnnnnnnnnnnnnnnnnnnnnnnnnnnnnnnnnnnnnnnnnnnnnnnnnnnnnnnnnnnnnnnnnnnnnnnnnnnnnnnnnnnnnnnnnnnnnnnnnnnnnnnnnnnnnnnnnnnnnnnnnnnnnnnnnnnnnnnnnnnnnnnnnnnnnnnnnnnnnnnnnnnnnnnnnnnnnnnnnnnnnnnnnnnnnnnnnnnnnnnnnnnnnnnnnnnnnnnnnnnnnnnnnnnnnnnnnnnnnnnnnnnnnnnnnnnnnnnnnnnnnnnnnnnnnnnnnnnnnnnnnnnnnnnnnnnnnnnnnnnnnnnnnnnnnnnnnnnnnnnnnnnnnnnnnnnnnnnnnnnnnnnnnnnnnnnnnnnnnnnnnnnnnnnnnnnnnnnnnnnnnnnnnnnnnnnnnnnnnnnnnnnnnnnnnnnnnnnnnnnnnnnnnnnnnnnnnnnnnnnnnnnnnnnnnnnnnnnnnnnnnnnnnnnnnnnnnnnnnnnnnnnnnnnnnnnnnnnnnnnnnnnnnnnnnnnnnnnnnnnnnnnnnnnnnnnnnnnnnnnnnnnnnnnnnnnnnnnnnnnnnnnnnnnnnnnnnnnnnnnnnnnnnnnnnnnnnnnnnnnnnnnnnnnnnnnnnnnnnnnnnnnnnnnnnnnnnnnnnnnnnnnnnnnnnnnnnnnnnnnnnnnnnnnnnnnnnnnnnnnnnnnnnnnnnnnnnnnnnnnnnnnnnnnnnnnnnnnnnnnnnnnnnnnnnnnnnnnnnnnnnnnnnnnnnnnnnnnnnnnnnnnnnnnnnnnnnnnnnnnnnnnnnnnnnnnnnnnnnnnnnnnnnnnnnnnnnnnnnnnnnnnnnnnnnnnnnnnnnnnnnnnnnnnnnnnnnnnnnnnnnnnnnnnnnnnnnnnnnnnnnnnnnnnnnnnnnnnnnnnnnnnnnnnnnnnnnnnnnnnnnnnnnnnnnnnnnnnnnnnnnnnnnnnnnnnnnnnnnnnnnnnnnnnnnnnnnnnnnnnnnnnnnnnnnnnnnnnnnnnnnnnnnnnnnnnnnnnnnnnnnnnnnnnnnnnnnnnnnnnnnnnnnnnnnnnnnnnnnnnnnnnnnnnnnnnnnnnnnnnnnnnnnnnnnnnnnnnnnnnnnnnnnnnnnnnnnnnnnnnnnnnnnnnnnnnnnnnnnnnnnnnnnnnnnnnnnnnnnnnnnnnnnnnnnnnnnnnnnnnnnnnnnnnnnnnnnnnnnnnnnnnnnnnnnnnnnnnnnnnnnnnnnnnnnnnnnnnnnnnnnnnnnnnnnnnnnnnnnnnnnnnnnnnnnnnnnnnnnnnnnnnnnnnnnnnnnnnnnnnnnnnnnnnnnnnnnnnnnnnnnnnnnnnnnnnnnnnnnnnnnnnnnnnnnnnnnnnnnnnnnnnnnnnnnnnnnnnnnnnnnnnnnnnnnnnnnnnnnnnnnnnnnnnnnnnnnnnnnnnnnnnnnnnnnnnnnnnnnnnnnnnnnnnnnnnnnnnnnnnnnnnnnnnnnnnnnnnnnnnnnnnnnnnnnnnnnnnnnnnnnnnnnnnnnnnnnnnnnnnnnnnnnnnnnnnnnnnnnnnnnnnnnnnnnnnnnnnnnnnnnnnnnnnnnnnnnnnnnnnnnnnnnnnnnnnnnnnnnnnnnnnnnnnnnnnnnnnnnnnnnnnnnnnnnnnnnnnnnnnnnnnnnnnnnnnnnnnnnnnnnnnnnnnnnnnnnnnnnnnnnnnnnnnnnnnnnnnnnnnnnnnnnnnnnnnnnnnnnnnnnnnnnnnnnnnnnnnnnnnnnnnnnnnnnnnnnnnnnnnnnnnnnnnnnnnnnnnnnnnnnnnnnnnnnnnnnnnnnnnnnnnnnnnnnnnnnnnnnnnnnnnnnnnnnnnnnnnnnnnnnnnnnnnnnnnnnnnnnnnnnnnnnnnnnnnnnnnnnnnnnnnnnnnnnnnnnnnnnnnnnnnnnnnnnnnnnnnnnnnnnnnnnnnnnnnnnnnnnnnnnnnnnnnnnnnnnnnnnnnnnnnnnnnnnnnnnnnnnnnnnnnnnnnnnnnnnnnnnnnnnnnnnnnnnnnnnnnnnnnnnnnnnnnnnnnnnnnnnnnnnnnnnnnnnnnnnnnnnnnnnnnnnnnnnnnnnnnnnnnnnnnnnnnnnnnnnnnnnnnnnnnnnnnnnnnnnnnnnnnnnnnnnnnnnnnnnnnnnnnnnnnnnnnnnnnnnnnnnnnnnnnnnnnnnnnnnnnnnnnnnnnnnnnnnnnnnnnnnnnnnnnnnnnnnnnnnnnnnnnnnnnnnnnnnnnnnnnnnnnnnnnnnnnnnnnnnnnnnnnnnnnnnnnnnnnnnnnnnnnnnnnnnnnnnnnnnnnnnnnnnnnnnnnnnnnnnnnnnnnnnnnnnnnnnnnnnnnnnnnnnnnnnnnnnnnnnnnnnnnnnnnnnnnnnnnnnnnnnnnnnnnnnnnnnnnnnnnnnnnnnnnnnnnnnnnnnnnnnnnnnnnnnnnnnnnnnnnnnnnnnnnnnnnnnnnnnnnnnnnnnnnnnnnnnnnnnnnnnnnnnnnnnnnnnnnnnnnnnnnnnnnnnnnnnnnnnnnnnnnnnnnnnnnnnnnnnnnnnnnnnnnnnnnnnnnnnnnnnnnnnnnnnnnnnnnnnnnnnnnnnnnnnnnnnnnnnnnnnnnnnnnnnnnnnnnnnnnnnnnnnnnnnnnnnnnnnnnnnnnnnnnnnnnnnnnnnnnnnnnnnnnnnnnnnnnnnnnnnnnnnnnnnnnnnnnnnnnnnnnnnnnnnnnnnnnnnnnnnnnnnnnnnnnnnnnnnnnnnnnnnnnnnnnnnnnnnnnnnnnnnnnnnnnnnnnnnnnnnnnnnnnnnnnnnnnnnnnnnnnnnnnnnnnnnnnnnnnnnnnnnnnnnnnnnnnnnnnnnnnnnnnnnnnnnnnnnnnnnnnnnnnnnnnnnnnnnnnnnnnnnnnnnnnnnnnnnnnnnnnnnnnnnnnnnnnnnnnnnnnnnnnnnnnnnnnnnnnnnnnnnnnnnnnnnnnnnnnnnnnnnnnnnnnnnnnnnnnnnnnnnnnnnnnnnnnnnnnnnnnnnnnnnnnnnnnnnnnnnnnnnnnnnnnnnnnnnnnnnnnnnnnnnnnnnnnnnnnnnnnnnnnnnnnnnnnnnnnnnnnnnnnnnnnnnnnnnnnnnnnnnnnnnnnnnnnnnnnnnnnnnnnnnnnnnnnnnnnnnnnnnnnnnnnnnnnnnnnnnnnnnnnnnnnnnnnnnnnnnnnnnnnnnnnnnnnnnnnnnnnnnnnnnnnnnnnnnnnnnnnnnnnnnnnnnnnnnnnnnnnnnnnnnnnnnnnnnnnnnnnnnnnnnnnnnnnnnnnnnnnnnnnnnnnnnnnnnnnnnnnnnnnnnnnnnnnnnnnnnnnnnnnnnnnnnnnnnnnnnnnnnnnnnnnnnnnnnnnnnnnnnnnnnnnnnnnnnnnnnnnnnnnnnnnnnnnnnnnnnnnnnnnnnnnnnnnnnnnnnnnnnnnnnnnnnnnnnnnnnnnnnnnnnnnnnnnnnnnnnnnnnnnnnnnnnnnnnnnnnnnnnnnnnnnnnnnnnnnnnnnnnnnnnnnnnnnnnnnnnnnnnnnnnnnnnnnnnnnnnnnnnnnnnnnnnnnnnnnnnnnnnnnnnnnnnnnnnnnnnnnnnnnnnnnnnnnnnnnnnnnnnnnnnnnnnnnnnnnnnnnnnnnnnnnnnnnnnnnnnnnnnnnnnnnnnnnnnnnnnnnnnnnnnnnnnnnnnnnnnnnnnnnnnnnnnnnnnnnnnnnnnnnnnnnnnnnnnnnnnnnnnnnnnnnnnnnnnnnnnnnnnnnnnnnnnnnnnnnnnnnnnnnnnnnnnnnnnnnnnnnnnnnnnnnnnnnnnnnnnnnnnnnnnnnnnnnnnnnnnnnnnnnnnnnnnnnnnnnnnnnnnnnnnnnnnnnnnnnnnnnnnnnnnnnnnnnnnnnnnnnnnnnnnnnnnnnnnnnnnnnnnnnnnnnnnnnnnnnnnnnnnnnnnnnnnnnnnnnnnnnnnnnnnnnnnnnnnnnnnnnnnnnnnnnnnnnnnnnnnnnnnnnnnnnnnnnnnnnnnnnnnnnnnnnnnnnnnnnnnnnnnnnnnnnnnnnnnnnnnnnnnnnnnnnnnnnnnnnnnnnnnnnnnnnnnnnnnnnnnnnnnnnnnnnnnnnnnnnnnnnnnnnnnnnnnnnnnnnnnnnnnnnnnnnnnnnnnnnnnnnnnnnnnnnnnnnnnnnnnnnnnnnnnnnnnnnnnnnnnnnnnnnnnnnnnnnnnnnnnnnnnnnnnnnnnnnnnnnnnnnnnnnnnnnnnnnnnnnnnnnnnnnnnnnnnnnnnnnnnnnnnnnnnnnnnnnnnnnnnnnnnnnnnnnnnnnnnnnnnnnnnnnnnnnnnnnnnnnnnnnnnnnnnnnnnnnnnnnnnnnnnnnnnnnnnnnnnnnnnnnnnnnnnnnnnnnnnnnnnnnnnnnnnnnnnnnnnnnnnnnnnnnnnnnnnnnnnnnnnnnnnnnnnnnnnnnnnnnnnnnnnnnnnnnnnnnnnnnnnnnnnnnnnnnnnnnnnnnnnnnnnnnnnnnnnnnnnnnnnnnnnnnnnnnnnnnnnnnnnnnnnnnnnnnnnnnnnnnnnnnnnnnnnnnnnnnnnnnnnnnnnnnnnnnnnnnnnnnnnnnnnnnnnnnnnnnnnnnnnnnnnnnnnnnnnnnnnnnnnnnnnnnnnnnnnnnnnnnnnnnnnnnnnnnnnnnnnnnnnnnnnnnnnnnnnnnnnnnnnnnnnnnnnnnnnnnnnnnnnnnnnnnnnnnnnnnnnnnnnnnnnnnnnnnnnnnnnnnnnnnnnnnnnnnnnnnnnnnnnnnnnnnnnnnnnnnnnnnnnnnnnnnnnnnnnnnnnnnnnnnnnnnnnnnnnnnnnnnnnnnnnnnnnnnnnnnnnnnnnnnnnnnnnnnnnnnnnnnnnnnnnnnnnnnnnnnnnnnnnnnnnnnnnnnnnnnnnnnnnnnnnnnnnnnnnnnnnnnnnnnnnnnnnnnnnnnnnnnnnnnnnnnnnnnnnnnnnnnnnnnnnnnnnnnnnnnnnnnnnnnnnnnnnnnnnnnnnnnnnnnnnnnnnnnnnnnnnnnnnnnnnnnnnnnnnnnnnnnnnnnnnnnnnnnnnnnnnnnnnnnnnnnnnnnnnnnnnnnnnnnnnnnnnnnnnnnnnnnnnnnnnnnnnnnnnnnnnnnnnnnnnnnnnnnnnnnnnnnnnnnnnnnnnnnnnnnnnnnnnnnnnnnnnnnnnnnnnnnnnnnnnnnnnnnnnnnnnnnnnnnnnnnnnnnnnnnnnnnnnnnnnnnnnnnnnnnnnnnnnnnnnnnnnnnnnnnnnnnnnnnnnnnnnnnnnnnnnnnnnnnnnnnnnnnnnnnnnnnnnnnnnnnnnnnnnnnnnnnnnnnnnnnnnnnnnnnnnnnnnnnnnnnnnnnnnnnnnnnnnnnnnnnnnnnnnnnnnnnnnnnnnnnnnnnnnnnnnnnnnnnnnnnnnnnnnnnnnnnnnnnnnnnnnnnnnnnnnnnnnnnnnnnnnnnnnnnnnnnnnnnnnnnnnnnnnnnnnnnnnnnnnnnnnnnnnnnnnnnnnnnnnnnnnnnnnnnnnnnnnnnnnnnnnnnnnnnnnnnnnnnnnnnnnnnnnnnnnnnnnnnnnnnnnnnnnnnnnnnnnnnnnnnnnnnnnnnnnnnnnnnnnnnnnnnnnnnnnnnnnnnnnnnnnnnnnnnnnnnnnnnnnnnnnnnnnnnnnnnnnnnnnnnnnnnnnnnnnnnnnnnnnnnnnnnnnnnnnnnnnnnnnnnnnnnnnnnnnnnnnnnnnnnnnnnnnnnnnnnnnnnnnnnnnnnnnnnnnnnnnnnnnnnnnnnnnnnnnnnnnnnnnnnnnnnnnnnnnnnnnnnnnnnnnnnnnnnnnnnnnnnnnnnnnnnnnnnnnnnnnnnnnnnnnnnnnnnnnnnnnnnnnnnnnnnnnnnnnnnnnnnnnnnnnnnnnnnnnnnnnnnnnnnnnnnnnnnnnnnnnnnnnnnnnnnnnnnnnnnnnnnnnnnnnnnnnnnnnnnnnnnnnnnnnnnnnnnnnnnnnnnnnnnnnnnnnnnnnnnnnnnnnnnnnnnnnnnnnnnnnnnnnnnnnnnnnnnnnnnnnnnnnnnnnnnnnnnnnnnnnnnnnnnnnnnnnnnnnnnnnnnnnnnnnnnnnnnnnnnnnnnnnnnnnnnnnnnnnnnnnnnnnnnnnnnnnnnnnnnnnnnnnnnnnnnnnnnnnnnnnnnnnnnnnnnnnnnnnnnnnnnnnnnnnnnnnnnnnnnnnnnnnnnnnnnnnnnnnnnnnnnnnnnnnnnnnnnnnnnnnnnnnnnnnnnnnnnnnnnnnnnnnnnnnnnnnnnnnnnnnnnnnnnnnnnnnnnnnnnnnnnnnnnnnnnnnnnnnnnnnnnnnnnnnnnnnnnnnnnnnnnnnnnnnnnnnnnnnnnnnnnnnnnnnnnnnnnnnnnnnnnnnnnnnnnnnnnnnnnnnnnnnnnnnnnnnnnnnnnnnnnnnnnnnnnnnnnnnnnnnnnnnnnnnnnnnnnnnnnnnnnnnnnnnnnnnnnnnnnnnnnnnnnnnnnnnnnnnnnnnnnnnnnnnnnnnnnnnnnnnnnnnnnnnnnnnnnnnnnnnnnnnnnnnnnnnnnnnnnnnnnnnnnnnnnnnnnnnnnnnnnnnnnnnnnnnnnnnnnnnnnnnnnnnnnnnnnnnnnnnnnnnnnnnnnnnnnnnnnnnnnnnnnnnnnnnnnnnnnnnnnnnnnnnnnnnnnnnnnnnnnnnnnnnnnnnnnnnnnnnnnnnnnnnnnnnnnnnnnnnnnnnnnnnnnnnnnnnnnnnnnnnnnnnnnnnnnnnnnnnnnnnnnnnnnnnnnnnnnnnnnnnnnnnnnnnnnnnnnnnnnnnnnnnnnnnnnnnnnnnnnnnnnnnnnnnnnnnnnnnnnnnnnnnnnnnnnnnnnnnnnnnnnnnnnnnnnnnnnnnnnnnnnnnnnnnnnnnnnnnnnnnnnnnnnnnnnnnnnnnnnnnnnnnnnnnnnnnnnnnnnnnnnnnnnnnnnnnnnnnnnnnnnnnnnnnnnnnnnnnnnnnnnnnnnnnnnnnnnnnnnnnnnnnnnnnnnnnnnnnnnnnnnnnnnnnnnnnnnnnnnnnnnnnnnnnnnnnnnnnnnnnnnnnnnnnnnnnnnnnnnnnnnnnnnnnnnnnnnnnnnnnnnnnnnnnnnnnnnnnnnnnnnnnnnnnnnnnnnnnnnnnnnnnnnnnnnnnnnnnnnnnnnnnnnnnnnnnnnnnnnnnnnnnnnnnnnnnnnnnnnnnnnnnnnnnnnnnnnnnnnnnnnnnnnnnnnnnnnnnnnnnnnnnnnnnnnnnnnnnnnnnnnnnnnnnnnnnnnnnnnnnnnnnnnnnnnnnnnnnnnnnnnnnnnnnnnnnnnnnnnnnnnnnnnnnnnnnnnnnnnnnnnnnnnnnnnnnnnnnnnnnnnnnnnnnnnnnnnnnnnnnnnnnnnnnnnnnnnnnnnnnnnnnnnnnnnnnnnnnnnnnnnnnnnnnnnnnnnnnnnnnnnnnnnnnnnnnnnnnnnnnnnnnnnnnnnnnnnnnnnnnnnnnnnnnnnnnnnnnnnnnnnnnnnnnnnnnnnnnnnnnnnnnnnnnnnnnnnnnnnnnnnnnnnnnnnnnnnnnnnnnnnnnnnnnnnnnnnnnnnnnnnnnnnnnnnnnnnnnnnnnnnnnnnnnnnnnnnnnnnnnnnnnnnnnnnnnnnnnnnnnnnnnnnnnnnnnnnnnnnnnnnnnnnnnnnnnnnnnnnnnnnnnnnnnnnnnnnnnnnnnnnnnnnnnnnnnnnnnnnnnnnnnnnnnnnnnnnnnnnnnnnnnnnnnnnnnnnnnnnnnnnnnnnnnnnnnnnnnnnnnnnnnnnnnnnnnnnnnnnnnnnnnnnnnnnnnnnnnnnnnnnnnnnnnnnnnnnnnnnnnnnnnnnnnnnnnnnnnnnnnnnnnnnnnnnnnnnnnnnnnnnnnnnnnnnnnnnnnnnnnnnnnnnnnnnnnnnnnnnnnnnnnnnnnnnnnnnnnnnnnnnnnnnnnnnnnnnnnnnnnnnnnnnnnnnnnnnnnnnnnnnnnnnnnnnnnnnnnnnnnnnnnnnnnnnnnnnnnnnnnnnnnnnnnnnnnnnnnnnnnnnnnnnnnnnnnnnnnnnnnnnnnnnnnnnnnnnnnnnnnnnnnnnnnnnnnnnnnnnnnnnnnnnnnnnnnnnnnnnnnnnnnnnnnnnnnnnnnnnnnnnnnnnnnnnnnnnnnnnnnnnnnnnnnnnnnnnnnnnnnnnnnnnnnnnnnnnnnnnnnnnnnnnnnnnnnnnnnnnnnnnnnnnnnnnnnnnnnnnnnnnnnnnnnnnnnnnnnnnnnnnnnnnnnnnnnnnnnnnnnnnnnnnnnnnnnnnnnnnnnnnnnnnnnnnnnnnnnnnnnnnnnnnnnnnnnnnnnnnnnnnnnnnnnnnnnnnnnnnnnnnnnnnnnnnnnnnnnnnnnnnnnnnnnnnnnnnnnnnnnnnnnnnnnnnnnnnnnnnnnnnnnnnnnnnnnnnnnnnnnnnnnnnnnnnnnnnnnnnnnnnnnnnnnnnnnnnnnnnnnnnnnnnnnnnnnnnnnnnnnnnnnnnnnnnnnnnnnnnnnnnnnnnnnnnnnnnnnnnnnnnnnnnnnnnnnnnnnnnnnnnnnnnnnnnnnnnnnnnnnnnnnnnnnnnnnnnnnnnnnnnnnnnnnnnnnnnnnnnnnnnnnnnnnnnnnnnnnnnnnnnnnnnnnnnnnnnnnnnnnnnnnnnnnnnnnnnnnnnnnnnnnnnnnnnnnnnnnnnnnnnnnnnnnnnnnnnnnnnnnnnnnnnnnnnnnnnnnnnnnnnnnnnnnnnnnnnnnnnnnnnnnnnnnnnnnnnnnnnnnnnnnnnnnnnnnnnnnnnnnnnnnnnnnnnnnnnnnnnnnnnnnnnnnnnnnnnnnnnnnnnnnnnnnnnnnnnnnnnnnnnnnnnnnnnnnnnnnnnnnnnnnnnnnnnnnnnnnnnnnnnnnnnnnnnnnnnnnnnnnnnnnnnnnnnnnnnnnnnnnnnnnnnnnnnnnnnnnnnnnnnnnnnnnnnnnnnnnnnnnnnnnnnnnnnnnnnnnnnnnnnnnnnnnnnnnnnnnnnnnnnnnnnnnnnnnnnnnnnnnnnnnnnnnnnnnnnnnnnnnnnnnnnnnnnnnnnnnnnnnnnnnnnnnnnnnnnnnnnnnnnnnnnnnnnnnnnnnnnnnnnnnnnnnnnnnnnnnnnnnnnnnnnnnnnnnnnnnnnnnnnnnnnnnnnnnnnnnnnnnnnnnnnnnnnnnnnnnnnnnnnnnnnnnnnnnnnnnnnnnnnnnnnnnnnnnnnnnnnnnnnnnnnnnnnnnnnnnnnnnnnnnnnnnnnnnnnnnnnnnnnnnnnnnnnnnnnnnnnnnnnnnnnnnnnnnnnnnnnnnnnnnnnnnnnnnnnnnnnnnnnnnnnnnnnnnnnnnnnnnnnnnnnnnnnnnnnnnnnnnnnnnnnnnnnnnnnnnnnnnnnnnnnnnnnnnnnnnnnnnnnnnnnnnnnnnnnnnnnnnnnnnnnnnnnnnnnnnnnnnnnnnnnnnnnnnnnnnnnnnnnnnnnnnnnnnnnnnnnnnnnnnnnnnnnnnnnnnnnnnnnnnnnnnnnnnnnnnnnnnnnnnnnnnnnnnnnnnnnnnnnnnnnnnnnnnnnnnnnnnnnnnnnnnnnnnnnnnnnnnnnnnnnnnnnnnnnnnnnnnnnnnnnnnnnnnnnnnnnnnnnnnnnnnnnnnnnnnnnnnnnnnnnnnnnnnnnnnnnnnnnnnnnnnnnnnnnnnnnnnnnnnnnnnnnnnnnnnnnnnnnnnnnnnnnnnnnnnnnnnnnnnnnnnnnnnnnnnnnnnnnnnnnnnnnnnnnnnnnnnnnnnnnnnnnnnnnnnnnnnnnnnnnnnnnnnnnnnnnnnnnnnnnnnnnnnnnnnnnnnnnnnnnnnnnnnnnnnnnnnnnnnnnnnnnnnnnnnnnnnnnnnnnnnnnnnnnnnnnnnnnnnnnnnnnnnnnnnnnnnnnnnnnnnnnnnnnnnnnnnnnnnnnnnnnnnnnnnnnnnnnnnnnnnnnnnnnnnnnnnnnnnnnnnnnnnnnnnnnnnnnnnnnnnnnnnnnnnnnnnnnnnnnnnnnnnnnnnnnnnnnnnnnnnnnnnnnnnnnnnnnnnnnnnnnnnnnnnnnnnnnnnnnnnnnnnnnnnnnnnnnnnnnnnnnnnnnnnnnnnnnnnnnnnnnnnnnnnnnnnnnnnnnnnnnnnnnnnnnnnnnnnnnnnnnnnnnnnnnnnnnnnnnnnnnnnnnnnnnnnnnnnnnnnnnnnnnnnnnnnnnnnnnnnnnnnnnnnnnnnnnnnnnnnnnnnnnnnnnnnnnnnnnnnnnnnnnnnnnnnnnnnnnnnnnnnnnnnnnnnnnnnnnnnnnnnnnnnnnnnnnnnnnnnnnnnnnnnnnnnnnnnnnnnnnnnnnnnnnnnnnnnnnnnnnnnnnnnnnnnnnnnnnnnnnnnnnnnnnnnnnnnnnnnnnnnnnnnnnnnnnnnnnnnnnnnnnnnnnnnnnnnnnnnnnnnnnnnnnnnnnnnnnnnnnnnnnnnnnnnnnnnnnnnnnnnnnnnnnnnnnnnnnnnnnnnnnnnnnnnnnnnnnnnnnnnnnnnnnnnnnnnnnnnnnnnnnnnnnnnnnnnnnnnnnnnnnnnnnnnnnnnnnnnnnnnnnnnnnnnnnnnnnnnnnnnnnnnnnnnnnnnnnnnnnnnnnnnnnnnnnnnnnnnnnnnnnnnnnnnnnnnnnnnnnnnnnnnnnnnnnnnnnnnnnnnnnnnnnnnnnnnnnnnnnnnnnnnnnnnnnnnnnnnnnnnnnnnnnnnnnnnnnnnnnnnnnnnnnnnnnnnnnnnnnnnnnnnnnnnnnnnnnnnnnnnnnnnnnnnnnnnnnnnnnnnnnnnnnnnnnnnnnnnnnnnnnnnnnnnnnnnnnnnnnnnnnnnnnnnnnnnnnnnnnnnnnnnnnnnnnnnnnnnnnnnnnnnnnnnnnnnnnnnnnnnnnnnnnnnnnnnnnnnnnnnnnnnnnnnnnnnnnnnnnnnnnnnnnnnnnnnnnnnnnnnnnnnnnnnnnnnnnnnnnnnnnnnnnnnnnnnnnnnnnnnnnnnnnnnnnnnnnnnnnnnnnnnnnnnnnnnnnnnnnnnnnnnnnnnnnnnnnnnnnnnnnnnnnnnnnnnnnnnnnnnnnnnnnnnnnnnnnnnnnnnnnnnnnnnnnnnnnnnnnnnnnnnnnnnnnnnnnnnnnnnnnnnnnnnnnnnnnnnnnnnnnnnnnnnnnnnnnnnnnnnnnnnnnnnnnnnnnnnnnnnnnnnnnnnnnnnnnnnnnnnnnnnnnnnnnnnnnnnnnnnnnnnnnnnnnnnnnnnnnnnnnnnnnnnnnnnnnnnnnnnnnnnnnnnnnnnnnnnnnnnnnnnnnnnnnnnnnnnnnnnnnnnnnnnnnnnnnnnnnnnnnnnnnnnnnnnnnnnnnnnnnnnnnnnnnnnnnnnnnnnnnnnnnnnnnnnnnnnnnnnnnnnnnnnnnnnnnnnnnnnnnnnnnnnnnnnnnnnnnnnnnnnnnnnnnnnnnnnnnnnnnnnnnnnnnnnnnnnnnnnnnnnnnnnnnnnnnnnnnnnnnnnnnnnnnnnnnnnnnnnnnnnnnnnnnnnnnnnnnnnnnnnnnnnnnnnnnnnnnnnnnnnnnnnnnnnnnnnnnnnnnnnnnnnnnnnnnnnnnnnnnnnnnnnnnnnnnnnnnnnnnnnnnnnnnnnnnnnnnnnnnnnnnnnnnnnnnnnnnnnnnnnnnnnnnnnnnnnnnnnnnnnnnnnnnnnnnnnnnnnnnnnnnnnnnnnnnnnnnnnnnnnnnnnnnnnnnnnnnnnnnnnnnnnnnnnnnnnnnnnnnnnnnnnnnnnnnnnnnnnnnnnnnnnnnnnnnnnnnnnnnnnnnnnnnnnnnnnnnnnnnnnnnnnnnnnnnnnnnnnnnnnnnnnnnnnnnnnnnnnnnnnnnnnnnnnnnnnnnnnnnnnnnnnnnnnnnnnnnnnnnnnnnnnnnnnnnnnnnnnnnnnnnnnnnnnnnnnnnnnnnnnnnnnnnnnnnnnnnnnnnnnnnnnnnnnnnnnnnnnnnnnnnnnnnnnnnnnnnnnnnnnnnnnnnnnnnnnnnnnnnnnnnnnnnnnnnnnnnnnnnnnnnnnnnnnnnnnnnnnnnnnnnnnnnnnnnnnnnnnnnnnnnnnnnnnnnnnnnnnnnnnnnnnnnnnnnnnnnnnnnnnnnnnnnnnnnnnnnnnnnnnnnnnnnnnnnnnnnnnnnnnnnnnnnnnnnnnnnnnnnnnnnnnnnnnnnnnnnnnnnnnnnnnnnnnnnnnnnnnnnnnnnnnnnnnnnnnnnnnnnnnnnnnnnnnnnnnnnnnnnnnnnnnnnnnnnnnnnnnnnnnnnnnnnnnnnnnnnnnnnnnnnnnnnnnnnnnnnnnnnnnnnnnnnnnnnnnnnnnnnnnnnnnnnnnnnnnnnnnnnnnnnnnnnnnnnnnnnnnnnnnnnnnnnnnnnnnnnnnnnnnnnnnnnnnnnnnnnnnnnnnnnnnnnnnnnnnnnnnnnnnnnnnnnnnnnnnnnnnnnnnnnnnnnnnnnnnnnnnnnnnnnnnnnnnnnnnnnnnnnnnnnnnnnnnnnnnnnnnnnnnnnnnnnnnnnnnnnnnnnnnnnnnnnnnnnnnnnnnnnnnnnnnnnnnnnnnnnnnnnnnnnnnnnnnnnnnnnnnnnnnnnnnnnnnnnnnnnnnnnnnnnnnnnnnnnnnnnnnnnnnnnnnnnnnnnnnnnnnnnnnnnnnnnnnnnnnnnnnnnnnnnnnnnnnnnnnnnnnnnnnnnnnnnnnnnnnnnnnnnnnnnnnnnnnnnnnnnnnnnnnnnnnnnnnnnnnnnnnnnnnnnnnnnnnnnnnnnnnnnnnnnnnnnnnnnnnnnnnnnnnnnnnnnnnnnnnnnnnnnnnnnnnnnnnnnnnnnnnnnnnnnnnnnnnnnnnnnnnnnnnnnnnnnnnnnnnnnnnnnnnnnnnnnnnnnnnnnnnnnnnnnnnnnnnnnnnnnnnnnnnnnnnnnnnnnnnnnnnnnnnnnnnnnnnnnnnnnnnnnnnnnnnnnnnnnnnnnnnnnnnnnnnnnnnnnnnnnnnnnnnnnnnnnnnnnnnnnnnnnnnnnnnnnnnnnnnnnnnnnnnnnnnnnnnnnnnnnnnnnnnnnnnnnnnnnnnnnnnnnnnnnnnnnnnnnnnnnnnnnnnnnnnnnnnnnnnnnnnnnnnnnnnnnnnnnnnnnnnnnnnnnnnnnnnnnnnnnnnnnnnnnnnnnnnnnnnnnnnnnnnnnnnnnnnnnnnnnnnnnnnnnnnnnnnnnnnnnnnnnnnnnnnnnnnnnnnnnnnnnnnnnnnnnnnnnnnnnnnnnnnnnnnnnnnnnnnnnnnnnnnnnnnnnnnnnnnnnnnnnnnnnnnnnnnnnnnnnnnnnnnnnnnnnnnnnnnnnnnnnnnnnnnnnnnnnnnnnnnnnnnnnnnnnnnnnnnnnnnnnnnnnnnnnnnnnnnnnnnnnnnnnnnnnnnnnnnnnnnnnnnnnnnnnnnnnnnnnnnnnnnnnnnnnnnnnnnnnnnnnnnnnnnnnnnnnnnnnnnnnnnnnnnnnnnnnnnnnnnnnnnnnnnnnnnnnnnnnnnnnnnnnnnnnnnnnnnnnnnnnnnnnnnnnnnnnnnnnnnnnnnnnnnnnnnnnnnnnnnnnnnnnnnnnnnnnnnnnnnnnnnnnnnnnnnnnnnnnnnnnnnnnnnnnnnnnnnnnnnnnnnnnnnnnnnnnnnnnnnnnnnnnnnnnnnnnnnnnnnnnnnnnnnnnnnnnnnnnnnnnnnnnnnnnnnnnnnnnnnnnnnnnnnnnnnnnnnnnnnnnnnnnnnnnnnnnnnnnnnnnnnnnnnnnnnnnnnnnnnnnnnnnnnnnnnnnnnnnnnnnnnnnnnnnnnnnnnnnnnnnnnnnnnnnnnnnnnnnnnnnnnnnnnnnnnnnnnnnnnnnnnnnnnnnnnnnnnnnnnnnnnnnnnnnnnnnnnnnnnnnnnnnnnnnnnnnnnnnnnnnnnnnnnnnnnnnnnnnnnnnnnnnnnnnnnnnnnnnnnnnnnnnnnnnnnnnnnnnnnnnnnnnnnnnnnnnnnnnnnnnnnnnnnnnnnnnnnnnnnnnnnnnnnnnnnnnnnnnnnnnnnnnnnnnnnnnnnnnnnnnnnnnnnnnnnnnnnnnnnnnnnnnnnnnnnnnnnnnnnnnnnnnnnnnnnnnnnnnnnnnnnnnnnnnnnnnnnnnnnnnnnnnnnnnnnnnnnnnnnnnnnnnnnnnnnnnnnnnnnnnnnnnnnnnnnnnnnnnnnnnnnnnnnnnnnnnnnnnnnnnnnnnnnnnnnnnnnnnnnnnnnnnnnnnnnnnnnnnnnnnnnnnnnnnnnnnnnnnnnnnnnnnnnnnnnnnnnnnnnnnnnnnnnnnnnnnnnnnnnnnnnnnnnnnnnnnnnnnnnnnnnnnnnnnnnnnnnnnnnnnnnnnnnnnnnnnnnnnnnnnnnnnnnnnnnnnnnnnnnnnnnnnnnnnnnnnnnnnnnnnnnnnnnnnnnnnnnnnnnnnnnnnnnnnnnnnnnnnnnnnnnnnnnnnnnnnnnnnnnnnnnnnnnnnnnnnnnnnnnnnnnnnnnnnnnnnnnnnnnnnnnnnnnnnnnnnnnnnnnnnnnnnnnnnnnnnnnnnnnnnnnnnnnnnnnnnnnnnnnnnnnnnnnnnnnnnnnnnnnnnnnnnnnnnnnnnnnnnnnnnnnnnnnnnnnnnnnnnnnnnnnnnnnnnnnnnnnnnnnnnnnnnnnnnnnnnnnnnnnnnnnnnnnnnnnnnnnnnnnnnnnnnnnnnnnnnnnnnnnnnnnnnnnnnnnnnnnnnnnnnnnnnnnnnnnnnnnnnnnnnnnnnnnnnnnnnnnnnnnnnnnnnnnnnnnnnnnnnnnnnnnnnnnnnnnnnnnnnnnnnnnnnnnnnnnnnnnnnnnnnnnnnnnnnnnnnnnnnnnnnnnnnnnnnnnnnnnnnnnnnnnnnnnnnnnnnnnnnnnnnnnnnnnnnnnnnnnnnnnnnnnnnnnnnnnnnnnnnnnnnnnnnnnnnnnnnnnnnnnnnnnnnnnnnnnnnnnnnnnnnnnnnnnnnnnnnnnnnnnnnnnnnnnnnnnnnnnnnnnnnnnnnnnnnnnnnnnnnnnnnnnnnnnnnnnnnnnnnnnnnnnnnnnnnnnnnnnnnnnnnnnnnnnnnnnnnnnnnnnnnnnnnnnnnnnnnnnnnnnnnnnnnnnnnnnnnnnnnnnnnnnnnnnnnnnnnnnnnnnnnnnnnnnnnnnnnnnnnnnnnnnnnnnnnnnnnnnnnnnnnnnnnnnnnnnnnnnnnnnnnnnnnnnnnnnnnnnnnnnnnnnnnnnnnnnnnnnnnnnnnnnnnnnnnnnnnnnnnnnnnnnnnnnnnnnnnnnnnnnnnnnnnnnnnnnnnnnnnnnnnnnnnnnnnnnnnnnnnnnnnnnnnnnnnnnnnnnnnnnnnnnnnnnnnnnnnnnnnnnnnnnnnnnnnnnnnnnnnnnnnnnnnnnnnnnnnnnnnnnnnnnnnnnnnnnnnnnnnnnnnnnnnnnnnnnnnnnnnnnnnnnnnnnnnnnnnnnnnnnnnnnnnnnnnnnnnnnnnnnnnnnnnnnnnnnnnnnnnnnnnnnnnnnnnnnnnnnnnnnnnnnnnnnnnnnnnnnnnnnnnnnnnnnnnnnnnnnnnnnnnnnnnnnnnnnnnnnnnnnnnnnnnnnnnnnnnnnnnnnnnnnnnnnnnnnnnnnnnnnnnnnnnnnnnnnnnnnnnnnnnnnnnnnnnnnnnnnnnnnnnnnnnnnnnnnnnnnnnnnnnnnnnnnnnnnnnnnnnnnnnnnnnnnnnnnnnnnnnnnnnnnnnnnnnnnnnnnnnnnnnnnnnnnnnnnnnnnnnnnnnnnnnnnnnnnnnnnnnnnnnnnnnnnnnnnnnnnnnnnnnnnnnnnnnnnnnnnnnnnnnnnnnnnnnnnnnnnnnnnnnnnnnnnnnnnnnnnnnnnnnnnnnnnnnnnnnnnnnnnnnnnnnnnnnnnnnnnnnnnnnnnnnnnnnnnnnnnnnnnnnnnnnnnnnnnnnnnnnnnnnnnnnnnnnnnnnnnnnnnnnnnnnnnnnnnnnnnnnnnnnnnnnnnnnnnnnnnnnnnnnnnnnnnnnnnnnnnnnnnnnnnnnnnnnnnnnnnnnnnnnnnnnnnnnnnnnnnnnnnnnnnnnnnnnnnnnnnnnnnnnnnnnnnnnnnnnnnnnnnnnnnnnnnnnnnnnnnnnnnnnnnnnnnnnnnnnnnnnnnnnnnnnnnnnnnnnnnnnnnnnnnnnnnnnnnnnnnnnnnnnnnnnnnnnnnnnnnnnnnnnnnnnnnnnnnnnnnnnnnnnnnnnnnnnnnnnnnnnnnnnnnnnnnnnnnnnnnnnnnnnnnnnnnnnnnnnnnnnnnnnnnnnnnnnnnnnnnnnnnnnnnnnnnnnnnnnnnnnnnnnnnnnnnnnnnnnnnnnnnnnnnnnnnnnnnnnnnnnnnnnnnnnnnnnnnnnnnnnnnnnnnnnnnnnnnnnnnnnnnnnnnnnnnnnnnnnnnnnnnnnnnnnnnnnnnnnnnnnnnnnnnnnnnnnnnnnnnnnnnnnnnnnnnnnnnnnnnnnnnnnnnnnnnnnnnnnnnnnnnnnnnnnnnnnnnnnnnnnnnnnnnnnnnnnnnnnnnnnnnnnnnnnnnnnnnnnnnnnnnnnnnnnnnnnnnnnnnnnnnnnnnnnnnnnnnnnnnnnnnnnnnnnnnnnnnnnnnnnnnnnnnnnnnnnnnnnnnnnnnnnnnnnnnnnnnnnnnnnnnnnnnnnnnnnnnnnnnnnnnnnnnnnnnnnnnnnnnnnnnnnnnnnnnnnnnnnnnnnnnnnnnnnnnnnnnnnnnnnnnnnnnnnnnnnnnnnnnnnnnnnnnnnnnnnnnnnnnnnnnnnnnnnnnnnnnnnnnnnnnnnnnnnnnnnnnnnnnnnnnnnnnnnnnnnnnnnnnnnnnnnnnnnnnnnnnnnnnnnnnnnnnnnnnnnnnnnnnnnnnnnnnnnnnnnnnnnnnnnnnnnnnnnnnnnnnnnnnnnnnnnnnnnnnnnnnnnnnnnnnnnnnnnnnnnnnnnnnnnnnnnnnnnnnnnnnnnnnnnnnnnnnnnnnnnnnnnnnnnnnnnnnnnnnnnnnnnnnnnnnnnnnnnnnnnnnnnnnnnnnnnnnnnnnnnnnnnnnnnnnnnnnnnnnnnnnnnnnnnnnnnnnnnnnnnnnnnnnnnnnnnnnnnnnnnnnnnnnnnnnnnnnnnnnnnnnnnnnnnnnnnnnnnnnnnnnnnnnnnnnnnnnnnnnnnnnnnnnnnnnnnnnnnnnnnnnnnnnnnnnnnnnnnnnnnnnnnnnnnnnnnnnnnnnnnnnnnnnnnnnnnnnnnnnnnnnnnnnnnnnnnnnnnnnnnnnnnnnnnnnnnnnnnnnnnnnnnnnnnnnnnnnnnnnnnnnnnnnnnnnnnnnnnnnnnnnnnnnnnnnnnnnnnnnnnnnnnnnnnnnnnnnnnnnnnnnnnnnnnnnnnnnnnnnnnnnnnnnnnnnnnnnnnnnnnnnnnnnnnnnnnnnnnnnnnnnnnnnnnnnnnnnnnnnnnnnnnnnnnnnnnnnnnnnnnnnnnnnnnnnnnnnnnnnnnnnnnnnnnnnnnnnnnnnnnnnnnnnnnnnnnnnnnnnnnnnnnnnnnnnnnnnnnnnnnnnnnnnnnnnnnnnnnnnnnnnnnnnnnnnnnnnnnnnnnnnnnnnnnnnnnnnnnnnnnnnnnnnnnnnnnnnnnnnnnnnnnnnnnnnnnnnnnnnnnnnnnnnnnnnnnnnnnnnnnnnnnnnnnnnnnnnnnnnnnnnnnnnnnnnnnnnnnnnnnnnnnnnnnnnnnnnnnnnnnnnnnnnnnnnnnnnnnnnnnnnnnnnnnnnnnnnnnnnnnnnnnnnnnnnnnnnnnnnnnnnnnnnnnnnnnnnnnnnnnnnnnnnnnnnnnnnnnnnnnnnnnnnnnnnnnnnnnnnnnnnnnnnnnnnnnnnnnnnnnnnnnnnnnnnnnnnnnnnnnnnnnnnnnnnnnnnnnnnnnnnnnnnnnnnnnnnnnnnnnnnnnnnnnnnnnnnnnnnnnnnnnnnnnnnnnnnnnnnnnnnnnnnnnnnnnnnnnnnnnnnnnnnnnnnnnnnnnnnnnnnnnnnnnnnnnnnnnnnnnnnnnnnnnnnnnnnnnnnnnnnnnnnnnnnnnnnnnnnnnnnnnnnnnnnnnnnnnnnnnnnnnnnnnnnnnnnnnnnnnnnnnnnnnnnnnnnnnnnnnnnnnnnnnnnnnnnnnnnnnnnnnnnnnnnnnnnnnnnnnnnnnnnnnnnnnnnnnnnnnnnnnnnnnnnnnnnnnnnnnnnnnnnnnnnnnnnnnnnnnnnnnnnnnnnnnnnnnnnnnnnnnnnnnnnnnnnnnnnnnnnnnnnnnnnnnnnnnnnnnnnnnnnnnnnnnnnnnnnnnnnnnnnnnnnnnnnnnnnnnnnnnnnnnnnnnnnnnnnnnnnnnnnnnnnnnnnnnnnnnnnnnnnnnnnnnnnnnnnnnnnnnnnnnnnnnnnnnnnnnnnnnnnnnnnnnnnnnnnnnnnnnnnnnnnnnnnnnnnnnnnnnnnnnnnnnnnnnnnnnnnnnnnnnnnnnnnnnnnnnnnnnnnnnnnnnnnnnnnnnnnnnnnnnnnnnnnnnnnnnnnnnnnnnnnnnnnnnnnnnnnnnnnnnnnnnnnnnnnnnnnnnnnnnnnnnnnnnnnnnnnnnnnnnnnnnnnnnnnnnnnnnnnnnnnnnnnnnnnnnnnnnnnnnnnnnnnnnnnnnnnnnnnnnnnnnnnnnnnnnnnnnnnnnnnnnnnnnnnnnnnnnnnnnnnnnnnnnnnnnnnnnnnnnnnnnnnnnnnnnnnnnnnnnnnnnnnnnnnnnnnnnnnnnnnnnnnnnnnnnnnnnnnnnnnnnnnnnnnnnnnnnnnnnnnnnnnnnnnnnnnnnnnnnnnnnnnnnnnnnnnnnnnnnnnnnnnnnnnnnnnnnnnnnnnnnnnnnnnnnnnnnnnnnnnnnnnnnnnnnnnnnnnnnnnnnnnnnnnnnnnnnnnnnnnnnnnnnnnnnnnnnnnnnnnnnnnnnnnnnnnnnnnnnnnnnnnnnnnnnnnnnnnnnnnnnnnnnnnnnnnnnnnnnnnnnnnnnnnnnnnnnnnnnnnnnnnnnnnnnnnnnnnnnnnnnnnnnnnnnnnnnnnnnnnnnnnnnnnnnnnnnnnnnnnnnnnnnnnnnnnnnnnnnnnnnnnnnnnnnnnnnnnnnnnnnnnnnnnnnnnnnnnnnnnnnnnnnnnnnnnnnnnnnnnnnnnnnnnnnnnnnnnnnnnnnnnnnnnnnnnnnnnnnnnnnnnnnnnnnnnnnnnnnnnnnnnnnnnnnnnnnnnnnnnnnnnnnnnnnnnnnnnnnnnnnnnnnnnnnnnnnnnnnnnnnnnnnnnnnnnnnnnnnnnnnnnnnnnnnnnnnnnnnnnnnnnnnnnnnnnnnnnnnnnnnnnnnnnnnnnnnnnnnnnnnnnnnnnnnnnnnnnnnnnnnnnnnnnnnnnnnnnnnnnnnnnnnnnnnnnnnnnnnnnnnnnnnnnnnnnnnnnnnnnnnnnnnnnnnnnnnnnnnnnnnnnnnnnnnnnnnnnnnnnnnnnnnnnnnnnnnnnnnnnnnnnnnnnnnnnnnnnnnnnnnnnnnnnnnnnnnnnnnnnnnnnnnnnnnnnnnnnnnnnnnnnnnnnnnnnnnnnnnnnnnnnnnnnnnnnnnnnnnnnnnnnnnnnnnnnnnnnnnnnnnnnnnnnnnnnnnnnnnnnnnnnnnnnnnnnnnnnnnnnnnnnnnnnnnnnnnnnnnnnnnnnnnnnnnnnnnnnnnnnnnnnnnnnnnnnnnnnnnnnnnnnnnnnnnnnnnnnnnnnnnnnnnnnnnnnnnnnnnnnnnnnnnnnnnnnnnnnnnnnnnnnnnnnnnnnnnnnnnnnnnnnnnnnnnnnnnnnnnnnnnnnnnnnnnnnnnnnnnnnnnnnnnnnnnnnnnnnnnnnnnnnnnnnnnnnnnnnnnnnnnnnnnnnnnnnnnnnnnnnnnnnnnnnnnnnnnnnnnnnnnnnnnnnnnnnnnnnnnnnnnnnnnnnnnnnnnnnnnnnnnnnnnnnnnnnnnnnnnnnnnnnnnnnnnnnnnnnnnnnnnnnnnnnnnnnnnnnnnnnnnnnnnnnnnnnnnnnnnnnnnnnnnnnnnnnnnnnnnnnnnnnnnnnnnnnnnnnnnnnnnnnnnnnnnnnnnnnnnnnnnnnnnnnnnnnnnnnnnnnnnnnnnnnnnnnnnnnnnnnnnnnnnnnnnnnnnnnnnnnnnnnnnnnnnnnnnnnnnnnnnnnnnnnnnnnnnnnnnnnnnnnnnnnnnnnnnnnnnnnnnnnnnnnnnnnnnnnnnnnnnnnnnnnnnnnnnnnnnnnnnnnnnnnnnnnnnnnnnnnnnnnnnnnnnnnnnnnnnnnnnnnnnnnnnnnnnnnnnnnnnnnnnnnnnnnnnnnnnnnnnnnnnnnnnnnnnnnnnnnnnnnnnnnnnnnnnnnnnnnnnnnnnnnnnnnnnnnnnnnnnnnnnnnnnnnnnnnnnnnnnnnnnnnnnnnnnnnnnnnnnnnnnnnnnnnnnnnnnnnnnnnnnnnnnnnnnnnnnnnnnnnnnnnnnnnnnnnnnnnnnnnnnnnnnnnnnnnnnnnnnnnnnnnnnnnnnnnnnnnnnnnnnnnnnnnnnnnnnnnnnnnnnnnnnnnnnnnnnnnnnnnnnnnnnnnnnnnnnnnnnnnnnnnnnnnnnnnnnnnnnnnnnnnnnnnnnnnnnnnnnnnnnnnnnnnnnnnnnnnnnnnnnnnnnnnnnnnnnnnnnnnnnnnnnnnnnnnnnnnnnnnnnnnnnnnnnnnnnnnnnnnnnnnnnnnnnnnnnnnnnnnnnnnnnnnnnnnnnnnnnnnnnnnnnnnnnnnnnnnnnnnnnnnnnnnnnnnnnnnnnnnnnnnnnnnnnnnnnnnnnnnnnnnnnnnnnnnnnnnnnnnnnnnnnnnnnnnnnnnnnnnnnnnnnnnnnnnnnnnnnnnnnnnnnnnnnnnnnnnnnnnnnnnnnnnnnnnnnnnnnnnnnnnnnnnnnnnnnnnnnnnnnnnnnnnnnnnnnnnnnnnnnnnnnnnnnnnnnnnnnnnnnnnnnnnnnnnnnnnnnnnnnnnnnnnnnnnnnnnnnnnnnnnnnnnnnnnnnnnnnnnnnnnnnnnnnnnnnnnnnnnnnnnnnnnnnnnnnnnnnnnnnnnnnnnnnnnnnnnnnnnnnnnnnnnnnnnnnnnnnnnnnnnnnnnnnnnnnnnnnnnnnnnnnnnnnnnnnnnnnnnnnnnnnnnnnnnnnnnnnnnnnnnnnnnnnnnnnnnnnnnnnnnnnnnnnnnnnnnnnnnnnnnnnnnnnnnnnnnnnnnnnnnnnnnnnnnnnnnnnnnnnnnnnnnnnnnnnnnnnnnnnnnnnnnnnnnnnnnnnnnnnnnnnnnnnnnnnnnnnnnnnnnnnnnnnnnnnnnnnnnnnnnnnnnnnnnnnnnnnnnnnnnnnnnnnnnnnnnnnnnnnnnnnnnnnnnnnnnnnnnnnnnnnnnnnnnnnnnnnnnnnnnnnnnnnnnnnnnnnnnnnnnnnnnnnnnnnnnnnnnnnnnnnnnnnnnnnnnnnnnnnnnnnnnnnnnnnnnnnnnnnnnnnnnnnnnnnnnnnnnnnnnnnnnnnnnnnnnnnnnnnnnnnnnnnnnnnnnnnnnnnnnnnnnnnnnnnnnnnnnnnnnnnnnnnnnnnnnnnnnnnnnnnnnnnnnnnnnnnnnnnnnnnnnnnnnnnnnnnnnnnnnnnnnnnnnnnnnnnnnnnnnnnnnnnnnnnnnnnnnnnnnnnnnnnnnnnnnnnnnnnnnnnnnnnnnnnnnnnnnnnnnnnnnnnnnnnnnnnnnnnnnnnnnnnnnnnnnnnnnnnnnnnnnnnnnnnnnnnnnnnnnnnnnnnnnnnnnnnnnnnnnnnnnnnnnnnnnnnnnnnnnnnnnnnnnnnnnnnnnnnnnnnnnnnnnnnnnnnnnnnnnnnnnnnnnnnnnnnnnnnnnnnnnnnnnnnnnnnnnnnnnnnnnnnnnnnnnnnnnnnnnnnnnnnnnnnnnnnnnnnnnnnnnnnnnnnnnnnnnnnnnnnnnnnnnnnnnnnnnnnnnnnnnnnnnnnnnnnnnnnnnnnnnnnnnnnnnnnnnnnnnnnnnnnnnnnnnnnnnnnnnnnnnnnnnnnnnnnnnnnnnnnnnnnnnnnnnnnnnnnnnnnnnnnnnnnnnnnnnnnnnnnnnnnnnnnnnnnnnnnnnnnnnnnnnnnnnnnnnnnnnnnnnnnnnnnnnnnnnnnnnnnnnnnnnnnnnnnnnnnnnnnnnnnnnnnnnnnnnnnnnnnnnnnnnnnnnnnnnnnnnnnnnnnnnnnnnnnnnnnnnnnnnnnnnnnnnnnnnnnnnnnnnnnnnnnnnnnnnnnnnnnnnnnnnnnnnnnnnnnnnnnnnnnnnnnnnnnnnnnnnnnnnnnnnnnnnnnnnnnnnnnnnnnnnnnnnnnnnnnnnnnnnnnnnnnnnnnnnnnnnnnnnnnnnnnnnnnnnnnnnnnnnnnnnnnnnnnnnnnnnnnnnnnnnnnnnnnnnnnnnnnnnnnnnnnnnnnnnnnnnnnnnnnnnnnnnnnnnnnnnnnnnnnnnnnnnnnnnnnnnnnnnnnnnnnnnnnnnnnnnnnnnnnnnnnnnnnnnnnnnnnnnnnnnnnnnnnnnnnnnnnnnnnnnnnnnnnnnnnnnnnnnnnnnnnnnnnnnnnnnnnnnnnnnnnnnnnnnnnnnnnnnnnnnnnnnnnnnnnnnnnnnnnnnnnnnnnnnnnnnnnnnnnnnnnnnnnnnnnnnnnnnnnnnnnnnnnnnnnnnnnnnnnnnnnnnnnnnnnnnnnnnnnnnnnnnnnnnnnnnnnnnnnnnnnnnnnnnnnnnnnnnnnnnnnnnnnnnnnnnnnnnnnnnnnnnnnnnnnnnnnnnnnnnnnnnnnnnnnnnnnnnnnnnnnnnnnnnnnnnnnnnnnnnnnnnnnnnnnnnnnnnnnnnnnnnnnnnnnnnnnnnnnnnnnnnnnnnnnnnnnnnnnnnnnnnnnnnnnnnnnnnnnnnnnnnnnnnnnnnnnnnnnnnnnnnnnnnnnnnnnnnnnnnnnnnnnnnnnnnnnnnnnnnnnnnnnnnnnnnnnnnnnnnnnnnnnnnnnnnnnnnnnnnnnnnnnnnnnnnnnnnnnnnnnnnnnnnnnnnnnnnnnnnnnnnnnnnnnnnnnnnnnnnnnnnnnnnnnnnnnnnnnnnnnnnnnnnnnnnnnnnnnnnnnnnnnnnnnnnnnnnnnnnnnnnnnnnnnnnnnnnnnnnnnnnnnnnnnnnnnnnnnnnnnnnnnnnnnnnnnnnnnnnnnnnnnnnnnnnnnnnnnnnnnnnnnnnnnnnnnnnnnnnnnnnnnnnnnnnnnnnnnnnnnnnnnnnnnnnnnnnnnnnnnnnnnnnnnnnnnnnnnnnnnnnnnnnnnnnnnnnnnnnnnnnnnnnnnnnnnnnnnnnnnnnnnnnnnnnnnnnnnnnnnnnnnnnnnnnnnnnnnnnnnnnnnnnnnnnnnnnnnnnnnnnnnnnnnnnnnnnnnnnnnnnnnnnnnnnnnnnnnnnnnnnnnnnnnnnnnnnnnnnnnnnnnnnnnnnnnnnnnnnnnnnnnnnnnnnnnnnnnnnnnnnnnnnnnnnnnnnnnnnnnnnnnnnnnnnnnnnnnnnnnnnnnnnnnnnnnnnnnnnnnnnnnnnnnnnnnnnnnnnnnnnnnnnnnnnnnnnnnnnnnnnnnnnnnnnnnnnnnnnnnnnnnnnnnnnnnnnnnnnnnnnnnnnnnnnnnnnnnnnnnnnnnnnnnnnnnnnnnnnnnnnnnnnnnnnnnnnnnnnnnnnnnnnnnnnnnnnnnnnnnnnnnnnnnnnnnnnnnnnnnnnnnnnnnnnnnnnnnnnnnnnnnnnnnnnnnnnnnnnnnnnnnnnnnnnnnnnnnnnnnnnnnnnnnnnnnnnnnnnnnnnnnnnnnnnnnnnnnnnnnnnnnnnnnnnnnnnnnnnnnnnnnnnnnnnnnnnnnnnnnnnnnnnnnnnnnnnnnnnnnnnnnnnnnnnnnnnnnnnnnnnnnnnnnnnnnnnnnnnnnnnnnnnnnnnnnnnnnnnnnnnnnnnnnnnnnnnnnnnnnnnnnnnnnnnnnnnnnnnnnnnnnnnnnnnnnnnnnnnnnnnnnnnnnnnnnnnnnnnnnnnnnnnnnnnnnnnnnnnnnnnnnnnnnnnnnnnnnnnnnnnnnnnnnnnnnnnnnnnnnnnnnnnnnnnnnnnnnnnnnnnnnnnnnnnnnnnnnnnnnnnnnnnnnnnnnnnnnnnnnnnnnnnnnnnnnnnnnnnnnnnnnnnnnnnnnnnnnnnnnnnnnnnnnnnnnnnnnnnnnnnnnnnnnnnnnnnnnnnnnnnnnnnnnnnnnnnnnnnnnnnnnnnnnnnnnnnnnnnnnnnnnnnnnnnnnnnnnnnnnnnnnnnnnnnnnnnnnnnnnnnnnnnnnnnnnnnnnnnnnnnnnnnnnnnnnnnnnnnnnnnnnnnnnnnnnnnnnnnnnnnnnnnnnnnnnnnnnnnnnnnnnnnnnnnnnnnnnnnnnnnnnnnnnnnnnnnnnnnnnnnnnnnnnnnnnnnnnnnnnnnnnnnnnnnnnnnnnnnnnnnnnnnnnnnnnnnnnnnnnnnnnnnnnnnnnnnnnnnnnnnnnnnnnnnnnnnnnnnnnnnnnnnnnnnnnnnnnnnnnnnnnnnnnnnnnnnnnnnnnnnnnnnnnnnnnnnnnnnnnnnnnnnnnnnnnnnnnnnnnnnnnnnnnnnnnnnnnnnnnnnnnnnnnnnnnnnnnnnnnnnnnnnnnnnnnnnnnnnnnnnnnnnnnnnnnnnnnnnnnnnnnnnnnnnnnnnnnnnnnnnnnnnnnnnnnnnnnnnnnnnnnnnnnnnnnnnnnnnnnnnnnnnnnnnnnnnnnnnnnnnnnnnnnnnnnnnnnnnnnnnnnnnnnnnnnnnnnnnnnnnnnnnnnnnnnnnnnnnnnnnnnnnnnnnnnnnnnnnnnnnnnnnnnnnnnnnnnnnnnnnnnnnnnnnnnnnnnnnnnnnnnnnnnnnnnnnnnnnnnnnnnnnnnnnnnnnnnnnnnnnnnnnnnnnnnnnnnnnnnnnnnnnnnnnnnnnnnnnnnnnnnnnnnnnnnnnnnnnnnnnnnnnnnnnnnnnnnnnnnnnnnnnnnnnnnnnnnnnnnnnnnnnnnnnnnnnnnnnnnnnnnnnnnnnnnnnnnnnnnnnnnnnnnnnnnnnnnnnnnnnnnnnnnnnnnnnnnnnnnnnnnnnnnnnnnnnnnnnnnnnnnnnnnnnnnnnnnnnnnnnnnnnnnnnnnnnnnnnnnnnnnnnnnnnnnnnnnnnnnnnnnnnnnnnnnnnnnnnnnnnnnnnnnnnnnnnnnnnnnnnnnnnnnnnnnnnnnnnnnnnnnnnnnnnnnnnnnnnnnnnnnnnnnnnnnnnnnnnnnnnnnnnnnnnnnnnnnnnnnnnnnnnnnnnnnnnnnnnnnnnnnnnnnnnnnnnnnnnnnnnnnnnnnnnnnnnnnnnnnnnnnnnnnnnnnnnnnnnnnnnnnnnnnnnnnnnnnnnnnnnnnnnnnnnnnnnnnnnnnnnnnnnnnnnnnnnnnnnnnnnnnnnnnnnnnnnnnnnnnnnnnnnnnnnnnnnnnnnnnnnnnnnnnnnnnnnnnnnnnnnnnnnnnnnnnnnnnnnnnnnnnnnnnnnnnnnnnnnnnnnnnnnnnnnnnnnnnnnnnnnnnnnnnnnnnnnnnnnnnnnnnnnnnnnnnnnnnnnnnnnnnnnnnnnnnnnnnnnnnnnnnnnnnnnnnnnnnnnnnnnnnnnnnnnnnnnnnnnnnnnnnnnnnnnnnnnnnnnnnnnnnnnnnnnnnnnnnnnnnnnnnnnnnnnnnnnnnnnnnnnnnnnnnnnnnnnnnnnnnnnnnnnnnnnnnnnnnnnnnnnnnnnnnnnnnnnnnnnnnnnnnnnnnnnnnnnnnnnnnnnnnnnnnnnnnnnnnnnnnnnnnnnnnnnnnnnnnnnnnnnnnnnnnnnnnnnnnnnnnnnnnnnnnnnnnnnnnnnnnnnnnnnnnnnnnnnnnnnnnnnnnnnnnnnnnnnnnnnnnnnnnnnnnnnnnnnnnnnnnnnnnnnnnnnnnnnnnnnnnnnnnnnnnnnnnnnnnnnnnnnnnnnnnnnnnnnnnnnnnnnnnnnnnnnnnnnnnnnnnnnnnnnnnnnnnnnnnnnnnnnnnnnnnnnnnnnnnnnnnnnnnnnnnnnnnnnnnnnnnnnnnnnnnnnnnnnnnnnnnnnnnnnnnnnnnnnnnnnnnnnnnnnnnnnnnnnnnnnnnnnnnnnnnnnnnnnnnnnnnnnnnnnnnnnnnnnnnnnnnnnnnnnnnnnnnnnnnnnnnnnnnnnnnnnnnnnnnnnnnnnnnnnnnnnnnnnnnnnnnnnnnnnnnnnnnnnnnnnnnnnnnnnnnnnnnnnnnnnnnnnnnnnnnnnnnnnnnnnnnnnnnnnnnnnnnnnnnnnnnnnnnnnnnnnnnnnnnnnnnnnnnnnnnnnnnnnnnnnnnnnnnnnnnnnnnnnnnnnnnnnnnnnnnnnnnnnnnnnnnnnnnnnnnnnnnnnnnnnnnnnnnnnnnnnnnnnnnnnnnnnnnnnnnnnnnnnnnnnnnnnnnnnnnnnnnnnnnnnnnnnnnnnnnnnnnnnnnnnnnnnnnnnnnnnnnnnnnnnnnnnnnnnnnnnnnnnnnnnnnnnnnnnnnnnnnnnnnnnnnnnnnnnnnnnnnnnnnnnnnnnnnnnnnnnnnnnnnnnnnnnnnnnnnnnnnnnnnnnnnnnnnnnnnnnnnnnnnnnnnnnnnnnnnnnnnnnnnnnnnnnnnnnnnnnnnnnnnnnnnnnnnnnnnnnnnnnnnnnnnnnnnnnnnnnnnnnnnnnnnnnnnnnnnnnnnnnnnnnnnnnnnnnnnnnnnnnnnnnnnnnnnnnnnnnnnnnnnnnnnnnnnnnnnnnnnnnnnnnnnnnnnnnnnnnnnnnnnnnnnnnnnnnnnnnnnnnnnnnnnnnnnnnnnnnnnnnnnnnnnnnnnnnnnnnnnnnnnnnnnnnnnnnnnnnnnnnnnnnnnnnnnnnnnnnnnnnnnnnnnnnnnnnnnnnnnnnnnnnnnnnnnnnnnnnnnnnnnnnnnnnnnnnnnnnnnnnnnnnnnnnnnnnnnnnnnnnnnnnnnnnnnnnnnnnnnnnnnnnnnnnnnnnnnnnnnnnnnnnnnnnnnnnnnnnnnnnnnnnnnnnnnnnnnnnnnnnnnnnnnnnnnnnnnnnnnnnnnnnnnnnnnnnnnnnnnnnnnnnnnnnnnnnnnnnnnnnnnnnnnnnnnnnnnnnnnnnnnnnnnnnnnnnnnnnnnnnnnnnnnnnnnnnnnnnnnnnnnnnnnnnnnnnnnnnnnnnnnnnnnnnnnnnnnnnnnnnnnnnnnnnnnnnnnnnnnnnnnnnnnnnnnnnnnnnnnnnnnnnnnnnnnnnnnnnnnnnnnnnnnnnnnnnnnnnnnnnnnnnnnnnnnnnnnnnnnnnnnnnnnnnnnnnnnnnnnnnnnnnnnnnnnnnnnnnnnnnnnnnnnnnnnnnnnnnnnnnnnnnnnnnnnnnnnnnnnnnnnnnnnnnnnnnnnnnnnnnnnnnnnnnnnnnnnnnnnnnnnnnnnnnnnnnnnnnnnnnnnnnnnnnnnnnnnnnnnnnnnnnnnnnnnnnnnnnnnnnnnnnnnnnnnnnnnnnnnnnnnnnnnnnnnnnnnnnnnnnnnnnnnnnnnnnnnnnnnnnnnnnnnnnnnnnnnnnnnnnnnnnnnnnnnnnnnnnnnnnnnnnnnnnnnnnnnnnnnnnnnnnnnnnnnnnnnnnnnnnnnnnnnnnnnnnnnnnnnnnnnnnnnnnnnnnnnnnnnnnnnnnnnnnnnnnnnnnnnnnnnnnnnnnnnnnnnnnnnnnnnnnnnnnnnnnnnnnnnnnnnnnnnnnnnnnnnnnnnnnnnnnnnnnnnnnnnnnnnnnnnnnnnnnnnnnnnnnnnnnnnnnnnnnnnnnnnnnnnnnnnnnnnnnnnnnnnnnnnnnnnnnnnnnnnnnnnnnnnnnnnnnnnnnnnnnnnnnnnnnnnnnnnnnnnnnnnnnnnnnnnnnnnnnnnnnnnnnnnnnnnnnnnnnnnnnnnnnnnnnnnnnnnnnnnnnnnnnnnnnnnnnnnnnnnnnnnnnnnnnnnnnnnnnnnnnnnnnnnnnnnnnnnnnnnnnnnnnnnnnnnnnnnnnnnnnnnnnnnnnnnnnnnnnnnnnnnnnnnnnnnnnnnnnnnnnnnnnnnnnnnnnnnnnnnnnnnnnnnnnnnnnnnnnnnnnnnnnnnnnnnnnnnnnnnnnnnnnnnnnnnnnnnnnnnnnnnnnnnnnnnnnnnnnnnnnnnnnnnnnnnnnnnnnnnnnnnnnnnnnnnnnnnnnnnnnnnnnnnnnnnnnnnnnnnnnnnnnnnnnnnnnnnnnnnnnnnnnnnnnnnnnnnnnnnnnnnnnnnnnnnnnnnnnnnnnnnnnnnnnnnnnnnnnnnnnnnnnnnnnnnnnnnnnnnnnnnnnnnnnnnnnnnnnnnnnnnnnnnnnnnnnnnnnnnnnnnnnnnnnnnnnnnnnnnnnnnnnnnnnnnnnnnnnnnnnnnnnnnnnnnnnnnnnnnnnnnnnnnnnnnnnnnnnnnnnnnnnnnnnnnnnnnnnnnnnnnnnnnnnnnnnnnnnnnnnnnnnnnnnnnnnnnnnnnnnnnnnnnnnnnnnnnnnnnnnnnnnnnnnnnnnnnnnnnnnnnnnnnnnnnnnnnnnnnnnnnnnnnnnnnnnnnnnnnnnnnnnnnnnnnnnnnnnnnnnnnnnnnnnnnnnnnnnnnnnnnnnnnnnnnnnnnnnnnnnnnnnnnnnnnnnnnnnnnnnnnnnnnnnnnnnnnnnnnnnnnnnnnnnnnnnnnnnnnnnnnnnnnnnnnnnnnnnnnnnnnnnnnnnnnnnnnnnnnnnnnnnnnnnnnnnnnnnnnnnnnnnnnnnnnnnnnnnnnnnnnnnnnnnnnnnnnnnnnnnnnnnnnnnnnnnnnnnnnnnnnnnnnnnnnnnnnnnnnnnnnnnnnnnnnnnnnnnnnnnnnnnnnnnnnnnnnnnnnnnnnnnnnnnnnnnnnnnnnnnnnnnnnnnnnnnnnnnnnnnnnnnnnnnnnnnnnnnnnnnnnnnnnnnnnnnnnnnnnnnnnnnnnnnnnnnnnnnnnnnnnnnnnnnnnnnnnnnnnnnnnnnnnnnnnnnnnnnnnnnnnnnnnnnnnnnnnnnnnnnnnnnnnnnnnnnnnnnnnnnnnnnnnnnnnnnnnnnnnnnnnnnnnnnnnnnnnnnnnnnnnnnnnnnnnnnnnnnnnnnnnnnnnnnnnnnnnnnnnnnnnnnnnnnnnnnnnnnnnnnnnnnnnnnnnnnnnnnnnnnnnnnnnnnnnnnnnnnnnnnnnnnnnnnnnnnnnnnnnnnnnnnnnnnnnnnnnnnnnnnnnnnnnnnnnnnnnnnnnnnnnnnnnnnnnnnnnnnnnnnnnnnnnnnnnnnnnnnnnnnnnnnnnnnnnnnnnnnnnnnnnnnnnnnnnnnnnnnnnnnnnnnnnnnnnnnnnnnnnnnnnnnnnnnnnnnnnnnnnnnnnnnnnnnnnnnnnnnnnnnnnnnnnnnnnnnnnnnnnnnnnnnnnnnnnnnnnnnnnnnnnnnnnnnnnnnnnnnnnnnnnnnnnnnnnnnnnnnnnnnnnnnnnnnnnnnnnnnnnnnnnnnnnnnnnnnnnnnnnnnnnnnnnnnnnnnnnnnnnnnnnnnnnnnnnnnnnnnnnnnnnnnnnnnnnnnnnnnnnnnnnnnnnnnnnnnnnnnnnnnnnnnnnnnnnnnnnnnnnnnnnnnnnnnnnnnnnnnnnnnnnnnnnnnnnnnnnnnnnnnnnnnnnnnnnnnnnnnnnnnnnnnnnnnnnnnnnnnnnnnnnnnnnnnnnnnnnnnnnnnnnnnnnnnnnnnnnnnnnnnnnnnnnnnnnnnnnnnnnnnnnnnnnnnnnnnnnnnnnnnnnnnnnnnnnnnnnnnnnnnnnnnnnnnnnnnnnnnnnnnnnnnnnnnnnnnnnnnnnnnnnnnnnnnnnnnnnnnnnnnnnnnnnnnnnnnnnnnnnnnnnnnnnnnnnnnnnnnnnnnnnnnnnnnnnnnnnnnnnnnnnnnnnnnnnnnnnnnnnnnnnnnnnnnnnnnnnnnnnnnnnnnnnnnnnnnnnnnnnnnnnnnnnnnnnnnnnnnnnnnnnnnnnnnnnnnnnnnnnnnnnnnnnnnnnnnnnnnnnnnnnnnnnnnnnnnnnnnnnnnnnnnnnnnnnnnnnnnnnnnnnnnnnnnnnnnnnnnnnnnnnnnnnnnnnnnnnnnnnnnnnnnnnnnnnnnnnnnnnnnnnnnnnnnnnnnnnnnnnnnnnnnnnnnnnnnnnnnnnnnnnnnnnnnnnnnnnnnnnnnnnnnnnnnnnnnnnnnnnnnnnnnnnnnnnnnnnnnnnnnnnnnnnnnnnnnnnnnnnnnnnnnnnnnnnnnnnnnnnnnnnnnnnnnnnnnnnnnnnnnnnnnnnnnnnnnnnnnnnnnnnnnnnnnnnnnnnnnnnnnnnnnnnnnnnnnnnnnnnnnnnnnnnnnnnnnnnnnnnnnnnnnnnnnnnnnnnnnnnnnnnnnnnnnnnnnnnnnnnnnnnnnnnnnnnnnnnnnnnnnnnnnnnnnnnnnnnnnnnnnnnnnnnnnnnnnnnnnnnnnnnnnnnnnnnnnnnnnnnnnnnnnnnnnnnnnnnnnnnnnnnnnnnnnnnnnnnnnnnnnnnnnnnnnnnnnnnnnnnnnnnnnnnnnnnnnnnnnnnnnnnnnnnnnnnnnnnnnnnnnnnnnnnnnnnnnnnnnnnnnnnnnnnnnnnnnnnnnnnnnnnnnnnnnnnnnnnnnnnnnnnnnnnnnnnnnnnnnnnnnnnnnnnnnnnnnnnnnnnnnnnnnnnnnnnnnnnnnnnnnnnnnnnnnnnnnnnnnnnnnnnnnnnnnnnnnnnnnnnnnnnnnnnnnnnnnnnnnnnnnnnnnnnnnnnnnnnnnnnnnnnnnnnnnnnnnnnnnnnnnnnnnnnnnnnnnnnnnnnnnnnnnnnnnnnnnnnnnnnnnnnnnnnnnnnnnnnnnnnnnnnnnnnnnnnnnnnnnnnnnnnnnnnnnnnnnnnnnnnnnnnnnnnnnnnnnnnnnnnnnnnnnnnnnnnnnnnnnnnnnnnnnnnnnnnnnnnnnnnnnnnnnnnnnnnnnnnnnnnnnnnnnnnnnnnnnnnnnnnnnnnnnnnnnnnnnnnnnnnnnnnnnnnnnnnnnnnnnnnnnnnnnnnnnnnnnnnnnnnnnnnnnnnnnnnnnnnnnnnnnnnnnnnnnnnnnnnnnnnnnnnnnnnnnnnnnnnnnnnnnnnnnnnnnnnnnnnnnnnnnnnnnnnnnnnnnnnnnnnnnnnnnnnnnnnnnnnnnnnnnnnnnnnnnnnnnnnnnnnnnnnnnnnnnnnnnnnnnnnnnnnnnnnnnnnnnnnnnnnnnnnnnnnnnnnnnnnnnnnnnnnnnnnnnnnnnnnnnnnnnnnnnnnnnnnnnnnnnnnnnnnnnnnnnnnnnnnnnnnnnnnnnnnnnnnnnnnnnnnnnnnnnnnnnnnnnnnnnnnnnnnnnnnnnnnnnnnnnnnnnnnnnnnnnnnnnnnnnnnnnnnnnnnnnnnnnnnnnnnnnnnnnnnnnnnnnnnnnnnnnnnnnnnnnnnnnnnnnnnnnnnnnnnnnnnnnnnnnnnnnnnnnnnnnnnnnnnnnnnnnnnnnnnnnnnnnnnnnnnnnnnnnnnnnnnnnnnnnnnnnnnnnnnnnnnnnnnnnnnnnnnnnnnnnnnnnnnnnnnnnnnnnnnnnnnnnnnnnnnnnnnnnnnnnnnnnnnnnnnnnnnnnnnnnnnnnnnnnnnnnnnnnnnnnnnnnnnnnnnnnnnnnnnnnnnnnnnnnnnnnnnnnnnnnnnnnnnnnnnnnnnnnnnnnnnnnnnnnnnnnnnnnnnnnnnnnnnnnnnnnnnnnnnnnnnnnnnnnnnnnnnnnnnnnnnnnnnnnnnnnnnnnnnnnnnnnnnnnnnnnnnnnnnnnnnnnnnnnnnnnnnnnnnnnnnnnnnnnnnnnnnnnnnnnnnnnnnnnnnnnnnnnnnnnnnnnnnnnnnnnnnnnnnnnnnnnnnnnnnnnnnnnnnnnnnnnnnnnnnnnnnnnnnnnnnnnnnnnnnnnnnnnnnnnnnnnnnnnnnnnnnnnnnnnnnnnnnnnnnnnnnnnnnnnnnnnnnnnnnnnnnnnnnnnnnnnnnnnnnnnnnnnnnnnnnnnnnnnnnnnnnnnnnnnnnnnnnnnnnnnnnnnnnnnnnnnnnnnnnnnnnnnnnnnnnnnnnnnnnnnnnnnnnnnnnnnnnnnnnnnnnnnnnnnnnnnnnnnnnnnnnnnnnnnnnnnnnnnnnnnnnnnnnnnnnnnnnnnnnnnnnnnnnnnnnnnnnnnnnnnnnnnnnnnnnnnnnnnnnnnnnnnnnnnnnnnnnnnnnnnnnnnnnnnnnnnnnnnnnnnnnnnnnnnnnnnnnnnnnnnnnnnnnnnnnnnnnnnnnnnnnnnnnnnnnnnnnnnnnnnnnnnnnnnnnnnnnnnnnnnnnnnnnnnnnnnnnnnnnnnnnnnnnnnnnnnnnnnnnnnnnnnnnnnnnnnnnnnnnnnnnnnnnnnnnnnnnnnnnnnnnnnnnnnnnnnnnnnnnnnnnnnnnnnnnnnnnnnnnnnnnnnnnnnnnnnnnnnnnnnnnnnnnnnnnnnnnnnnnnnnnnnnnnnnnnnnnnnnnnnnnnnnnnnnnnnnnnnnnnnnnnnnnnnnnnnnnnnnnnnnnnnnnnnnnnnnnnnnnnnnnnnnnnnnnnnnnnnnnnnnnnnnnnnnnnnnnnnnnnnnnnnnnnnnnnnnnnnnnnnnnnnnnnnnnnnnnnnnnnnnnnnnnnnnnnnnnnnnnnnnnnnnnnnnnnnnnnnnnnnnnnnnnnnnnnnnnnnnnnnnnnnnnnnnnnnnnnnnnnnnnnnnnnnnnnnnnnnnnnnnnnnnnnnnnnnnnnnnnnnnnnnnnnnnnnnnnnnnnnnnnnnnnnnnnnnnnnnnnnnnnnnnnnnnnnnnnnnnnnnnnnnnnnnnnnnnnnnnnnnnnnnnnnnnnnnnnnnnnnnnnnnnnnnnnnnnnnnnnnnnnnnnnnnnnnnnnnnnnnnnnnnnnnnnnnnnnnnnnnnnnnnnnnnnnnnnnnnnnnnnnnnnnnnnnnnnnnnnnnnnnnnnnnnnnnnnnnnnnnnnnnnnnnnnnnnnnnnnnnnnnnnnnnnnnnnnnnnnnnnnnnnnnnnnnnnnnnnnnnnnnnnnnnnnnnnnnnnnnnnnnnnnnnnnnnnnnnnnnnnnnnnnnnnnnnnnnnnnnnnnnnnnnnnnnnnnnnnnnnnnnnnnnnnnnnnnnnnnnnnnnnnnnnnnnnnnnnnnnnnnnnnnnnnnnnnnnnnnnnnnnnnnnnnnnnnnnnnnnnnnnnnnnnnnnnnnnnnnnnnnnnnnnnnnnnnnnnnnnnnnnnnnnnnnnnnnnnnnnnnnnnnnnnnnnnnnnnnnnnnnnnnnnnnnnnnnnnnnnnnnnnnnnnnnnnnnnnnnnnnnnnnnnnnnnnnnnnnnnnnnnnnnnnnnnnnnnnnnnnnnnnnnnnnnnnnnnnnnnnnnnnnnnnnnnnnnnnnnnnnnnnnnnnnnnnnnnnnnnnnnnnnnnnnnnnnnnnnnnnnnnnnnnnnnnnnnnnnnnnnnnnnnnnnnnnnnnnnnnnnnnnnnnnnnnnnnnnnnnnnnnnnnnnnnnnnnnnnnnnnnnnnnnnnnnnnnnnnnnnnnnnnnnnnnnnnnnnnnnnnnnnnnnnnnnnnnnnnnnnnnnnnnnnnnnnnnnnnnnnnnnnnnnnnnnnnnnnnnnnnnnnnnnnnnnnnnnnnnnnnnnnnnnnnnnnnnnnnnnnnnnnnnnnnnnnnnnnnnnnnnnnnnnnnnnnnnnnnnnnnnnnnnnnnnnnnnnnnnnnnnnnnnnnnnnnnnnnnnnnnnnnnnnnnnnnnnnnnnnnnnnnnnnnnnnnnnnnnnnnnnnnnnnnnnnnnnnnnnnnnnnnnnnnnnnnnnnnnnnnnnnnnnnnnnnnnnnnnnnnnnnnnnnnnnnnnnnnnnnnnnnnnnnnnnnnnnnnnnnnnnnnnnnnnnnnnnnnnnnnnnnnnnnnnnnnnnnnnnnnnnnnnnnnnnnnnnnnnnnnnnnnnnnnnnnnnnnnnnnnnnnnnnnnnnnnnnnnnnnnnnnnnnnnnnnnnnnnnnnnnnnnnnnnnnnnnnnnnnnnnnnnnnnnnnnnnnnnnnnnnnnnnnnnnnnnnnnnnnnnnnnnnnnnnnnnnnnnnnnnnnnnnnnnnnnnnnnnnnnnnnnnnnnnnnnnnnnnnnnnnnnnnnnnnnnnnnnnnnnnnnnnnnnnnnnnnnnnnnnnnnnnnnnnnnnnnnnnnnnnnnnnnnnnnnnnnnnnnnnnnnnnnnnnnnnnnnnnnnnnnnnnnnnnnnnnnnnnnnnnnnnnnnnnnnnnnnnnnnnnnnnnnnnnnnnnnnnnnnnnnnnnnnnnnnnnnnnnnnnnnnnnnnnnnnnnnnnnnnnnnnnnnnnnnnnnnnnnnnnnnnnnnnnnnnnnnnnnnnnnnnnnnnnnnnnnnnnnnnnnnnnnnnnnnnnnnnnnnnnnnnnnnnnnnnnnnnnnnnnnnnnnnnnnnnnnnnnnnnnnnnnnnnnnnnnnnnnnnnnnnnnnnnnnnnnnnnnnnnnnnnnnnnnnnnnnnnnnnnnnnnnnnnnnnnnnnnnnnnnnnnnnnnnnnnnnnnnnnnnnnnnnnnnnnnnnnnnnnnnnnnnnnnnnnnnnnnnnnnnnnnnnnnnnnnnnnnnnnnnnnnnnnnnnnnnnnnnnnnnnnnnnnnnnnnnnnnnnnnnnnnnnnnnnnnnnnnnnnnnnnnnnnnnnnnnnnnnnnnnnnnnnnnnnnnnnnnnnnnnnnnnnnnnnnnnnnnnnnnnnnnnnnnnnnnnnnnnnnnnnnnnnnnnnnnnnnnnnnnnnnnnnnnnnnnnnnnnnnnnnnnnnnnnnnnnnnnnnnnnnnnnnnnnnnnnnnnnnnnnnnnnnnnnnnnnnnnnnnnnnnnnnnnnnnnnnnnnnnnnnnnnnnnnnnnnnnnnnnnnnnnnnnnnnnnnnnnnnnnnnnnnnnnnnnnnnnnnnnnnnnnnnnnnnnnnnnnnnnnnnnnnnnnnnnnnnnnnnnnnnnnnnnnnnnnnnnnnnnnnnnnnnnnnnnnnnnnnnnnnnnnnnnnnnnnnnnnnnnnnnnnnnnnnnnnnnnnnnnnnnnnnnnnnnnnnnnnnnnnnnnnnnnnnnnnnnnnnnnnnnnnnnnnnnnnnnnnnnnnnnnnnnnnnnnnnnnnnnnnnnnnnnnnnnnnnnnnnnnnnnnnnnnnnnnnnnnnnnnnnnnnnnnnnnnnnnnnnnnnnnnnnnnnnnnnnnnnnnnnnnnnnnnnnnnnnnnnnnnnnnnnnnnnnnnnnnnnnnnnnnnnnnnnnnnnnnnnnnnnnnnnnnnnnnnnnnnnnnnnnnnnnnnnnnnnnnnnnnnnnnnnnnnnnnnnnnnnnnnnnnnnnnnnnnnnnnnnnnnnnnnnnnnnnnnnnnnnnnnnnnnnnnnnnnnnnnnnnnnnnnnnnnnnnnnnnnnnnnnnnnnnnnnnnnnnnnnnnnnnnnnnnnnnnnnnnnnnnnnnnnnnnnnnnnnnnnnnnnnnnnnnnnnnnnnnnnnnnnnnnnnnnnnnnnnnnnnnnnnnnnnnnnnnnnnnnnnnnnnnnnnnnnnnnnnnnnnnnnnnnnnnnnnnnnnnnnnnnnnnnnnnnnnnnnnnnnnnnnnnnnnnnnnnnnnnnnnnnnnnnnnnnnnnnnnnnnnnnnnnnnnnnnnnnnnnnnnnnnnnnnnnnnnnnnnnnnnnnnnnnnnnnnnnnnnnnnnnnnnnnnnnnnnnnnnnnnnnnnnnnnnnnnnnnnnnnnnnnnnnnnnnnnnnnnnnnnnnnnnnnnnnnnnnnnnnnnnnnnnnnnnnnnnnnnnnnnnnnnnnnnnnnnnnnnnnnnnnnnnnnnnnnnnnnnnnnnnnnnnnnnnnnnnnnnnnnnnnnnnnnnnnnnnnnnnnnnnnnnnnnnnnnnnnnnnnnnnnnnnnnnnnnnnnnnnnnnnnnnnnnnnnnnnnnnnnnnnnnnnnnnnnnnnnnnnnnnnnnnnnnnnnnnnnnnnnnnnnnnnnnnnnnnnnnnnnnnnnnnnnnnnnnnnnnnnnnnnnnnnnnnnnnnnnnnnnnnnnnnnnnnnnnnnnnnnnnnnnnnnnnnnnnnnnnnnnnnnnnnnnnnnnnnnnnnnnnnnnnnnnnnnnnnnnnnnnnnnnnnnnnnnnnnnnnnnnnnnnnnnnnnnnnnnnnnnnnnnnnnnnnnnnnnnnnnnnnnnnnnnnnnnnnnnnnnnnnnnnnnnnnnnnnnnnnnnnnnnnnnnnnnnnnnnnnnnnnnnnnnnnnnnnnnnnnnnnnnnnnnnnnnnnnnnnnnnnnnnnnnnnnnnnnnnnnnnnnnnnnnnnnnnnnnnnnnnnnnnnnnnnnnnnnnnnnnnnnnnnnnnnnnnnnnnnnnnnnnnnnnnnnnnnnnnnnnnnnnnnnnnnnnnnnnnnnnnnnnnnnnnnnnnnnnnnnnnnnnnnnnnnnnnnnnnnnnnnnnnnnnnnnnnnnnnnnnnnnnnnnnnnnnnnnnnnnnnnnnnnnnnnnnnnnnnnnnnnnnnnnnnnnnnnnnnnnnnnnnnnnnnnnnnnnnnnnnnnnnnnnnnnnnnnnnnnnnnnnnnnnnnnnnnnnnnnnnnnnnnnnnnnnnnnnnnnnnnnnnnnnnnnnnnnnnnnnnnnnnnnnnnnnnnnnnnnnnnnnnnnnnnnnnnnnnnnnnnnnnnnnnnnnnnnnnnnnnnnnnnnnnnnnnnnnnnnnnnnnnnnnnnnnnnnnnnnnnnnnnnnnnnnnnnnnnnnnnnnnnnnnnnnnnnnnnnnnnnnnnnnnnnnnnnnnnnnnnnnnnnnnnnnnnnnnnnnnnnnnnnnnnnnnnnnnnnnnnnnnnnnnnnnnnnnnnnnnnnnnnnnnnnnnnnnnnnnnnnnnnnnnnnnnnnnnnnnnnnnnnnnnnnnnnnnnnnnnnnnnnnnnnnnnnnnnnnnnnnnnnnnnnnnnnnnnnnnnnnnnnnnnnnnnnnnnnnnnnnnnnnnnnnnnnnnnnnnnnnnnnnnnnnnnnnnnnnnnnnnnnnnnnnnnnnnnnnnnnnnnnnnnnnnnnnnnnnnnnnnnnnnnnnnnnnnnnnnnnnnnnnnnnnnnnnnnnnnnnnnnnnnnnnnnnnnnnnnnnnnnnnnnnnnnnnnnnnnnnnnnnnnnnnnnnnnnnnnnnnnnnnnnnnnnnnnnnnnnnnnnnnnnnnnnnnnnnnnnnnnnnnnnnnnnnnnnnnnnnnnnnnnnnnnnnnnnnnnnnnnnnnnnnnnnnnnnnnnnnnnnnnnnnnnnnnnnnnnnnnnnnnnnnnnnnnnnnnnnnnnnnnnnnnnnnnnnnnnnnnnnnnnnnnnnnnnnnnnnnnnnnnnnnnnnnnnnnnnnnnnnnnnnnnnnnnnnnnnnnnnnnnnnnnnnnnnnnnnnnnnnnnnnnnnnnnnnnnnnnnnnnnnnnnnnnnnnnnnnnnnnnnnnnnnnnnnnnnnnnnnnnnnnnnnnnnnnnnnnnnnnnnnnnnnnnnnnnnnnnnnnnnnnnnnnnnnnnnnnnnnnnnnnnnnnnnnnnnnnnnnnnnnnnnnnnnnnnnnnnnnnnnnnnnnnnnnnnnnnnnnnnnnnnnnnnnnnnnnnnnnnnnnnnnnnnnnnnnnnnnnnnnnnnnnnnnnnnnnnnnnnnnnnnnnnnnnnnnnnnnnnnnnnnnnnnnnnnnnnnnnnnnnnnnnnnnnnnnnnnnnnnnnnnnnnnnnnnnnnnnnnnnnnnnnnnnnnnnnnnnnnnnnnnnnnnnnnnnnnnnnnnnnnnnnnnnnnnnnnnnnnnnnnnnnnnnnnnnnnnnnnnnnnnnnnnnnnnnnnnnnnnnnnnnnnnnnnnnnnnnnnnnnnnnnnnnnnnnnnnnnnnnnnnnnnnnnnnnnnnnnnnnnnnnnnnnnnnnnnnnnnnnnnnnnnnnnnnnnnnnnnnnnnnnnnnnnnnnnnnnnnnnnnnnnnnnnnnnnnnnnnnnnnnnnnnnnnnnnnnnnnnnnnnnnnnnnnnnnnnnnnnnnnnnnnnnnnnnnnnnnnnnnnnnnnnnnnnnnnnnnnnnnnnnnnnnnnnnnnnnnnnnnnnnnnnnnnnnnnnnnnnnnnnnnnnnnnnnnnnnnnnnnnnnnnnnnnnnnnnnnnnnnnnnnnnnnnnnnnnnnnnnnnnnnnnnnnnnnnnnnnnnnnnnnnnnnnnnnnnnnnnnnnnnnnnnnnnnnnnnnnnnnnnnnnnnnnnnnnnnnnnnnnnnnnnnnnnnnnnnnnnnnnnnnnnnnnnnnnnnnnnnnnnnnnnnnnnnnnnnnnnnnnnnnnnnnnnnnnnnnnnnnnnnnnnnnnnnnnnnnnnnnnnnnnnnnnnnnnnnnnnnnnnnnnnnnnnnnnnnnnnnnnnnnnnnnnnnnnnnnnnnnnnnnnnnnnnnnnnnnnnnnnnnnnnnnnnnnnnnnnnnnnnnnnnnnnnnnnnnnnnnnnnnnnnnnnnnnnnnnnnnnnnnnnnnnnnnnnnnnnnnnnnnnnnnnnnnnnnnnnnnnnnnnnnnnnnnnnnnnnnnnnnnnnnnnnnnnnnnnnnnnnnnnnnnnnnnnnnnnnnnnnnnnnnnnnnnnnnnnnnnnnnnnnnnnnnnnnnnnnnnnnnnnnnnnnnnnnnnnnnnnnnnnnnnnnnnnnnnnnnnnnnnnnnnnnnnnnnnnnnnnnnnnnnnnnnnnnnnnnnnnnnnnnnnnnnnnnnnnnnnnnnnnnnnnnnnnnnnnnnnnnnnnnnnnnnnnnnnnnnnnnnnnnnnnnnnnnnnnnnnnnnnnnnnnnnnnnnnnnnnnnnnnnnnnnnnnnnnnnnnnnnnnnnnnnnnnnnnnnnnnnnnnnnnnnnnnnnnnnnnnnnnnnnnnnnnnnnnnnnnnnnnnnnnnnnnnnnnnnnnnnnnnnnnnnnnnnnnnnnnnnnnnnnnnnnnnnnnnnnnnnnnnnnnnnnnnnnnnnnnnnnnnnnnnnnnnnnnnnnnnnnnnnnnnnnnnnnnnnnnnnnnnnnnnnnnnnnnnnnnnnnnnnnnnnnnnnnnnnnnnnnnnnnnnnnnnnnnnnnnnnnnnnnnnnnnnnnnnnnnnnnnnnnnnnnnnnnnnnnnnnnnnnnnnnnnnnnnnnnnnnnnnnnnnnnnnnnnnnnnnnnnnnnnnnnnnnnnnnnnnnnnnnnnnnnnnnnnnnnnnnnnnnnnnnnnnnnnnnnnnnnnnnnnnnnnnnnnnnnnnnnnnnnnnnnnnnnnnnnnnnnnnnnnnnnnnnnnnnnnnnnnnnnnnnnnnnnnnnnnnnnnnnnnnnnnnnnnnnnnnnnnnnnnnnnnnnnnnnnnnnnnnnnnnnnnnnnnnnnnnnnnnnnnnnnnnnnnnnnnnnnnnnnnnnnnnnnnnnnnnnnnnnnnnnnnnnnnnnnnnnnnnnnnnnnnnnnnnnnnnnnnnnnnnnnnnnnnnnnnnnnnnnnnnnnnnnnnnnnnnnnnnnnnnnnnnnnnnnnnnnnnnnnnnnnnnnnnnnnnnnnnnnnnnnnnnnnnnnnnnnnnnnnnnnnnnnnnnnnnnnnnnnnnnnnnnnnnnnnnnnnnnnnnnnnnnnnnnnnnnnnnnnnnnnnnnnnnnnnnnnnnnnnnnnnnnnnnnnnnnnnnnnnnnnnnnnnnnnnnnnnnnnnnnnnnnnnnnnnnnnnnnnnnnnnnnnnnnnnnnnnnnnnnnnnnnnnnnnnnnnnnnnnnnnnnnnnnnnnnnnnnnnnnnnnnnnnnnnnnnnnnnnnnnnnnnnnnnnnnnnnnnnnnnnnnnnnnnnnnnnnnnnnnnnnnnnnnnnnnnnnnnnnnnnnnnnnnnnnnnnnnnnnnnnnnnnnnnnnnnnnnnnnnnnnnnnnnnnnnnnnnnnnnnnnnnnnnnnnnnnnnnnnnnnnnnnnnnnnnnnnnnnnnnnnnnnnnnnnnnnnnnnnnnnnnnnnnnnnnnnnnnnnnnnnnnnnnnnnnnnnnnnnnnnnnnnnnnnnnnnnnnnnnnnnnnnnnnnnnnnnnnnnnnnnnnnnnnnnnnnnnnnnnnnnnnnnnnnnnnnnnnnnnnnnnnnnnnnnnnnnnnnnnnnnnnnnnnnnnnnnnnnnnnnnnnnnnnnnnnnnnnnnnnnnnnnnnnnnnnnnnnnnnnnnnnnnnnnnnnnnnnnnnnnnnnnnnnnnnnnnnnnnnnnnnnnnnnnnnnnnnnnnnnnnnnnnnnnnnnnnnnnnnnnnnnnnnnnnnnnnnnnnnnnnnnnnnnnnnnnnnnnnnnnnnnnnnnnnnnnnnnnnnnnnnnnnnnnnnnnnnnnnnnnnnnnnnnnnnnnnnnnnnnnnnnnnnnnnnnnnnnnnnnnnnnnnnnnnnnnnnnnnnnnnnnnnnnnnnnnnnnnnnnnnnnnnnnnnnnnnnnnnnnnnnnnnnnnnnnnnnnnnnnnnnnnnnnnnnnnnnnnnnnnnnnnnnnnnnnnnnnnnnnnnnnnnnnnnnnnnnnnnnnnnnnnnnnnnnnnnnnnnnnnnnnnnnnnnnnnnnnnnnnnnnnnnnnnnnnnnnnnnnnnnnnnnnnnnnnnnnnnnnnnnnnnnnnnnnnnnnnnnnnnnnnnnnnnnnnnnnnnnnnnnnnnnnnnnnnnnnnnnnnnnnnnnnnnnnnnnnnnnnnnnnnnnnnnnnnnnnnnnnnnnnnnnnnnnnnnnnnnnnnnnnnnnnnnnnnnnnnnnnnnnnnnnnnnnnnnnnnnnnnnnnnnnnnnnnnnnnnnnnnnnnnnnnnnnnnnnnnnnnnnnnnnnnnnnnnnnnnnnnnnnnnnnnnnnnnnnnnnnnnnnnnnnnnnnnnnnnnnnnnnnnnnnnnnnnnnnnnnnnnnnnnnnnnnnnnnnnnnnnnnnnnnnnnnnnnnnnnnnnnnnnnnnnnnnnnnnnnnnnnnnnnnnnnnnnnnnnnnnnnnnnnnnnnnnnnnnnnnnnnnnnnnnnnnnnnnnnnnnnnnnnnnnnnnnnnnnnnnnnnnnnnnnnnnnnnnnnnnnnnnnnnnnnnnnnnnnnnnnnnnnnnnnnnnnnnnnnnnnnnnnnnnnnnnnnnnnnnnnnnnnnnnnnnnnnnnnnnnnnnnnnnnnnnnnnnnnnnnnnnnnnnnnnnnnnnnnnnnnnnnnnnnnnnnnnnnnnnnnnnnnnnnnnnnnnnnnnnnnnnnnnnnnnnnnnnnnnnnnnnnnnnnnnnnnnnnnnnnnnnnnnnnnnnnnnnnnnnnnnnnnnnnnnnnnnnnnnnnnnnnnnnnnnnnnnnnnnnnnnnnnnnnnnnnnnnnnnnnnnnnnnnnnnnnnnnnnnnnnnnnnnnnnnnnnnnnnnnnnnnnnnnnnnnnnnnnnnnnnnnnnnnnnnnnnnnnnnnnnnnnnnnnnnnnnnnnnnnnnnnnnnnnnnnnnnnnnnnnnnnnnnnnnnnnnnnnnnnnnnnnnnnnnnnnnnnnnnnnnnnnnnnnnnnnnnnnnnnnnnnnnnnnnnnnnnnnnnnnnnnnnnnnnnnnnnnnnnnnnnnnnnnnnnnnnnnnnnnnnnnnnnnnnnnnnnnnnnnnnnnnnnnnnnnnnnnnnnnnnnnnnnnnnnnnnnnnnnnnnnnnnnnnnnnnnnnnnnnnnnnnnnnnnnnnnnnnnnnnnnnnnnnnnnnnnnnnnnnnnnnnnnnnnnnnnnnnnnnnnnnnnnnnnnnnnnnnnnnnnnnnnnnnnnnnnnnnnnnnnnnnnnnnnnnnnnnnnnnnnnnnnnnnnnnnnnnnnnnnnnnnnnnnnnnnnnnnnnnnnnnnnnnnnnnnnnnnnnnnnnnnnnnnnnnnnnnnnnnnnnnnnnnnnnnnnnnnnnnnnnnnnnnnnnnnnnnnnnnnnnnnnnnnnnnnnnnnnnnnnnnnnnnnnnnnnnnnnnnnnnnnnnnnnnnnnnnnnnnnnnnnnnnnnnnnnnnnnnnnnnnnnnnnnnnnnnnnnnnnnnnnnnnnnnnnnnnnnnnnnnnnnnnnnnnnnnnnnnnnnnnnnnnnnnnnnnnnnnnnnnnnnnnnnnnnnnnnnnnnnnnnnnnnnnnnnnnnnnnnnnnnnnnnnnnnnnnnnnnnnnnnnnnnnnnnnnnnnnnnnnnnnnnnnnnnnnnnnnnnnnnnnnnnnnnnnnnnnnnnnnnnnnnnnnnnnnnnnnnnnnnnnnnnnnnnnnnnnnnnnnnnnnnnnnnnnnnnnnnnnnnnnnnnnnnnnnnnnnnnnnnnnnnnnnnnnnnnnnnnnnnnnnnnnnnnnnnnnnnnnnnnnnnnnnnnnnnnnnnnnnnnnnnnnnnnnnnnnnnnnnnnnnnnnnnnnnnnnnnnnnnnnnnnnnnnnnnnnnnnnnnnnnnnnnnnnnnnnnnnnnnnnnnnnnnnnnnnnnnnnnnnnnnnnnnnnnnnnnnnnnnnnnnnnnnnnnnnnnnnnnnnnnnnnnnnnnnnnnnnnnnnnnnnnnnnnnnnnnnnnnnnnnnnnnnnnnnnnnnnnnnnnnnnnnnnnnnnnnnnnnnnnnnnnnnnnnnnnnnnnnnnnnnnnnnnnnnnnnnnnnnnnnnnnnnnnnnnnnnnnnnnnnnnnnnnnnnnnnnnnnnnnnnnnnnnnnnnnnnnnnnnnnnnnnnnnnnnnnnnnnnnnnnnnnnnnnnnnnnnnnnnnnnnnnnnnnnnnnnnnnnnnnnnnnnnnnnnnnnnnnnnnnnnnnnnnnnnnnnnnnnnnnnnnnnnnnnnnnnnnnnnnnnnnnnnnnnnnnnnnnnnnnnnnnnnnnnnnnnnnnnnnnnnnnnnnnnnnnnnnnnnnnnnnnnnnnnnnnnnnnnnnnnnnnnnnnnnnnnnnnnnnnnnnnnnnnnnnnnnnnnnnnnnnnnnnnnnnnnnnnnnnnnnnnnnnnnnnnnnnnnnnnnnnnnnnnnnnnnnnnnnnnnnnnnnnnnnnnnnnnnnnnnnnnnnnnnnnnnnnnnnnnnnnnnnnnnnnnnnnnnnnnnnnnnnnnnnnnnnnnnnnnnnnnnnnnnnnnnnnnnnnnnnnnnnnnnnnnnnnnnnnnnnnnnnnnnnnnnnnnnnnnnnnnnnnnnnnnnnnnnnnnnnnnnnnnnnnnnnnnnnnnnnnnnnnnnnnnnnnnnnnnnnnnnnnnnnnnnnnnnnnnnnnnnnnnnnnnnnnnnnnnnnnnnnnnnnnnnnnnnnnnnnnnnnnnnnnnnnnnnnnnnnnnnnnnnnnnnnnnnnnnnnnnnnnnnnnnnnnnnnnnnnnnnnnnnnnnnnnnnnnnnnnnnnnnnnnnnnnnnnnnnnnnnnnnnnnnnnnnnnnnnnnnnnnnnnnnnnnnnnnnnnnnnnnnnnnnnnnnnnnnnnnnnnnnnnnnnnnnnnnnnnnnnnnnnnnnnnnnnnnnnnnnnnnnnnnnnnnnnnnnnnnnnnnnnnnnnnnnnnnnnnnnnnnnnnnnnnnnnnnnnnnnnnnnnnnnnnnnnnnnnnnnnnnnnnnnnnnnnnnnnnnnnnnnnnnnnnnnnnnnnnnnnnnnnnnnnnnnnnnnnnnnnnnnnnnnnnnnnnnnnnnnnnnnnnnnnnnnnnnnnnnnnnnnnnnnnnnnnnnnnnnnnnnnnnnnnnnnnnnnnnnnnnnnnnnnnnnnnnnnnnnnnnnnnnnnnnnnnnnnnnnnnnnnnnnnnnnnnnnnnnnnnnnnnnnnnnnnnnnnnnnnnnnnnnnnnnnnnnnnnnnnnnnnnnnnnnnnnnnnnnnnnnnnnnnnnnnnnnnnnnnnnnnnnnnnnnnnnnnnnnnnnnnnnnnnnnnnnnnnnnnnnnnnnnnnnnnnnnnnnnnnnnnnnnnnnnnnnnnnnnnnnnnnnnnnnnnnnnnnnnnnnnnnnnnnnnnnnnnnnnnnnnnnnnnnnnnnnnnnnnnnnnnnnnnnnnnnnnnnnnnnnnnnnnnnnnnnnnnnnnnnnnnnnnnnnnnnnnnnnnnnnnnnnnnnnnnnnnnnnnnnnnnnnnnnnnnnnnnnnnnnnnnnnnnnnnnnnnnnnnnnnnnnnnnnnnnnnnnnnnnnnnnnnnnnnnnnnnnnnnnnnnnnnnnnnnnnnnnnnnnnnnnnnnnnnnnnnnnnnnnnnnnnnnnnnnnnnnnnnnnnnnnnnnnnnnnnnnnnnnnnnnnnnnnnnnnnnnnnnnnnnnnnnnnnnnnnnnnnnnnnnnnnnnnnnnnnnnnnnnnnnnnnnnnnnnnnnnnnnnnnnnnnnnnnnnnnnnnnnnnnnnnnnnnnnnnnnnnnnnnnnnnnnnnnnnnnnnnnnnnnnnnnnnnnnnnnnnnnnnnnnnnnnnnnnnnnnnnnnnnnnnnnnnnnnnnnnnnnnnnnnnnnnnnnnnnnnnnnnnnnnnnnnnnnnnnnnnnnnnnnnnnnnnnnnnnnnnnnnnnnnnnnnnnnnnnnnnnnnnnnnnnnnnnnnnnnnnnnnnnnnnnnnnnnnnnnnnnnnnnnnnnnnnnnnnnnnnnnnnnnnnnnnnnnnnnnnnnnnnnnnnnnnnnnnnnnnnnnnnnnnnnnnnnnnnnnnnnnnnnnnnnnnnnnnnnnnnnnnnnnnnnnnnnnnnnnnnnnnnnnnnnnnnnnnnnnnnnnnnnnnnnnnnnnnnnnnnnnnnnnnnnnnnnnnnnnnnnnnnnnnnnnnnnnnnnnnnnnnnnnnnnnnnnnnnnnnnnnnnnnnnnnnnnnnnnnnnnnnnnnnnnnnnnnnnnnnnnnnnnnnnnnnnnnnnnnnnnnnnnnnnnnnnnnnnnnnnnnnnnnnnnnnnnnnnnnnnnnnnnnnnnnnnnnnnnnnnnnnnnnnnnnnnnnnnnnnnnnnnnnnnnnnnnnnnnnnnnnnnnnnnnnnnnnnnnnnnnnnnnnnnnnnnnnnnnnnnnnnnnnnnnnnnnnnnnnnnnnnnnnnnnnnnnnnnnnnnnnnnnnnnnnnnnnnnnnnnnnnnnnnnnnnnnnnnnnnnnnnnnnnnnnnnnnnnnnnnnnnnnnnnnnnnnnnnnnnnnnnnnnnnnnnnnnnnnnnnnnnnnnnnnnnnnnnnnnnnnnnnnnnnnnnnnnnnnnnnnnnnnnnnnnnnnnnnnnnnnnnnnnnnnnnnnnnnnnnnnnnnnnnnnnnnnnnnnnnnnnnnnnnnnnnnnnnnnnnnnnnnnnnnnnnnnnnnnnnnnnnnnnnnnnnnnnnnnnnnnnnnnnnnnnnnnnnnnnnnnnnnnnnnnnnnnnnnnnnnnnnnnnnnnnnnnnnnnnnnnnnnnnnnnnnnnnnnnnnnnnnnnnnnnnnnnnnnnnnnnnnnnnnnnnnnnnnnnnnnnnnnnnnnnnnnnnnnnnnnnnnnnnnnnnnnnnnnnnnnnnnnnnnnnnnnnnnnnnnnnnnnnnnnnnnnnnnnnnnnnnnnnnnnnnnnnnnnnnnnnnnnnnnnnnnnnnnnnnnnnnnnnnnnnnnnnnnnnnnnnnnnnnnnnnnnnnnnnnnnnnnnnnnnnnnnnnnnnnnnnnnnnnnnnnnnnnnnnnnnnnnnnnnnnnnnnnnnnnnnnnnnnnnnnnnnnnnnnnnnnnnnnnnnnnnnnnnnnnnnnnnnnnnnnnnnnnnnnnnnnnnnnnnnnnnnnnnnnnnnnnnnnnnnnnnnnnnnnnnnnnnnnnnnnnnnnnnnnnnnnnnnnnnnnnnnnnnnnnnnnnnnnnnnnnnnnnnnnnnnnnnnnnnnnnnnnnnnnnnnnnnnnnnnnnnnnnnnnnnnnnnnnnnnnnnnnnnnnnnnnnnnnnnnnnnnnnnnnnnnnnnnnnnnnnnnnnnnnnnnnnnnnnnnnnnnnnnnnnnnnnnnnnnnnnnnnnnnnnnnnnnnnnnnnnnnnnnnnnnnnnnnnnnnnnnnnnnnnnnnnnnnnnnnnnnnnnnnnnnnnnnnnnnnnnnnnnnnnnnnnnnnnnnnnnnnnnnnnnnnnnnnnnnnnnnnnnnnnnnnnnnnnnnnnnnnnnnnnnnnnnnnnnnnnnnnnnnnnnnnnnnnnnnnnnnnnnnnnnnnnnnnnnnnnnnnnnnnnnnnnnnnnnnnnnnnnnnnnnnnnnnnnnnnnnnnnnnnnnnnnnnnnnnnnnnnnnnnnnnnnnnnnnnnnnnnnnnnnnnnnnnnnnnnnnnnnnnnnnnnnnnnnnnnnnnnnnnnnnnnnnnnnnnnnnnnnnnnnnnnnnnnnnnnnnnnnnnnnnnnnnnnnnnnnnnnnnnnnnnnnnnnnnnnnnnnnnnnnnnnnnnnnnnnnnnnnnnnnnnnnnnnnnnnnnnnnnnnnnnnnnnnnnnnnnnnnnnnnnnnnnnnnnnnnnnnnnnnnnnnnnnnnnnnnnnnnnnnnnnnnnnnnnnnnnnnnnnnnnnnnnnnnnnnnnnnnnnnnnnnnnnnnnnnnnnnnnnnnnnnnnnnnnnnnnnnnnnnnnnnnnnnnnnnnnnnnnnnnnnnnnnnnnnnnnnnnnnnnnnnnnnnnnnnnnnnnnnnnnnnnnnnnnnnnnnnnnnnnnnnnnnnnnnnnnnnnnnnnnnnnnnnnnnnnnnnnnnnnnnnnnnnnnnnnnnnnnnnnnnnnnnnnnnnnnnnnnnnnnnnnnnnnnnnnnnnnnnnnnnnnnnnnnnnnnnnnnnnnnnnnnnnnnnnnnnnnnnnnnnnnnnnnnnnnnnnnnnnnnnnnnnnnnnnnnnnnnnnnnnnnnnnnnnnnnnnnnnnnnnnnnnnnnnnnnnnnnnnnnnnnnnnnnnnnnnnnnnnnnnnnnnnnnnnnnnnnnnnnnnnnnnnnnnnnnnnnnnnnnnnnnnnnnnnnnnnnnnnnnnnnnnnnnnnnnnnnnnnnnnnnnnnnnnnnnnnnnnnnnnnnnnnnnnnnnnnnnnnnnnnnnnnnnnnnnnnnnnnnnnnnnnnnnnnnnnnnnnnnnnnnnnnnnnnnnnnnnnnnnnnnnnnnnnnnnnnnnnnnnnnnnnnnnnnnnnnnnnnnnnnnnnnnnnnnnnnnnnnnnnnnnnnnnnnnnnnnnnnnnnnnnnnnnnnnnnnnnnnnnnnnnnnnnnnnnnnnnnnnnnnnnnnnnnnnnnnnnnnnnnnnnnnnnnnnnnnnnnnnnnnnnnnnnnnnnnnnnnnnnnnnnnnnnnnnnnnnnnnnnnnnnnnnnnnnnnnnnnnnnnnnnnnnnnnnnnnnnnnnnnnnnnnnnnnnnnnnnnnnnnnnnnnnnnnnnnnnnnnnnnnnnnnnnnnnnnnnnnnnnnnnnnnnnnnnnnnnnnnnnnnnnnnnnnnnnnnnnnnnnnnnnnnnnnnnnnnnnnnnnnnnnnnnnnnnnnnnnnnnnnnnnnnnnnnnnnnnnnnnnnnnnnnnnnnnnnnnnnnnnnnnnnnnnnnnnnnnnnnnnnnnnnnnnnnnnnnnnnnnnnnnnnnnnnnnnnnnnnnnnnnnnnnnnnnnnnnnnnnnnnnnnnnnnnnnnnnnnnnnnnnnnnnnnnnnnnnnnnnnnnnnnnnnnnnnnnnnnnnnnnnnnnnnnnnnnnnnnnnnnnnnnnnnnnnnnnnnnnnnnnnnnnnnnnnnnnnnnnnnnnnnnnnnnnnnnnnnnnnnnnnnnnnnnnnnnnnnnnnnnnnnnnnnnnnnnnnnnnnnnnnnnnnnnnnnnnnnnnnnnnnnnnnnnnnnnnnnnnnnnnnnnnnnnnnnnnnnnnnnnnnnnnnnnnnnnnnnnnnnnnnnnnnnnnnnnnnnnnnnnnnnnnnnnnnnnnnnnnnnnnnnnnnnnnnnnnnnnnnnnnnnnnnnnnnnnnnnnnnnnnnnnnnnnnnnnnnnnnnnnnnnnnnnnnnnnnnnnnnnnnnnnnnnnnnnnnnnnnnnnnnnnnnnnnnnnnnnnnnnnnnnnnnnnnnnnnnnnnnnnnnnnnnnnnnnnnnnnnnnnnnnnnnnnnnnnnnnnnnnnnnnnnnnnnnnnnnnnnnnnnnnnnnnnnnnnnnnnnnnnnnnnnnnnnnnnnnnnnnnnnnnnnnnnnnnnnnnnnnnnnnnnnnnnnnnnnnnnnnnnnnnnnnnnnnnnnnnnnnnnnnnnnnnnnnnnnnnnnnnnnnnnnnnnnnnnnnnnnnnnnnnnnnnnnnnnnnnnnnnnnnnnnnnnnnnnnnnnnnnnnnnnnnnnnnnnnnnnnnnnnnnnnnnnnnnnnnnnnnnnnnnnnnnnnnnnnnnnnnnnnnnnnnnnnnnnnnnnnnnnnnnnnnnnnnnnnnnnnnnnnnnnnnnnnnnnnnnnnnnnnnnnnnnnnnnnnnnnnnnnnnnnnnnnnnnnnnnnnnnnnnnnnnnnnnnnnnnnnnnnnnnnnnnnnnnnnnnnnnnnnnnnnnnnnnnnnnnnnnnnnnnnnnnnnnnnnnnnnnnnnnnnnnnnnnnnnnnnnnnnnnnnnnnnnnnnnnnnnnnnnnnnnnnnnnnnnnnnnnnnnnnnnnnnnnnnnnnnnnnnnnnnnnnnnnnnnnnnnnnnnnnnnnnnnnnnnnnnnnnnnnnnnnnnnnnnnnnnnnnnnnnnnnnnnnnnnnnnnnnnnnnnnnnnnnnnnnnnnnnnnnnnnnnnnnnnnnnnnnnnnnnnnnnnnnnnnnnnnnnnnnnnnnnnnnnnnnnnnnnnnnnnnnnnnnnnnnnnnnnnnnnnnnnnnnnnnnnnnnnnnnnnnnnnnnnnnnnnnnnnnnnnnnnnnnnnnnnnnnnnnnnnnnnnnnnnnnnnnnnnnnnnnnnnnnnnnnnnnnnnnnnnnnnnnnnnnnnnnnnnnnnnnnnnnnnnnnnnnnnnnnnnnnnnnnnnnnnnnnnnnnnnnnnnnnnnnnnnnnnnnnnnnnnnnnnnnnnnnnnnnnnnnnnnnnnnnnnnnnnnnnnnnnnnnnnnnnnnnnnnnnnnnnnnnnnnnnnnnnnnnnnnnnnnnnnnnnnnnnnnnnnnnnnnnnnnnnnnnnnnnnnnnnnnnnnnnnnnnnnnnnnnnnnnnnnnnnnnnnnnnnnnnnnnnnnnnnnnnnnnnnnnnnnnnnnnnnnnnnnnnnnnnnnnnnnnnnnnnnnnnnnnnnnnnnnnnnnnnnnnnnnnnnnnnnnnnnnnnnnnnnnnnnnnnnnnnnnnnnnnnnnnnnnnnnnnnnnnnnnnnnnnnnnnnnnnnnnnnnnnnnnnnnnnnnnnnnnnnnnnnnnnnnnnnnnnnnnnnnnnnnnnnnnnnnnnnnnnnnnnnnnnnnnnnnnnnnnnnnnnnnnnnnnnnnnnnnnnnnnnnnnnnnnnnnnnnnnnnnnnnnnnnnnnnnnnnnnnnnnnnnnnnnnnnnnnnnnnnnnnnnnnnnnnnnnnnnnnnnnnnnnnnnnnnnnnnnnnnnnnnnnnnnnnnnnnnnnnnnnnnnnnnnnnnnnnnnnnnnnnnnnnnnnnnnnnnnnnnnnnnnnnnnnnnnnnnnnnnnnnnnnnnnnnnnnnnnnnnnnnnnnnnnnnnnnnnnnnnnnnnnnnnnnnnnnnnnnnnnnnnnnnnnnnnnnnnnnnnnnnnnnnnnnnnnnnnnnnnnnnnnnnnnnnnnnnnnnnnnnnnnnnnnnnnnnnnnnnnnnnnnnnnnnnnnnnnnnnnnnnnnnnnnnnnnnnnnnnnnnnnnnnnnnnnnnnnnnnnnnnnnnnnnnnnnnnnnnnnnnnnnnnnnnnnnnnnnnnnnnnnnnnnnnnnnnnnnnnnnnnnnnnnnnnnnnnnnnnnnnnnnnnnnnnnnnnnnnnnnnnnnnnnnnnnnnnnnnnnnnnnnnnnnnnnnnnnnnnnnnnnnnnnnnnnnnnnnnnnnnnnnnnnnnnnnnnnnnnnnnnnnnnnnnnnnnnnnnnnnnnnnnnnnnnnnnnnnnnnnnnnnnnnnnnnnnnnnnnnnnnnnnnnnnnnnnnnnnnnnnnnnnnnnnnnnnnnnnnnnnnnnnnnnnnnnnnnnnnnnnnnnnnnnnnnnnnnnnnnnnnnnnnnnnnnnnnnnnnnnnnnnnnnnnnnnnnnnnnnnnnnnnnnnnnnnnnnnnnnnnnnnnnnnnnnnnnnnnnnnnnnnnnnnnnnnnnnnnnnnnnnnnnnnnnnnnnnnnnnnnnnnnnnnnnnnnnnnnnnnnnnnnnnnnnnnnnnnnnnnnnnnnnnnnnnnnnnnnnnnnnnnnnnnnnnnnnnnnnnnnnnnnnnnnnnnnnnnnnnnnnnnnnnnnnnnnnnnnnnnnnnnnnnnnnnnnnnnnnnnnnnnnnnnnnnnnnnnnnnnnnnnnnnnnnnnnnnnnnnnnnnnnnnnnnnnnnnnnnnnnnnnnnnnnnnnnnnnnnnnnnnnnnnnnnnnnnnnnnnnnnnnnnnnnnnnnnnnnnnnnnnnnnnnnnnnnnnnnnnnnnnnnnnnnnnnnnnnnnnnnnnnnnnnnnnnnnnnnnnnnnnnnnnnnnnnnnnnnnnnnnnnnnnnnnnnnnnnnnnnnnnnnnnnnnnnnnnnnnnnnnnnnnnnnnnnnnnnnnnnnnnnnnnnnnnnnnnnnnnnnnnnnnnnnnnnnnnnnnnnnnnnnnnnnnnnnnnnnnnnnnnnnnnnnnnnnnnnnnnnnnnnnnnnnnnnnnnnnnnnnnnnnnnnnnnnnnnnnnnnnnnnnnnnnnnnnnnnnnnnnnnnnnnnnnnnnnnnnnnnnnnnnnnnnnnnnnnnnnnnnnnnnnnnnnnnnnnnnnnnnnnnnnnnnnnnnnnnnnnnnnnnnnnnnnnnnnnnnnnnnnnnnnnnnnnnnnnnnnnnnnnnnnnnnnnnnnnnnnnnnnnnnnnnnnnnnnnnnnnnnnnnnnnnnnnnnnnnnnnnnnnnnnnnnnnnnnnnnnnnnnnnnnnnnnnnnnnnnnnnnnnnnnnnnnnnnnnnnnnnnnnnnnnnnnnnnnnnnnnnnnnnnnnnnnnnnnnnnnnnnnnnnnnnnnnnnnnnnnnnnnnnnnnnnnnnnnnnnnnnnnnnnnnnnnnnnnnnnnnnnnnnnnnnnnnnnnnnnnnnnnnnnnnnnnnnnnnnnnnnnnnnnnnnnnnnnnnnnnnnnnnnnnnnnnnnnnnnnnnnnnnnnnnnnnnnnnnnnnnnnnnnnnnnnnnnnnnnnnnnnnnnnnnnnnnnnnnnnnnnnnnnnnnnnnnnnnnnnnnnnnnnnnnnnnnnnnnnnnnnnnnnnnnnnnnnnnnnnnnnnnnnnnnnnnnnnnnnnnnnnnnnnnnnnnnnnnnnnnnnnnnnnnnnnnnnnnnnnnnnnnnnnnnnnnnnnnnnnnnnnnnnnnnnnnnnnnnnnnnnnnnnnnnnnnnnnnnnnnnnnnnnnnnnnnnnnnnnnnnnnnnnnnnnnnnnnnnnnnnnnnnnnnnnnnnnnnnnnnnnnnnnnnnnnnnnnnnnnnnnnnnnnnnnnnnnnnnnnnnnnnnnnnnnnnnnnnnnnnnnnnnnnnnnnnnnnnnnnnnnnnnnnnnnnnnnnnnnnnnnnnnnnnnnnnnnnnnnnnnnnnnnnnnnnnnnnnnnnnnnnnnnnnnnnnnnnnnnnnnnnnnnnnnnnnnnnnnnnnnnnnnnnnnnnnnnnnnnnnnnnnnnnnnnnnnnnnnnnnnnnnnnnnnnnnnnnnnnnnnnnnnnnnnnnnnnnnnnnnnnnnnnnnnnnnnnnnnnnnnnnnnnnnnnnnnnnnnnnnnnnnnnnnnnnnnnnnnnnnnnnnnnnnnnnnnnnnnnnnnnnnnnnnnnnnnnnnnnnnnnnnnnnnnnnnnnnnnnnnnnnnnnnnnnnnnnnnnnnnnnnnnnnnnnnnnnnnnnnnnnnnnnnnnnnnnnnnnnnnnnnnnnnnnnnnnnnnnnnnnnnnnnnnnnnnnnnnnnnnnnnnnnnnnnnnnnnnnnnnnnnnnnnnnnnnnnnnnnnnnnnnnnnnnnnnnnnnnnnnnnnnnnnnnnnnnnnnnnnnnnnnnnnnnnnnnnnnnnnnnnnnnnnnnnnnnnnnnnnnnnnnnnnnnnnnnnnnnnnnnnnnnnnnnnnnnnnnnnnnnnnnnnnnnnnnnnnnnnnnnnnnnnnnnnnnnnnnnnnnnnnnnnnnnnnnnnnnnnnnnnnnnnnnnnnnnnnnnnnnnnnnnnnnnnnnnnnnnnnnnnnnnnnnnnnnnnnnnnnnnnnnnnnnnnnnnnnnnnnnnnnnnnnnnnnnnnnnnnnnnnnnnnnnnnnnnnnnnnnnnnnnnnnnnnnnnnnnnnnnnnnnnnnnnnnnnnnnnnnnnnnnnnnnnnnnnnnnnnnnnnnnnnnnnnnnnnnnnnnnnnnnnnnnnnnnnnnnnnnnnnnnnnnnnnnnnnnnnnnnnnnnnnnnnnnnnnnnnnnnnnnnnnnnnnnnnnnnnnnnnnnnnnnnnnnnnnnnnnnnnnnnnnnnnnnnnnnnnnnnnnnnnnnnnnnnnnnnnnnnnnnnnnnnnnnnnnnnnnnnnnnnnnnnnnnnnnnnnnnnnnnnnnnnnnnnnnnnnnnnnnnnnnnnnnnnnnnnnnnnnnnnnnnnnnnnnnnnnnnnnnnnnnnnnnnnnnnnnnnnnnnnnnnnnnnnnnnnnnnnnnnnnnnnnnnnnnnnnnnnnnnnnnnnnnnnnnnnnnnnnnnnnnnnnnnnnnnnnnnnnnnnnnnnnnnnnnnnnnnnnnnnnnnnnnnnnnnnnnnnnnnnnnnnnnnnnnnnnnnnnnnnnnnnnnnnnnnnnnnnnnnnnnnnnnnnnnnnnnnnnnnnnnnnnnnnnnnnnnnnnnnnnnnnnnnnnnnnnnnnnnnnnnnnnnnnnnnnnnnnnnnnnnnnnnnnnnnnnnnnnnnnnnnnnnnnnnnnnnnnnnnnnnnnnnnnnnnnnnnnnnnnnnnnnnnnnnnnnnnnnnnnnnnnnnnnnnnnnnnnnnnnnnnnnnnnnnnnnnnnnnnnnnnnnnnnnnnnnnnnnnnnnnnnnnnnnnnnnnnnnnnnnnnnnnnnnnnnnnnnnnnnnnnnnnnnnnnnnnnnnnnnnnnnnnnnnnnnnnnnnnnnnnnnnnnnnnnnnnnnnnnnnnnnnnnnnnnnnnnnnnnnnnnnnnnnnnnnnnnnnnnnnnnnnnnnnnnnnnnnnnnnnnnnnnnnnnnnnnnnnnnnnnnnnnnnnnnnnnnnnnnnnnnnnnnnnnnnnnnnnnnnnnnnnnnnnnnnnnnnnnnnnnnnnnnnnnnnnnnnnnnnnnnnnnnnnnnnnnnnnnnnnnnnnnnnnnnnnnnnnnnnnnnnnnnnnnnnnnnnnnnnnnnnnnnnnnnnnnnnnnnnnnnnnnnnnnnnnnnnnnnnnnnnnnnnnnnnnnnnnnnnnnnnnnnnnnnnnnnnnnnnnnnnnnnnnnnnnnnnnnnnnnnnnnnnnnnnnnnnnnnnnnnnnnnnnnnnnnnnnnnnnnnnnnnnnnnnnnnnnnnnnnnnnnnnnnnnnnnnnnnnnnnnnnnnnnnnnnnnnnnnnnnnnnnnnnnnnnnnnnnnnnnnnnnnnnnnnnnnnnnnnnnnnnnnnnnnnnnnnnnnnnnnnnnnnnnnnnnnnnnnnnnnnnnnnnnnnnnnnnnnnnnnnnnnnnnnnnnnnnnnnnnnnnnnnnnnnnnnnnnnnnnnnnnnnnnnnnnnnnnnnnnnnnnnnnnnnnnnnnnnnnnnnnnnnnnnnnnnnnnnnnnnnnnnnnnnnnnnnnnnnnnnnnnnnnnnnnnnnnnnnnnnnnnnnnnnnnnnnnnnnnnnnnnnnnnnnnnnnnnnnnnnnnnnnnnnnnnnnnnnnnnnnnnnnnnnnnnnnnnnnnnnnnnnnnnnnnnnnnnnnnnnnnnnnnnnnnnnnnnnnnnnnnnnnnnnnnnnnnnnnnnnnnnnnnnnnnnnnnnnnnnnnnnnnnnnnnnnnnnnnnnnnnnnnnnnnnnnnnnnnnnnnnnnnnnnnnnnnnnnnnnnnnnnnnnnnnnnnnnnnnnnnnnnnnnnnnnnnnnnnnnnnnnnnnnnnnnnnnnnnnnnnnnnnnnnnnnnnnnnnnnnnnnnnnnnnnnnnnnnnnnnnnnnnnnnnnnnnnnnnnnnnnnnnnnnnnnnnnnnnnnnnnnnnnnnnnnnnnnnnnnnnnnnnnnnnnnnnnnnnnnnnnnnnnnnnnnnnnnnnnnnnnnnnnnnnnnnnnnnnnnnnnnnnnnnnnnnnnnnnnnnnnnnnnnnnnnnnnnnnnnnnnnnnnnnnnnnnnnnnnnnnnnnnnnnnnnnnnnnnnnnnnnnnnnnnnnnnnnnnnnnnnnnnnnnnnnnnnnnnnnnnnnnnnnnnnnnnnnnnnnnnnnnnnnnnnnnnnnnnnnnnnnnnnnnnnnnnnnnnnnnnnnnnnnnnnnnnnnnnnnnnnnnnnnnnnnnnnnnnnnnnnnnnnnnnnnnnnnnnnnnnnnnnnnnnnnnnnnnnnnnnnnnnnnnnnnnnnnnnnnnnnnnnnnnnnnnnnnnnnnnnnnnnnnnnnnnnnnnnnnnnnnnnnnnnnnnnnnnnnnnnnnnnnnnnnnnnnnnnnnnnnnnnnnnnnnnnnnnnnnnnnnnnnnnnnnnnnnnnnnnnnnnnnnnnnnnnnnnnnnnnnnnnnnnnnnnnnnnnnnnnnnnnnnnnnnnnnnnnnnnnnnnnnnnnnnnnnnnnnnnnnnnnnnnnnnnnnnnnnnnnnnnnnnnnnnnnnnnnnnnnnnnnnnnnnnnnnnnnnnnnnnnnnnnnnnnnnnnnnnnnnnnnnnnnnnnnnnnnnnnnnnnnnnnnnnnnnnnnnnnnnnnnnnnnnnnnnnnnnnnnnnnnnnnnnnnnnnnnnnnnnnnnnnnnnnnnnnnnnnnnnnnnnnnnnnnnnnnnnnnnnnnnnnnnnnnnnnnnnnnnnnnnnnnnnnnnnnnnnnnnnnnnnnnnnnnnnnnnnnnnnnnnnnnnnnnnnnnnnnnnnnnnnnnnnnnnnnnnnnnnnnnnnnnnnnnnnnnnnnnnnnnnnnnnnnnnnnnnnnnnnnnnnnnnnnnnnnnnnnnnnnnnnnnnnnnnnnnnnnnnnnnnnnnnnnnnnnnnnnnnnnnnnnnnnnnnnnnnnnnnnnnnnnnnnnnnnnnnnnnnnnnnnnnnnnnnnnnnnnnnnnnnnnnnnnnnnnnnnnnnnnnnnnnnnnnnnnnnnnnnnnnnnnnnnnnnnnnnnnnnnnnnnnnnnnnnnnnnnnnnnnnnnnnnnnnnnnnnnnnnnnnnnnnnnnnnnnnnnnnnnnnnnnnnnnnnnnnnnnnnnnnnnnnnnnnnnnnnnnnnnnnnnnnnnnnnnnnnnnnnnnnnnnnnnnnnnnnnnnnnnnnnnnnnnnnnnnnnnnnnnnnnnnnnnnnnnnnnnnnnnnnnnnnnnnnnnnnnnnnnnnnnnnnnnnnnnnnnnnnnnnnnnnnnnnnnnnnnnnnnnnnnnnnnnnnnnnnnnnnnnnnnnnnnnnnnnnnnnnnnnnnnnnnnnnnnnnnnnnnnnnnnnnnnnnnnnnnnnnnnnnnnnnnnnnnnnnnnnnnnnnnnnnnnnnnnnnnnnnnnnnnnnnnnnnnnnnnnnnnnnnnnnnnnnnnnnnnnnnnnnnnnnnnnnnnnnnnnnnnnnnnnnnnnnnnnnnnnnnnnnnnnnnnnnnnnnnnnnnnnnnnnnnnnnnnnnnnnnnnnnnnnnnnnnnnnnnnnnnnnnnnnnnnnnnnnnnnnnnnnnnnnnnnnnnnnnnnnnnnnnnnnnnnnnnnnnnnnnnnnnnnnnnnnnnnnnnnnnnnnnnnnnnnnnnnnnnnnnnnnnnnnnnnnnnnnnnnnnnnnnnnnnnnnnnnnnnnnnnnnnnnnnnnnnnnnnnnnnnnnnnnnnnnnnnnnnnnnnnnnnnnnnnnnnnnnnnnnnnnnnnnnnnnnnnnnnnnnnnnnnnnnnnnnnnnnnnnnnnnnnnnnnnnnnnnnnnnnnnnnnnnnnnnnnnnnnnnnnnnnnnnnnnnnnnnnnnnnnnnnnnnnnnnnnnnnnnnnnnnnnnnnnnnnnnnnnnnnnnnnnnnnnnnnnnnnnnnnnnnnnnnnnnnnnnnnnnnnnnnnnnnnnnnnnnnnnnnnnnnnnnnnnnnnnnnnnnnnnnnnnnnnnnnnnnnnnnnnnnnnnnnnnnnnnnnnnnnnnnnnnnnnnnnnnnnnnnnnnnnnnnnnnnnnnnnnnnnnnnnnnnnnnnnnnnnnnnnnnnnnnnnnnnnnnnnnnnnnnnnnnnnnnnnnnnnnnnnnnnnnnnnnnnnnnnnnnnnnnnnnnnnnnnnnnnnnnnnnnnnnnnnnnnnnnnnnnnnnnnnnnnnnnnnnnnnnnnnnnnnnnnnnnnnnnnnnnnnnnnnnnnnnnnnnnnnnnnnnnnnnnnnnnnnnnnnnnnnnnnnnnnnnnnnnnnnnnnnnnnnnnnnnnnnnnnnnnnnnnnnnnnnnnnnnnnnnnnnnnnnnnnnnnnnnnnnnnnnnnnnnnnnnnnnnnnnnnnnnnnnnnnnnnnnnnnnnnnnnnnnnnnnnnnnnnnnnnnnnnnnnnnnnnnnnnnnnnnnnnnnnnnnnnnnnnnnnnnnnnnnnnnnnnnnnnnnnnnnnnnnnnnnnnnnnnnnnnnnnnnnnnnnnnnnnnnnnnnnnnnnnnnnnnnnnnnnnnnnnnnnnnnnnnnnnnnnnnnnnnnnnnnnnnnnnnnnnnnnnnnnnnnnnnnnnnnnnnnnnnnnnnnnnnnnnnnnnnnnnnnnnnnnnnnnnnnnnnnnnnnnnnnnnnnnnnnnnnnnnnnnnnnnnnnnnnnnnnnnnnnnnnnnnnnnnnnnnnnnnnnnnnnnnnnnnnnnnnnnnnnnnnnnnnnnnnnnnnnnnnnnnnnnnnnnnnnnnnnnnnnnnnnnnnnnnnnnnnnnnnnnnnnnnnnnnnnnnnnnnnnnnnnnnnnnnnnnnnnnnnnnnnnnnnnnnnnnnnnnnnnnnnnnnnnnnnnnnnnnnnnnnnnnnnnnnnnnnnnnnnnnnnnnnnnnnnnnnnnnnnnnnnnnnnnnnnnnnnnnnnnnnnnnnnnnnnnnnnnnnnnnnnnnnnnnnnnnnnnnnnnnnnnnnnnnnnnnnnnnnnnnnnnnnnnnnnnnnnnnnnnnnnnnnnnnnnnnnnnnnnnnnnnnnnnnnnnnnnnnnnnnnnnnnnnnnnnnnnnnnnnnnnnnnnnnnnnnnnnnnnnnnnnnnnnnnnnnnnnnnnnnnnnnnnnnnnnnnnnnnnnnnnnnnnnnnnnnnnnnnnnnnnnnnnnnnnnnnnnnnnnnnnnnnnnnnnnnnnnnnnnnnnnnnnnnnnnnnnnnnnnnnnnnnnnnnnnnnnnnnnnnnnnnnnnnnnnnnnnnnnnnnnnnnnnnnnnnnnnnnnnnnnnnnnnnnnnnnnnnnnnnnnnnnnnnnnnnnnnnnnnnnnnnnnnnnnnnnnnnnnnnnnnnnnnnnnnnnnnnnnnnnnnnnnnnnnnnnnnnnnnnnnnnnnnnnnnnnnnnnnnnnnnnnnnnnnnnnnnnnnnnnnnnnnnnnnnnnnnnnnnnnnnnnnnnnnnnnnnnnnnnnnnnnnnnnnnnnnnnnnnnnnnnnnnnnnnnnnnnnnnnnnnnnnnnnnnnnnnnnnnnnnnnnnnnnnnnnnnnnnnnnnnnnnnnnnnnnnnnnnnnnnnnnnnnnnnnnnnnnnnnnnnnnnnnnnnnnnnnnnnnnnnnnnnnnnnnnnnnnnnnnnnnnnnnnnnnnnnnnnnnnnnnnnnnnnnnnnnnnnnnnnnnnnnnnnnnnnnnnnnnnnnnnnnnnnnnnnnnnnnnnnnnnnnnnnnnnnnnnnnnnnnnnnnnnnnnnnnnnnnnnnnnnnnnnnnnnnnnnnnnnnnnnnnnnnnnnnnnnnnnnnnnnnnnnnnnnnnnnnnnnnnnnnnnnnnnnnnnnnnnnnnnnnnnnnnnnnnnnnnnnnnnnnnnnnnnnnnnnnnnnnnnnnnnnnnnnnnnnnnnnnnnnnnnnnnnnnnnnnnnnnnnnnnnnnnnnnnnnnnnnnnnnnnnnnnnnnnnnnnnnnnnnnnnnnnnnnnnnnnnnnnnnnnnnnnnnnnnnnnnnnnnnnnnnnnnnnnnnnnnnnnnnnnnnnnnnnnnnnnnnnnnnnnnnnnnnnnnnnnnnnnnnnnnnnnnnnnnnnnnnnnnnnnnnnnnnnnnnnnnnnnnnnnnnnnnnnnnnnnnnnnnnnnnnnnnnnnnnnnnnnnnnnnnnnnnnnnnnnnnnnnnnnnnnnnnnnnnnnnnnnnnnnnnnnnnnnnnnnnnnnnnnnnnnnnnnnnnnnnnnnnnnnnnnnnnnnnnnnnnnnnnnnnnnnnnnnnnnnnnnnnnnnnnnnnnnnnnnnnnnnnnnnnnnnnnnnnnnnnnnnnnnnnnnnnnnnnnnnnnnnnnnnnnnnnnnnnnnnnnnnnnnnnnnnnnnnnnnnnnnnnnnnnnnnnnnnnnnnnnnnnnnnnnnnnnnnnnnnnnnnnnnnnnnnnnnnnnnnnnnnnnnnnnnnnnnnnnnnnnnnnnnnnnnnnnnnnnnnnnnnnnnnnnnnnnnnnnnnnnnnnnnnnnnnnnnnnnnnnnnnnnnnnnnnnnnnnnnnnnnnnnnnnnnnnnnnnnnnnnnnnnnnnnnnnnnnnnnnnnnnnnnnnnnnnnnnnnnnnnnnnnnnnnnnnnnnnnnnnnnnnnnnnnnnnnnnnnnnnnnnnnnnnnnnnnnnnnnnnnnnnnnnnnnnnnnnnnnnnnnnnnnnnnnnnnnnnnnnnnnnnnnnnnnnnnnnnnnnnnnnnnnnnnnnnnnnnnnnnnnnnnnnnnnnnnnnnnnnnnnnnnnnnnnnnnnnnnnnnnnnnnnnnnnnnnnnnnnnnnnnnnnnnnnnnnnnnnnnnnnnnnnnnnnnnnnnnnnnnnnnnnnnnnnnnnnnnnnnnnnnnnnnnnnnnnnnnnnnnnnnnnnnnnnnnnnnnnnnnnnnnnnnnnnnnnnnnnnnnnnnnnnnnnnnnnnnnnnnnnnnnnnnnnnnnnnnnnnnnnnnnnnnnnnnnnnnnnnnnnnnnnnnnnnnnnnnnnnnnnnnnnnnnnnnnnnnnnnnnnnnnnnnnnnnnnnnnnnnnnnnnnnnnnnnnnnnnnnnnnnnnnnnnnnnnnnnnnnnnnnnnnnnnnnnnnnnnnnnnnnnnnnnnnnnnnnnnnnnnnnnnnnnnnnnnnnnnnnnnnnnnnnnnnnnnnnnnnnnnnnnnnnnnnnnnnnnnnnnnnnnnnnnnnnnnnnnnnnnnnnnnnnnnnnnnnnnnnnnnnnnnnnnnnnnnnnnnnnnnnnnnnnnnnnnnnnnnnnnnnnnnnnnnnnnnnnnnnnnnnnnnnnnnnnnnnnnnnnnnnnnnnnnnnnnnnnnnnnnnnnnnnnnnnnnnnnnnnnnnnnnnnnnnnnnnnnnnnnnnnnnnnnnnnnnnnnnnnnnnnnnnnnnnnnnnnnnnnnnnnnnnnnnnnnnnnnnnnnnnnnnnnnnnnnnnnnnnnnnnnnnnnnnnnnnnnnnnnnnnnnnnnnnnnnnnnnnnnnnnnnnnnnnnnnnnnnnnnnnnnnnnnnnnnnnnnnnnnnnnnnnnnnnnnnnnnnnnnnnnnnnnnnnnnnnnnnnnnnnnnnnnnnnnnnnnnnnnnnnnnnnnnnnnnnnnnnnnnnnnnnnnnnnnnnnnnnnnnnnnnnnnnnnnnnnnnnnnnnnnnnnnnnnnnnnnnnnnnnnnnnnnnnnnnnnnnnnnnnnnnnnnnnnnnnnnnnnnnnnnnnnnnnnnnnnnnnnnnnnnnnnnnnnnnnnnnnnnnnnnnnnnnnnnnnnnnnnnnnnnnnnnnnnnnnnnnnnnnnnnnnnnnnnnnnnnnnnnnnnnnnnnnnnnnnnnnnnnnnnnnnnnnnnnnnnnnnnnnnnnnnnnnnnnnnnnnnnnnnnnnnnnnnnnnnnnnnnnnnnnnnnnnnnnnnnnnnnnnnnnnnnnnnnnnnnnnnnnnnnnnnnnnnnnnnnnnnnnnnnnnnnnnnnnnnnnnnnnnnnnnnnnnnnnnnnnnnnnnnnnnnnnnnnnnnnnnnnnnnnnnnnnnnnnnnnnnnnnnnnnnnnnnnnnnnnnnnnnnnnnnnnnnnnnnnnnnnnnnnnnnnnnnnnnnnnnnnnnnnnnnnnnnnnnnnnnnnnnnnnnnnnnnnnnnnnnnnnnnnnnnnnnnnnnnnnnnnnnnnnnnnnnnnnnnnnnnnnnnnnnnnnnnnnnnnnnnnnnnnnnnnnnnnnnnnnnnnnnnnnnnnnnnnnnnnnnnnnnnnnnnnnnnnnnnnnnnnnnnnnnnnnnnnnnnnnnnnnnnnnnnnnnnnnnnnnnnnnnnnnnnnnnnnnnnnnnnnnnnnnnnnnnnnnnnnnnnnnnnnnnnnnnnnnnnnnnnnnnnnnnnnnnnnnnnnnnnnnnnnnnnnnnnnnnnnnnnnnnnnnnnnnnnnnnnnnnnnnnnnnnnnnnnnnnnnnnnnnnnnnnnnnnnnnnnnnnnnnnnnnnnnnnnnnnnnnnnnnnnnnnnnnnnnnnnnnnnnnnnnnnnnnnnnnnnnnnnnnnnnnnnnnnnnnnnnnnnnnnnnnnnnnnnnnnnnnnnnnnnnnnnnnnnnnnnnnnnnnnnnnnnnnnnnnnnnnnnnnnnnnnnnnnnnnnnnnnnnnnnnnnnnnnnnnnnnnnnnnnnnnnnnnnnnnnnnnnnnnnnnnnnnnnnnnnnnnnnnnnnnnnnnnnnnnnnnnnnnnnnnnnnnnnnnnnnnnnnnnnnnnnnnnnnnnnnnnnnnnnnnnnnnnnnnnnnnnnnnnnnnnnnnnnnnnnnnnnnnnnnnnnnnnnnnnnnnnnnnnnnnnnnnnnnnnnnnnnnnnnnnnnnnnnnnnnnnnnnnnnnnnnnnnnnnnnnnnnnnnnnnnnnnnnnnnnnnnnnnnnnnnnnnnnnnnnnnnnnnnnnnnnnnnnnnnnnnnnnnnnnnnnnnnnnnnnnnnnnnnnnnnnnnnnnnnnnnnnnnnnnnnnnnnnnnnnnnnnnnnnnnnnnnnnnnnnnnnnnnnnnnnnnnnnnnnnnnnnnnnnnnnnnnnnnnnnnnnnnnnnnnnnnnnnnnnnnnnnnnnnnnnnnnnnnnnnnnnnnnnnnnnnnnnnnnnnnnnnnnnnnnnnnnnnnnnnnnnnnnnnnnnnnnnnnnnnnnnnnnnnnnnnnnnnnnnnnnnnnnnnnnnnnnnnnnnnnnnnnnnnnnnnnnnnnnnnnnnnnnnnnnnnnnnnnnnnnnnnnnnnnnnnnnnnnnnnnnnnnnnnnnnnnnnnnnnnnnnnnnnnnnnnnnnnnnnnnnnnnnnnnnnnnnnnnnnnnnnnnnnnnnnnnnnnnnnnnnnnnnnnnnnnnnnnnnnnnnnnnnnnnnnnnnnnnnnnnnnnnnnnnnnnnnnnnnnnnnnnnnnnnnnnnnnnnnnnnnnnnnnnnnnnnnnnnnnnnnnnnnnnnnnnnnnnnnnnnnnnnnnnnnnnnnnnnnnnnnnnnnnnnnnnnnnnnnnnnnnnnnnnnnnnnnnnnnnnnnnnnnnnnnnnnnnnnnnnnnnnnnnnnnnnnnnnnnnnnnnnnnnnnnnnnnnnnnnnnnnnnnnnnnnnnnnnnnnnnnnnnnnnnnnnnnnnnnnnnnnnnnnnnnnnnnnnnnnnnnnnnnnnnnnnnnnnnnnnnnnnnnnnnnnnnnnnnnnnnnnnnnnnnnnnnnnnnnnnnnnnnnnnnnnnnnnnnnnnnnnnnnnnnnnnnnnnnnnnnnnnnnnnnnnnnnnnnnnnnnnnnnnnnnnnnnnnnnnnnnnnnnnnnnnnnnnnnnnnnnnnnnnnnnnnnnnnnnnnnnnnnnnnnnnnnnnnnnnnnnnnnnnnnnnnnnnnnnnnnnnnnnnnnnnnnnnnnnnnnnnnnnnnnnnnnnnnnnnnnnnnnnnnnnnnnnnnnnnnnnnnnnnnnnnnnnnnnnnnnnnnnnnnnnnnnnnnnnnnnnnnnnnnnnnnnnnnnnnnnnnnnnnnnnnnnnnnnnnnnnnnnnnnnnnnnnnnnnnnnnnnnnnnnnnnnnnnnnnnnnnnnnnnnnnnnnnnnnnnnnnnnnnnnnnnnnnnnnnnnnnnnnnnnnnnnnnnnnnnnnnnnnnnnnnnnnnnnnnnnnnnnnnnnnnnnnnnnnnnnnnnnnnnnnnnnnnnnnnnnnnnnnnnnnnnnnnnnnnnnnnnnnnnnnnnnnnnnnnnnnnnnnnnnnnnnnnnnnnnnnnnnnnnnnnnnnnnnnnnnnnnnnnnnnnnnnnnnnnnnnnnnnnnnnnnnnnnnnnnnnnnnnnnnnnnnnnnnnnnnnnnnnnnnnnnnnnnnnnnnnnnnnnnnnnnnnnnnnnnnnnnnnnnnnnnnnnnnnnnnnnnnnnnnnnnnnnnnnnnnnnnnnnnnnnnnnnnnnnnnnnnnnnnnnnnnnnnnnnnnnnnnnnnnnnnnnnnnnnnnnnnnnnnnnnnnnnnnnnnnnnnnnnnnnnnnnnnnnnnnnnnnnnnnnnnnnnnnnnnnnnnnnnnnnnnnnnnnnnnnnnnnnnnnnnnnnnnnnnnnnnnnnnnnnnnnnnnnnnnnnnnnnnnnnnnnnnnnnnnnnnnnnnnnnnnnnnnnnnnnnnnnnnnnnnnnnnnnnnnnnnnnnnnnnnnnnnnnnnnnnnnnnnnnnnnnnnnnnnnnnnnnnnnnnnnnnnnnnnnnnnnnnnnnnnnnnnnnnnnnnnnnnnnnnnnnnnnnnnnnnnnnnnnnnnnnnnnnnnnnnnnnnnnnnnnnnnnnnnnnnnnnnnnnnnnnnnnnnnnnnnnnnnnnnnnnnnnnnnnnnnnnnnnnnnnnnnnnnnnnnnnnnnnnnnnnnnnnnnnnnnnnnnnnnnnnnnnnnnnnnnnnnnnnnnnnnnnnnnnnnnnnnnnnnnnnnnnnnnnnnnnnnnnnnnnnnnnnnnnnnnnnnnnnnnnnnnnnnnnnnnnnnnnnnnnnnnnnnnnnnnnnnnnnnnnnnnnnnnnnnnnnnnnnnnnnnnnnnnnnnnnnnnnnnnnnnnnnnnnnnnnnnnnnnnnnnnnnnnnnnnnnnnnnnnnnnnnnnnnnnnnnnnnnnnnnnnnnnnnnnnnnnnnnnnnnnnnnnnnnnnnnnnnnnnnnnnnnnnnnnnnnnnnnnnnnnnnnnnnnnnnnnnnnnnnnnnnnnnnnnnnnnnnnnnnnnnnnnnnnnnnnnnnnnnnnnnnnnnnnnnnnnnnnnnnnnnnnnnnnnnnnnnnnnnnnnnnnnnnnnnnnnnnnnnnnnnnnnnnnnnnnnnnnnnnnnnnnnnnnnnnnnnnnnnnnnnnnnnnnnnnnnnnnnnnnnnnnnnnnnnnnnnnnnnnnnnnnnnnnnnnnnnnnnnnnnnnnnnnnnnnnnnnnnnnnnnnnnnnnnnnnnnnnnnnnnnnnnnnnnnnnnnnnnnnnnnnnnnnnnnnnnnnnnnnnnnnnnnnnnnnnnnnnnnnnnnnnnnnnnnnnnnnnnnnnnnnnnnnnnnnnnnnnnnnnnnnnnnnnnnnnnnnnnnnnnnnnnnnnnnnnnnnnnnnnnnnnnnnnnnnnnnnnnnnnnnnnnnnnnnnnnnnnnnnnnnnnnnnnnnnnnnnnnnnnnnnnnnnnnnnnnnnnnnnnnnnnnnnnnnnnnnnnnnnnnnnnnnnnnnnnnnnnnnnnnnnnnnnnnnnnnnnnnnnnnnnnnnnnnnnnnnnnnnnnnnnnnnnnnnnnnnnnnnnnnnnnnnnnnnnnnnnnnnnnnnnnnnnnnnnnnnnnnnnnnnnnnnnnnnnnnnnnnnnnnnnnnnnnnnnnnnnnnnnnnnnnnnnnnnnnnnnnnnnnnnnnnnnnnnnnnnnnnnnnnnnnnnnnnnnnnnnnnnnnnnnnnnnnnnnnnnnnnnnnnnnnnnnnnnnnnnnnnnnnnnnnnnnnnnnnnnnnnnnnnnnnnnnnnnnnnnnnnnnnnnnnnnnnnnnnnnnnnnnnnnnnnnnnnnnnnnnnnnnnnnnnnnnnnnnnnnnnnnnnnnnnnnnnnnnnnnnnnnnnnnnnnnnnnnnnnnnnnnnnnnnnnnnnnnnnnnnnnnnnnnnnnnnnnnnnnnnnnnnnnnnnnnnnnnnnnnnnnnnnnnnnnnnnnnnnnnnnnnnnnnnnnnnnnnnnnnnnnnnnnnnnnnnnnnnnnnnnnnnnnnnnnnnnnnnnnnnnnnnnnnnnnnnnnnnnnnnnnnnnnnnnnnnnnnnnnnnnnnnnnnnnnnnnnnnnnnnnnnnnnnnnnnnnnnnnnnnnnnnnnnnnnnnnnnnnnnnnnnnnnnnnnnnnnnnnnnnnnnnnnnnnnnnnnnnnnnnnnnnnnnnnnnnnnnnnnnnnnnnnnnnnnnnnnnnnnnnnnnnnnnnnnnnnnnnnnnnnnnnnnnnnnnnnnnnnnnnnnnnnnnnnnnnnnnnnnnnnnnnnnnnnnnnnnnnnnnnnnnnnnnnnnnnnnnnnnnnnnnnnnnnnnnnnnnnnnnnnnnnnnnnnnnnnnnnnnnnnnnnnnnnnnnnnnnnnnnnnnnnnnnnnnnnnnnnnnnnnnnnnnnnnnnnnnnnnnnnnnnnnnnnnnnnnnnnnnnnnnnnnnnnnnnnnnnnnnnnnnnnnnnnnnnnnnnnnnnnnnnnnnnnnnnnnnnnnnnnnnnnnnnnnnnnnnnnnnnnnnnnnnnnnnnnnnnnnnnnnnnnnnnnnnnnnnnnnnnnnnnnnnnnnnnnnnnnnnnnnnnnnnnnnnnnnnnnnnnnnnnnnnnnnnnnnnnnnnnnnnnnnnnnnnnnnnnnnnnnnnnnnnnnnnnnnnnnnnnnnnnnnnnnnnnnnnnnnnnnnnnnnnnnnnnnnnnnnnnnnnnnnnnnnnnnnnnnnnnnnnnnnnnnnnnnnnnnnnnnnnnnnnnnnnnnnnnnnnnnnnnnnnnnnnnnnnnnnnnnnnnnnnnnnnnnnnnnnnnnnnnnnnnnnnnnnnnnnnnnnnnnnnnnnnnnnnnnnnnnnnnnnnnnnnnnnnnnnnnnnnnnnnnnnnnnnnnnnnnnnnnnnnnnnnnnnnnnnnnnnnnnnnnnnnnnnnnnnnnnnnnnnnnnnnnnnnnnnnnnnnnnnnnnnnnnnnnnnnnnnnnnnnnnnnnnnnnnnnnnnnnnnnnnnnnnnnnnnnnnnnnnnnnnnnnnnnnnnnnnnnnnnnnnnnnnnnnnnnnnnnnnnnnnnnnnnnnnnnnnnnnnnnnnnnnnnnnnnnnnnnnnnnnnnnnnnnnnnnnnnnnnnnnnnnnnnnnnnnnnnnnnnnnnnnnnnnnnnnnnnnnnnnnnnnnnnnnnnnnnnnnnnnnnnnnnnnnnnnnnnnnnnnnnnnnnnnnnnnnnnnnnnnnnnnnnnnnnnnnnnnnnnnnnnnnnnnnnnnnnnnnnnnnnnnnnnnnnnnnnnnnnnnnnnnnnnnnnnnnnnnnnnnnnnnnnnnnnnnnnnnnnnnnnnnnnnnnnnnnnnnnnnnnnnnnnnnnnnnnnnnnnnnnnnnnnnnnnnnnnnnnnnnnnnnnnnnnnnnnnnnnnnnnnnnnnnnnnnnnnnnnnnnnnnnnnnnnnnnnnnnnnnnnnnnnnnnnnnnnnnnnnnnnnnnnnnnnnnnnnnnnnnnnnnnnnnnnnnnnnnnnnnnnnnnnnnnnnnnnnnnnnnnnnnnnnnnnnnnnnnnnnnnnnnnnnnnnnnnnnnnnnnnnnnnnnnnnnnnnnnnnnnnnnnnnnnnnnnnnnnnnnnnnnnnnnnnnnnnnnnnnnnnnnnnnnnnnnnnnnnnnnnnnnnnnnnnnnnnnnnnnnnnnnnnnnnnnnnnnnnnnnnnnnnnnnnnnnnnnnnnnnnnnnnnnnnnnnnnnnnnnnnnnnnnnnnnnnnnnnnnnnnnnnnnnnnnnnnnnnnnnnnnnnnnnnnnnnnnnnnnnnnnnnnnnnnnnnnnnnnnnnnnnnnnnnnnnnnnnnnnnnnnnnnnnnnnnnnnnnnnnnnnnnnnnnnnnnnnnnnnnnnnnnnnnnnnnnnnnnnnnnnnnnnnnnnnnnnnnnnnnnnnnnnnnnnnnnnnnnnnnnnnnnnnnnnnnnnnnnnnnnnnnnnnnnnnnnnnnnnnnnnnnnnnnnnnnnnnnnnnnnnnnnnnnnnnnnnnnnnnnnnnnnnnnnnnnnnnnnnnnnnnnnnnnnnnnnnnnnnnnnnnnnnnnnnnnnnnnnnnnnnnnnnnnnnnnnnnnnnnnnnnnnnnnnnnnnnnnnnnnnnnnnnnnnnnnnnnnnnnnnnnnnnnnnnnnnnnnnnnnnnnnnnnnnnnnnnnnnnnnnnnnnnnnnnnnnnnnnnnnnnnnnnnnnnnnnnnnnnnnnnnnnnnnnnnnnnnnnnnnnnnnnnnnnnnnnnnnnnnnnnnnnnnnnnnnnnnnnnnnnnnnnnnnnnnnnnnnnnnnnnnnnnnnnnnnnnnnnnnnnnnnnnnnnnnnnnnnnnnnnnnnnnnnnnnnnnnnnnnnnnnnnnnnnnnnnnnnnnnnnnnnnnnnnnnnnnnnnnnnnnnnnnnnnnnnnnnnnnnnnnnnnnnnnnnnnnnnnnnnnnnnnnnnnnnnnnnnnnnnnnnnnnnnnnnnnnnnnnnnnnnnnnnnnnnnnnnnnnnnnnnnnnnnnnnnnnnnnnnnnnnnnnnnnnnnnnnnnnnnnnnnnnnnnnnnnnnnnnnnnnnnnnnnnnnnnnnnnnnnnnnnnnnnnnnnnnnnnnnnnnnnnnnnnnnnnnnnnnnnnnnnnnnnnnnnnnnnnnnnnnnnnnnnnnnnnnnnnnnnnnnnnnnnnnnnnnnnnnnnnnnnnnnnnnnnnnnnnnnnnnnnnnnnnnnnnnnnnnnnnnnnnnnnnnnnnnnnnnnnnnnnnnnnnnnnnnnnnnnnnnnnnnnnnnnnnnnnnnnnnnnnnnnnnnnnnnnnnnnnnnnnnnnnnnnnnnnnnnnnnnnnnnnnnnnnnnnnnnnnnnnnnnnnnnnnnnnnnnnnnnnnnnnnnnnnnnnnnnnnnnnnnnnnnnnnnnnnnnnnnnnnnnnnnnnnnnnnnnnnnnnnnnnnnnnnnnnnnnnnnnnnnnnnnnnnnnnnnnnnnnnnnnnnnnnnnnnnnnnnnnnnnnnnnnnnnnnnnnnnnnnnnnnnnnnnnnnnnnnnnnnnnnnnnnnnnnnnnnnnnnnnnnnnnnnnnnnnnnnnnnnnnnnnnnnnnnnnnnnnnnnnnnnnnnnnnnnnnnnnnnnnnnnnnnnnnnnnnnnnnnnnnnnnnnnnnnnnnnnnnnnnnnnnnnnnnnnnnnnnnnnnnnnnnnnnnnnnnnnnnnnnnnnnnnnnnnnnnnnnnnnnnnnnnnnnnnnnnnnnnnnnnnnnnnnnnnnnnnnnnnnnnnnnnnnnnnnnnnnnnnnnnnnnnnnnnnnnnnnnnnnnnnnnnnnnnnnnnnnnnnnnnnnnnnnnnnnnnnnnnnnnnnnnnnnnnnnnnnnnnnnnnnnnnnnnnnnnnnnnnnnnnnnnnnnnnnnnnnnnnnnnnnnnnnnnnnnnnnnnnnnnnnnnnnnnnnnnnnnnnnnnnnnnnnnnnnnnnnnnnnnnnnnnnnnnnnnnnnnnnnnnnnnnnnnnnnnnnnnnnnnnnnnnnnnnnnnnnnnnnnnnnnnnnnnnnnnnnnnnnnnnnnnnnnnnnnnnnnnnnnnnnnnnnnnnnnnnnnnnnnnnnnnnnnnnnnnnnnnnnnnnnnnnnnnnnnnnnnnnnnnnnnnnnnnnnnnnnnnnnnnnnnnnnnnnnnnnnnnnnnnnnnnnnnnnnnnnnnnnnnnnnnnnnnnnnnnnnnnnnnnnnnnnnnnnnnnnnnnnnnnnnnnnnnnnnnnnnnnnnnnnnnnnnnnnnnnnnnnnnnnnnnnnnnnnnnnnnnnnnnnnnnnnnnnnnnnnnnnnnnnnnnnnnnnnnnnnnnnnnnnnnnnnnnnnnnnnnnnnnnnnnnnnnnnnnnnnnnnnnnnnnnnnnnnnnnnnnnnnnnnnnnnnnnnnnnnnnnnnnnnnnnnnnnnnnnnnnnnnnnnnnnnnnnnnnnnnnnnnnnnnnnnnnnnnnnnnnnnnnnnnnnnnnnnnnnnnnnnnnnnnnnnnnnnnnnnnnnnnnnnnnnnnnnnnnnnnnnnnnnnnnnnnnnnnnnnnnnnnnnnnnnnnnnnnnnnnnnnnnnnnnnnnnnnnnnnnnnnnnnnnnnnnnnnnnnnnnnnnnnnnnnnnnnnnnnnnnnnnnnnnnnnnnnnnnnnnnnnnnnnnnnnnnnnnnnnnnnnnnnnnnnnnnnnnnnnnnnnnnnnnnnnnnnnnnnnnnnnnnnnnnnnnnnnnnnnnnnnnnnnnnnnnnnnnnnnnnnnnnnnnnnnnnnnnnnnnnnnnnnnnnnnnnnnnnnnnnnnnnnnnnnnnnnnnnnnnnnnnnnnnnnnnnnnnnnnnnnnnnnnnnnnnnnnnnnnnnnnnnnnnnnnnnnnnnnnnnnnnnnnnnnnnnnnnnnnnnnnnnnnnnnnnnnnnnnnnnnnnnnnnnnnnnnnnnnnnnnnnnnnnnnnnnnnnnnnnnnnnnnnnnnnnnnnnnnnnnnnnnnnnnnnnnnnnnnnnnnnnnnnnnnnnnnnnnnnnnnnnnnnnnnnnnnnnnnnnnnnnnnnnnnnnnnnnnnnnnnnnnnnnnnnnnnnnnnnnnnnnnnnnnnnnnnnnnnnnnnnnnnnnnnnnnnnnnnnnnnnnnnnnnnnnnnnnnnnnnnnnnnnnnnnnnnnnnnnnnnnnnnnnnnnnnnnnnnnnnnnnnnnnnnnnnnnnnnnnnnnnnnnnnnnnnnnnnnnnnnnnnnnnnnnnnnnnnnnnnnnnnnnnnnnnnnnnnnnnnnnnnnnnnnnnnnnnnnnnnnnnnnnnnnnnnnnnnnnnnnnnnnnnnnnnnnnnnnnnnnnnnnnnnnnnnnnnnnnnnnnnnnnnnnnnnnnnnnnnnnnnnnnnnnnnnnnnnnnnnnnnnnnnnnnnnnnnnnnnnnnnnnnnnnnnnnnnnnnnnnnnnnnnnnnnnnnnnnnnnnnnnnnnnnnnnnnnnnnnnnnnnnnnnnnnnnnnnnnnnnnnnnnnnnnnnnnnnnnnnnnnnnnnnnnnnnnnnnnnnnnnnnnnnnnnnnnnnnnnnnnnnnnnnnnnnnnnnnnnnnnnnnnnnnnnnnnnnnnnnnnnnnnnnnnnnnnnnnnnnnnnnnnnnnnnnnnnnnnnnnnnnnnnnnnnnnnnnnnnnnnnnnnnnnnnnnnnnnnnnnnnnnnnnnnnnnnnnnnnnnnnnnnnnnnnnnnnnnnnnnnnnnnnnnnnnnnnnnnnnnnnnnnnnnnnnnnnnnnnnnnnnnnnnnnnnnnnnnnnnnnnnnnnnnnnnnnnnnnnnnnnnnnnnnnnnnnnnnnnnnnnnnnnnnnnnnnnnnnnnnnnnnnnnnnnnnnnnnnnnnnnnnnnnnnnnnnnnnnnnnnnnnnnnnnnnnnnnnnnnnnnnnnnnnnnnnnnnnnnnnnnnnnnnnnnnnnnnnnnnnnnnnnnnnnnnnnnnnnnnnnnnnnnnnnnnnnnnnnnnnnnnnnnnnnnnnnnnnnnnnnnnnnnnnnnnnnnnnnnnnnnnnnnnnnnnnnnnnnnnnnnnnnnnnnnnnnnnnnnnnnnnnnnnnnnnnnnnnnnnnnnnnnnnnnnnnnnnnnnnnnnnnnnnnnnnnnnnnnnnnnnnnnnnnnnnnnnnnnnnnnnnnnnnnnnnnnnnnnnnnnnnnnnnnnnnnnnnnnnnnnnnnnnnnnnnnnnnnnnnnnnnnnnnnnnnnnnnnnnnnnnnnnnnnnnnnnnnnnnnnnnnnnnnnnnnnnnnnnnnnnnnnnnnnnnnnnnnnnnnnnnnnnnnnnnnnnnnnnnnnnnnnnnnnnnnnnnnnnnnnnnnnnnnnnnnnnnnnnnnnnnnnnnnnnnnnnnnnnnnnnnnnnnnnnnnnnnnnnnnnnnnnnnnnnnnnnnnnnnnnnnnnnnnnnnnnnnnnnnnnnnnnnnnnnnnnnnnnnnnnnnnnnnnnnnnnnnnnnnnnnnnnnnnnnnnnnnnnnnnnnnnnnnnnnnnnnnnnnnnnnnnnnnnnnnnnnnnnnnnnnnnnnnnnnnnnnnnnnnnnnnnnnnnnnnnnnnnnnnnnnnnnnnnnnnnnnnnnnnnnnnnnnnnnnnnnnnnnnnnnnnnnnnnnnnnnnnnnnnnnnnnnnnnnnnnnnnnnnnnnnnnnnnnnnnnnnnnnnnnnnnnnnnnnnnnnnnnnnnnnnnnnnnnnnnnnnnnnnnnnnnnnnnnnnnnnnnnnnnnnnnnnnnnnnnnnnnnnnnnnnnnnnnnnnnnnnnnnnnnnnnnnnnnnnnnnnnnnnnnnnnnnnnnnnnnnnnnnnnnnnnnnnnnnnnnnnnnnnnnnnnnnnnnnnnnnnnnnnnnnnnnnnnnnnnnnnnnnnnnnnnnnnnnnnnnnnnnnnnnnnnnnnnnnnnnnnnnnnnnnnnnnnnnnnnnnnnnnnnnnnnnnnnnnnnnnnnnnnnnnnnnnnnnnnnnnnnnnnnnnnnnnnnnnnnnnnnnnnnnnnnnnnnnnnnnnnnnnnnnnnnnnnnnnnnnnnnnnnnnnnnnnnnnnnnnnnnnnnnnnnnnnnnnnnnnnnnnnnnnnnnnnnnnnnnnnnnnnnnnnnnnnnnnnnnnnnnnnnnnnnnnnnnnnnnnnnnnnnnnnnnnnnnnnnnnnnnnnnnnnnnnnnnnnnnnnnnnnnnnnnnnnnnnnnnnnnnnnnnnnnnnnnnnnnnnnnnnnnnnnnnnnnnnnnnnnnnnnnnnnnnnnnnnnnnnnnnnnnnnnnnnnnnnnnnnnnnnnnnnnnnnnnnnnnnnnnnnnnnnnnnnnnnnnnnnnnnnnnnnnnnnnnnnnnnnnnnnnnnnnnnnnnnnnnnnnnnnnnnnnnnnnnnnnnnnnnnnnnnnnnnnnnnnnnnnnnnnnnnnnnnnnnnnnnnnnnnnnnnnnnnnnnnnnnnnnnnnnnnnnnnnnnnnnnnnnnnnnnnnnnnnnnnnnnnnnnnnnnnnnnnnnnnnnnnnnnnnnnnnnnnnnnnnnnnnnnnnnnnnnnnnnnnnnnnnnnnnnnnnnnnnnnnnnnnnnnnnnnnnnnnnnnnnnnnnnnnnnnnnnnnnnnnnnnnnnnnnnnnnnnnnnnnnnnnnnnnnnnnnnnnnnnnnnnnnnnnnnnnnnnnnnnnnnnnnnnnnnnnnnnnnnnnnnnnnnnnnnnnnnnnnnnnnnnnnnnnnnnnnnnnnnnnnnnnnnnnnnnnnnnnnnnnnnnnnnnnnnnnnnnnnnnnnnnnnnnnnnnnnnnnnnnnnnnnnnnnnnnnnnnnnnnnnnnnnnnnnnnnnnnnnnnnnnnnnnnnnnnnnnnnnnnnnnnnnnnnnnnnnnnnnnnnnnnnnnnnnnnnnnnnnnnnnnnnnnnnnnnnnnnnnnnnnnnnnnnnnnnnnnnnnnnnnnnnnnnnnnnnnnnnnnnnnnnnnnnnnnnnnnnnnnnnnnnnnnnnnnnnnnnnnnnnnnnnnnnnnnnnnnnnnnnnnnnnnnnnnnnnnnnnnnnnnnnnnnnnnnnnnnnnnnnnnnnnnnnnnnnnnnnnnnnnnnnnnnnnnnnnnnnnnnnnnnnnnnnnnnnnnnnnnnnnnnnnnnnnnnnnnnnnnnnnnnnnnnnnnnnnnnnnnnnnnnnnnnnnnnnnnnnnnnnnnnnnnnnnnnnnnnnnnnnnnnnnnnnnnnnnnnnnnnnnnnnnnnnnnnnnnnnnnnnnnnnnnnnnnnnnnnnnnnnnnnnnnnnnnnnnnnnnnnnnnnnnnnnnnnnnnnnnnnnnnnnnnnnnnnnnnnnnnnnnnnnnnnnnnnnnnnnnnnnnnnnnnnnnnnnnnnnnnnnnnnnnnnnnnnnnnnnnnnnnnnnnnnnnnnnnnnnnnnnnnnnnnnnnnnnnnnnnnnnnnnnnnnnnnnnnnnnnnnnnnnnnnnnnnnnnnnnnnnnnnnnnnnnnnnnnnnnnnnnnnnnnnnnnnnnnnnnnnnnnnnnnnnnnnnnnnnnnnnnnnnnnnnnnnnnnnnnnnnnnnnnnnnnnnnnnnnnnnnnnnnnnnnnnnnnnnnnnnnnnnnnnnnnnnnnnnnnnnnnnnnnnnnnnnnnnnnnnnnnnnnnnnnnnnnnnnnnnnnnnnnnnnnnnnnnnnnnnnnnnnnnnnnnnnnnnnnnnnnnnnnnnnnnnnnnnnnnnnnnnnnnnnnnnnnnnnnnnnnnnnnnnnnnnnnnnnnnnnnnnnnnnnnnnnnnnnnnnnnnnnnnnnnnnnnnnnnnnnnnnnnnnnnnnnnnnnnnnnnnnnnnnnnnnnnnnnnnnnnnnnnnnnnnnnnnnnnnnnnnnnnnnnnnnnnnnnnnnnnnnnnnnnnnnnnnnnnnnnnnnnnnnnnnnnnnnnnnnnnnnnnnnnnnnnnnnnnnnnnnnnnnnnnnnnnnnnnnnnnnnnnnnnnnnnnnnnnnnnnnnnnnnnnnnnnnnnnnnnnnnnnnnnnnnnnnnnnnnnnnnnnnnnnnnnnnnnnnnnnnnnnnnnnnnnnnnnnnnnnnnnnnnnnnnnnnnnnnnnnnnnnnnnnnnnnnnnnnnnnnnnnnnnnnnnnnnnnnnnnnnnnnnnnnnnnnnnnnnnnnnnnnnnnnnnnnnnnnnnnnnnnnnnnnnnnnnnnnnnnnnnnnnnnnnnnnnnnnnnnnnnnnnnnnnnnnnnnnnnnnnnnnnnnnnnnnnnnnnnnnnnnnnnnnnnnnnnnnnnnnnnnnnnnnnnnnnnnnnnnnnnnnnnnnnnnnnnnnnnnnnnnnnnnnnnnnnnnnnnnnnnnnnnnnnnnnnnnnnnnnnnnnnnnnnnnnnnnnnnnnnnnnnnnnnnnnnnnnnnnnnnnnnnnnnnnnnnnnnnnnnnnnnnnnnnnnnnnnnnnnnnnnnnnnnnnnnnnnnnnnnnnnnnnnnnnnnnnnnnnnnnnnnnnnnnnnnnnnnnnnnnnnnnnnnnnnnnnnnnnnnnnnnnnnnnnnnnnnnnnnnnnnnnnnnnnnnnnnnnnnnnnnnnnnnnnnnnnnnnnnnnnnnnnnnnnnnnnnnnnnnnnnnnnnnnnnnnnnnnnnnnnnnnnnnnnnnnnnnnnnnnnnnnnnnnnnnnnnnnnnnnnnnnnnnnnnnnnnnnnnnnnnnnnnnnnnnnnnnnnnnnnnnnnnnnnnnnnnnnnnnnnnnnnnnnnnnnnnnnnnnnnnnnnnnnnnnnnnnnnnnnnnnnnnnnnnnnnnnnnnnnnnnnnnnnnnnnnnnnnnnnnnnnnnnnnnnnnnnnnnnnnnnnnnnnnnnnnnnnnnnnnnnnnnnnnnnnnnnnnnnnnnnnnnnnnnnnnnnnnnnnnnnnnnnnnnnnnnnnnnnnnnnnnnnnnnnnnnnnnnnnnnnnnnnnnnnnnnnnnnnnnnnnnnnnnnnnnnnnnnnnnnnnnnnnnnnnnnnnnnnnnnnnnnnnnnnnnnnnnnnnnnnatatttttgaactttgaatctatcggctccctgaaagcttgccgcccgtgcgataaaagatataaaaagccaagtacgttttgcttaaacagtacacctcccggaccaatccttgaaagatggctgtgtcttacccttcactcatgggaacagcctcgttacaaatcctgcagaaaaggattcaattcgcgctcttcgcccagtgtggtcgaaggaccgtggcctgggaagaccggcgtttcatccgcaaaacacaacagcttactgcggatggaggcgaggatttggtgataatccccaccccagagatcggtccggccaatactgcctttgaagagtgtgtctccgctgaaaattttctgcccttctccagatgaaagcaatgagatgctgccaggggaatgacccggcgtcgagagtacctccagggaagatgatcctactcgcagtacatctccctcctttaaaaagtcttttaattgcactgtgccgggcaactcgacgcccaaccaggcggcctgagccgcgagattctggtagagaggaaggtctgccgcatgcatcaggactggcgcacccgttgcttcctgaagcttctgaaggccacccacgtgatcgatgtgggcatgagtggccacaatgtatttcacttgaagctggtgctgctgaaggatcgcgcggacgcgatcaatttcatctcccggatcaatgacaatagcctcgtgagtggcctcgtcacccagaatcgagcaattgcaagccagcataccaacaggaagaatgtggtgaatcatcaagaatacctgtctttacaaaaagacttctttcgcccgagctgaaacagaatcagagatccctggggatgctatggtccgctgcccgggcggaaatgcccccactattttatttccaacgaacgatcactgcggcaaagaatccgtccatccggccgccgcctggccaagtataaaaatagcctgaatccctgaaaagcggggacagatggggaaactcttgtcctaattctgtagcactgagcgcacggaacccttgagatttacccaccacactggaaacgacatcttcattttcttccggttcaagcgaacacgtcgaataaaccaaccttccacttaaggcgagagccgcaagtccctgctgtaagattgagcgttgtatcgcggcaagccggggaatatcctccggttggagtcgccacttgatttcaggattgcgtgccagcgtgccggtacctgaacaagggacgtcaacaagaattcggtcaaaggttggggtgagtggaagaggttgggcagcgtcgagcagcacccgatgtaattgaacgccttccggccaccggcgtgaaagagttttccgaagcgcgcgcattcgccgcaggctgcggtcgcaggccacaatagaaccctgacccatctcatcggctatttgccaggttttgattccgggagcggcgcaaaggtccaaggcccggtttcctcgttgcggagccaggagttcagggaccagttgcgacgcttcgtcctgaattaccacgcgaccttcacgccaggctcgggttttgatgaccctaccggattccacccacaatgcccgcttcccgaagtttccaaggtgcgtctggatgtgatcagccagaagttcatcacgcattttttgccggtcagagcagggacccgtaacgcgaaggtgggtgagcgggatcgcctggctagccgtaatcaaggcacgtgcggcttcactgccgaagtttttctcccagcgcttatgaagccaagcaggaatcgagcggcgtgcgctttcaagatattcctcattcgcagcgtcgggcgggtcacttgcgttgaaggatgctttctcgcatcgccgcaatactgcattgaccaaccccgcggccgacttcttgcgggcagctttcactaattcgaccgattcattcactgcagcggagcggggaatggaactcaaaagacggatttggtatacacccatacggagcgcctcaagaacttcgcggtcaaagtattggatcggttttccagagagtttctcgatcgtgaaatcgagatcacctcgccagcggaggactcccatgaccagatctgtaaccaacctccggtctacttcttttagacgcgaaatggccggtcggtgcaacaagtccactgcgtaatttcgcttttcatccaactgacaaagaatctggaaagcggctagacgagcggatgagatgggcatgtagggtgtggtctatcgtacggataacagaaattccccgcgcctcataaaagactccagcaagggatctgtaaggggccgagggcggagattaggactatttacctttaaataactacgaaattgtggtatgagtaaaaggccgaattgcagacaacccgactcggatcaacaaaaattataggggctgtctccaatgggatcgcgtttggcgcgaatttgactcacttcgtgaaaggagaattatcatgaatcagactcacaattctgtagaagcttccatccgcaaggccttcgagctcctcattcaaattcgagggcatcggcaagctgaccgtctgctggctcttgccaacggttacctgcgcacgctcttgcattccacccccgagagcaccccgatcatggtttccatccgcgcggtcaggatccgcgagccttaagcacgcgagcggctgcggattacagactcattcagcctgaatcgcgggggcgccgctcgcaacttctgacggttgggctctttcggccttcaattgggcaacctggcgctgaagctcagacgccagatcctccagaatgcgtagttgctccgagcggcgctcaatggcgctttccagccgcgctatttgctggcggagccgggcattttcccgttgcagcatttgggaaccggtgtcgggaagtcctcgcttcacaccggcattccgcacgcgcgcttcgggcgcaccggcaacccgctcctgaatctgccggataacagcatccacctccttgcgttcggccccgggagggcagatgctgcgcaagagaaggagccgcgccaaatcaggctggttgcgcccacgttcccaatgttgaatagcccctttggtggcgttcaatcgccgcgataaaccttcctggctaaggcccaggcgctgccgtacccggcggattactttcggaatgtcaagcgttgtggccataaaattcctcccatgcgaaatagtacttgacaagagctatggtactaggctagactttgaaatgttcccgcttccatagctgtcgtctgatcttcagaagtcggctggaagaagagaacgacgctttttccgcaggttttgaacgctccacgagtataccagcggggcggcctcctgcggcgcgccttgtgacttgccatgccttgtgcatggctttttctggtatatgttagttactctttgtataataatcacgaatataacgccttcaaagagcactggttgcgtggtcccttgccactcaggaatgtggcttggtgcgccgataactgcacggcatggttcattgttcattcttctctcaattcgggcacaaaatatcgttagacaaacggctcgcaagctacaccgattcctgtttatagattacaggcccccgctcatctgctggaggatgttcaagagttcattctgttctcgagcctgccgatctttcaggcgcctcctcagcaagaacttccagagggtcaaagctgccgcatggagattccgccttcgatcacagctagcctacatcacaagacctctcgggtcaagagaggatttatttctagcctacactagggtgggtaccggctggcagccatgccgctgcaagggcttgttttcaaggcaaagtgaacgctgctcgcagcgcttgatctcgtgctcgcccctctcaagagttcgccttataagaaatcaagaagggcagcttcaatctttgaatcatatcccctcgcgcactcttagtttcagatcccctcgcaaattcaaaacatggatcagccgctgtgcggagaggagattagacgatgcaacctgtcactcatgcccccggcatgttgaatcaatccgggatgttaaaaacaaccacccacccgatccccgcgtcactcgtccttgcgccacccggggaactccggtggaagccctccaacccgggagaggcggaaatagccgtcccacttccctcaaatccgcgatgcgcagaaaggggctgcgtttttcccgctgctcctgatacggcagggatgtgccttcatcattaccggcaaatccaggaaccgatcctatttgcctctcaccaacccacacgagcagttgtggaacgcgggaggtttggcatcccagagcatgaagttgacacatcccgactgagagaccgccgtcggctggcagccttgcgggaggcttttttggaagatgaatttactcgttaagcgagccctgtgaactgaggtgaaagatggcagcacctttacaatcctggacacaaaatgtcacttctccctctgctgggaggacgactggcgggagcagccacgcccccttgctcacagcttccagcgcatggcttgctcttcagggtcgaaccgggatcccgattggccgcgccacattctatcgatggcttagcaacggaaaaatcttctccgttcggattgggaccaagatgtatattccactttccgtgatcgaggagattgtccggcgctgccagtcgggcgacggactatagtgtctgcttcttgctcgttcctttgaagctaagtttaacgcgtcagcagatgttcaagagctgattgcaattccggaaatcggaatgggtagccggaggctttcagacgggcagggtcagcgcgctggctggccagaagcacttcatcggccatttccccaaaggcaagtcgcgtcgcaaacgccggcattctcagcaaggtgggacgcttcagaatcctgcccagcgtctcaatgaattcgctgtttcttaccggatggggagaagccagaatcaccgggccgctcagttcagtgttagcgaggcaatgctgaatggctccgatagcatcatccagcgcaatccaactcatgtattgccttccgcttccaatccgcccacccaatccttttcggaaaaccggaagcattcgagcgagcgctccaccttccgcgcttaacaccatactatttctcagaatgacggtgcgaatacctttttcagcggctggcgctgcggcttcttcccattcgcggcagacttgcgctaaaaatcccgacccggccggcgtttcttcccgcagaatctcatctccacgattcccgtaatatccaattgcagacgcgcttaccagtgtcttcggaggatttgaaagcctggtgagagactcacagagcaatcgggttcctgccacgcgactttcccggattctggccttttgttccggggtccatcgacgcgcggcgatattttcacctgcaagatgaattacggcatcaatttcctggtcagaaagcgcaggaggaaggttagactcgggatcccacaggatggcgtcgtgagccacgtgggttctcgaacgtaccaggcgaacggtctgatgcccggcggctgtaagctctctgagtagcgctgagccaatcagtccgcttgaccctgtgatgaggactcgcatggaaccccgaaatgagggtgttatagcgtcatcatagcacaggcctggcaatggaattttaccttgcgctacctcagaacaaatggacgcggttggcaaggagaacgtatgaattggggggtatctggacaccgtttatcgatccgccgctttggtcaaaaaacagaagaccccgaacttgcaactggggggaagggatgaggccggcaagcccattcacattaataaattgggtttgcggattagtgatgacgtaaatattctgcccctgaaaaagcgtaaaacatgggatgaaacggaaggcaccgctcacgttatcagctcctgccgtgaggagggaagagaagttacccgaaaccgtttgaagcggaatgtaaatattactggcgtcaacggttgaagggggtgttgttgccggaggagtcgctgccaccggagcggtatatgttccatgcaccacaagttgctggccgacatttagaaatgttgaatccggggtaaggtttggaaaattaacggccggagcggaaaaatggaagccggttgaagtggagacgttgacgatgacgggcggggtatccagggggactgagttcccggttccggcagaggtattcggttcctgatcgtgaacatagagctgaaattgggtgagatttcccgaagaatctttagtgacagagatcacatagcccagaaaagctgttcggtcgttatcaagatcggtttgatcttcgattaccacggtattggcaataaaatttccctgagaatccacgtaaccattgatttccacaaagttcccggtcgtaatctgattaagcgccgcggcgccgatcagttgagagttcttagtcagattgacggtgatagcggggccagcgccttccagggatgaagtgacgttaaatcccggcaaagtttggaccacgaaactgccaataaaatttgagttagtgcttgtgttattgacgctgaggatgtagccatggaaatcatccagagtaccaaatccctgcccccctgaagctgtcagcgtcgtggcattcaccaccggcgttaccttgacggtcagggatcctggagacccggtgacattcacctggccctgagtcgtcaactcaattgattgaggcaggttgaaatcgatgttcatggcggcggcctgacaaggcgtcgtggaggtggacgagcaggccttgatcaccagtggcggattgatcgtaaagttaacgttttccgaactgagggttggagtgattacgtcaatggggggattcacagcagggtcgaaaagcgccatgctggaagcgctgaactgaacctggcctccagtataagttcccggagagacggagacgacatcggcgagggcggcggtgtcctttagagctgcaaagtccaggggaatgaaggtattggccgccagaacggaaacagaaccaccccctccctgtggagtcagcgtcagtgaagcaatatttgttcggaaagagaggaggttacacagcggaacgtcaccggcaaaaatgatcagagtccctttctcgttgcttgtggatgcagggtttgagctgcacccttctgttccaaaagcgagagctgttaggatcaagccccaaaggagtaagtgtctaaacattctcctcctcacgaaatcattcggtgaacgcttttctgcgctcagccgccgcttcttccggcgcggcttgctgcctcattgcgagtcggggtccatcaacgctagtgcaaaatggatttagcgggtgcgtaagcttgatgcaataagcttgcttctgctacagctttctcttgacgtccccttcgttcccttgcctgaacgtgaactttatgagattcgacaaaacacttaaaaaaattcagaataacacacgttttttcagcgatgccagcttttcgatcacgcttgaaaatatcattcctctcctgtacactcacagcatcagtcatttcaaaaatcatcaactttgacaaattcagaccgccttgggacctagaggaaagggtagggtcgctatggccagtggaaaaatttttattaattatcgccgggatgacagccgggcagattcaggccgattgtatgatcgcctcaaggctcgttatccgaatcatgtctttcgcgatattgggtcccttgaaccgggtgtcgagtggcaggaagctatcgagaaggtgttgggttcaagcgatgcagtcgtggtggtgatcggcaaaagctggctgacggtgacgaattcggcgggcacccgacgacttgacgacccgaaggatacggttcgtcaggagatcttgactgctctccggcgaggcgtgcgggtgtttccagtgctggtgggtggagcccgcatgccgtcggaagaagagcttccagcagaccttcaatcgcttgcgcggcgcaacgctctcgaaattaccgagcaagactgggatgaaggcttcgagaaactcgcagaggcgcttgaccacgccttgggcgtacggggaaggacgccgaaacagcggcgccgcttcaggccgggtgtggctgccgttgcgcttcttggcgcgacaatcattgcagccgtcgtggtcacgatttatcactcagcgcagaactcgcccgtgtccgtcgtgcgcgaagacgccggccctcagaaagacgccatgcctaatgctgctgacagggcgccaacaaacggagcgggagcggagtcgaatgctggcatacgctcattgaaaacctctgtcgctccgccgcgagaacaggctagccgcacatcgtcagggccaaccaaggcttccgcaccagcgcgaataacctctgctccggtatctcccccgccggctgaaatcagctctgctcattttgttggcaactggcgggcaatagtgacaggttccggtcagcaactcatcgagagcgttgatctctacccggatttcagctttggtgtcacactgaaccgttcgtctgccgccgttggaggatggcaatacaacgccgcagatgacgttctgaatttttcaaatggcacaaattttctcaacaacggagttaagtttgcctgcaaattgaaaggcactgacggaacacacgccaactttggcgggccttgccttgacctgatgcagatgagctggaatgtggcgctgactcgtgagggaaatctttccgaggtggtttacaacgtgccgaaggttgacctttcggccctgacgatggctgaaaaagccgcctttaccgaagcgttatcgcaaggcttctgcacttgcggttgcgggatgacgatccttaattgtctgcgcaatgaccgcacctgcctggtaagccccaacctggcgcgcgcggaactggtggtgttgatgcaatacaggcgccgatgagggggtagccttgagcctgaactatcagcaagactcccttttacgacggatcaggcatcctttgtctttgtggcctgctcctgccccgccgcccacttggcgtgctcctgcgaaaccaacgactcaattctttccgccaagagtgtatggggattgatggcagcagcgtaaggaccagccccggctaaatagagatatttttcgtgcttcagggattcgcaagtggaacggtaagtgatccagttgtaatgatattgattgagttggagcacgccttccaaaattgcgatcagcgccccaaggcttcccgccacccacggcaatttgaaaccagaaaataacggaaccaggcccgccgcaccaatctcaatcaccttcatccacttgaaagtgcgctggttgaaattactcttgtgatcgtaccaaccaatttgatcttcgaggcgttcaagcgtcgggtcagcatcaggcatgtctcacctcgtctatcggagtgcctaagattctagcctaatctgcgtcaaggtctacactcagaatattcttgctggccgcataaggcattggaacaggcttgattggaacccgaaaataggttggcggagggagagggattcgaacccccgagcccctttcggggctaacggttttcaagaccgccggtttcaaccactcacccatccctccgggaagtccacttcaacggtatgaagcaatcggctttattttagcagaacaagcgccggctgaagaaccggttgcggagccttttgccccggggtcgaacttgggggagcgtgctcgcatgaaattcaccaaacatcagtattctcggccgaaggatggcttgttcgttaaagccttccacaaaaaaccccctgcatttctcgaaaaattttcgtaaaatgtgaagccttccggtgaacctccggcaaagaggaggggggcatgagctacaacctacttgaggaagattggattccagttctatggaagactggaaagctcactcgcgtcaacctcattcaggtgctcactgaagcacactgcatccgccagattgccgccaccaatcccatggaccgcgtggccaccctgcgttttctgctcgcactgctttattggtgcgtaggggatccaccgcgcgatccaacctcgggtggcaccttttccgaagcatggtttaccaaactctatgaaaacaaggaatgcttcaatttgctgggagacggaatccggttctatcagtaccgtccaggctcgggaaaagacaaaaagctttccgtcaactatctcattcatgaagtgccgacggggtccaatgtacggcatttccggcattccgcggacggagttaacggcctttgtcgggcgtgttgtgccacagggttgttgcggctacctgtattcaccacccaaggggggaaaggaaaatcaccaggcatcaatggcaaaccccccgtctacgtcatacctctcggacgatccctgtgtgagaccttgtggctctcttggcgaccacagtcgaatttgggtacgcctgcatgggagaagcctgacatggcactgcccaagactggcgaagtccccctcctgaccgggctcacatggctgccgcgacgcgtttggctggacgaccccatggaacccgaagtcccttgtatttgttgcgggcgaaaagagcttctgattcggcagtgcatatttgccggcatcggtagcggcaaggcggatggccgagtttggaacgacccgcacgtcgttcgtgacaaaaatgtggtgatgacaccaagtaatgcccttgccgattccgataaagcggctgacgattgggcaaagataactgcggcgatcctcatcgataccaagcacacttccagacgccgattctgggttgttggtttcgcaagtaaacaggacaagtacctggaagcgaaggaatttgagattttccttcaacctaccacggaaagtgctcagattcaagatgccatcaaggagatcgagagatggcaaagagaagcagcggggctggcaaaaagagttgtcagagtggtgaagaacaagaaatcctcgcgaaaacatgttgagatcgacgccctggtaaaagccattcggcctcatatcgaagccagtgcctctgtgaaattgaaccgcctcatttccgacggccacccggcatgggagggggcggccaactactatgaagggatgatggttgccatctctagatcaatttctccggattttacggccacagcgctacgacagcggcaggaaattgcgcgcgttaaaccagacatgcggttaaaaacagagaaggcagggaatctgaccgcaagagaggcgataagtgactccaacagaacagtacatcaaacgcctgacacacctgaagaccggtgacctcggattgctgcgcacccacgcggggcaggagctcgatgagaaggtagagggcttcgacctgtttacgggcctatggtggccgctgcgtcaaaggaactcgcgggcaccccgccgtgacgtggcatggctcgtcgccaagctctatgccttccggccactcgagtattcggcggaagagacgctagctttccttcttgggcaatgccaaccagaagttggcaagcgggagaagttcatccagcggtttgataggatgctgactctgcccatccgcaaaatcgaacctgcgttgcaatgggcgcttgacgtgctcaattcaaagggcatgggactcgactggataaaactcacggatgatctttcggtttgggaacgagaatccacccgtctcgaatgggcaaaggaatttttgaagtctctaggaggaggataaatgctgatccagattcacgctattcaaaatcacgctccggccaatttgaaccgagatgacttgggcgcgcccaaagcctgctatttcggcggtgtgctgcgctcgcgcatctccagccaatgcctcaagcgcagcatccgtagaagcgacgagttcaggcagttgctaggcggtgttcgtacgcggcaattagcgaaattgatagctgacaagattcccgagaaagatgtgaggaagcgtgcggagaagattcttgaaatatgcggattcaagccctggagatcggaaggcgagtccgaaaattctgagaagagcaaaatgcttgtctatactaccaaacaggctgttgaagagatggcgaacctcctccgaaacagcgatggaaaggctgagagtgaactggcggaggggttcgccggacttattgcggagcgcacggcagttccggacatggccttgtcgggccgcatgctggagccggacaaatcttctacggtttgggagaagcgtgatactaaggtggaagcagcacttcaagtggcccatgcaatctccacccatgaggcccgccccgaggtggattactacgtcgctgccgatgacatccccggcgaggacgcgggtgccggctttgtggacgaggctatgtttgcctcggcctgtttttacaaatatttctcaatccactgggagcaattggtgaaaaacctcatggggtttggggaagaacatgaaaagctggccgcacatacggtgggcgcattcattcggggggctgcgatggtgaaccccactggaaaacagaacagtttcgccgcgcataatcctcccgatggcatgctggttgagatcagggacacccctctcagctacgccaacgcttttgcgaaacccgcggttgctcagggtgaacgtgacctcatcgcccagagcatcgcgcagcttggccaatacatccacgacatggacaccgggtacggtaagccaacggagcgattctggttctcgcctaattcccgccatcctctgctggcttacatcgaggaagaacaagatggaaaaaagaaacgacgtgagattgcgcttaccgacaataatctcagttcgctcgatatcttaattcaaaaggtcatcgagaaaatcggccacaattggcatgaggttcagaaaattactgtgaacgcagaggtggtttgatgagggccaacaccttatttcttcgcttggagggtcttcttcaagcctggggagaccaccagtcaaagtttgtcatccgacggacggcggaagctccgaccaagtctggcgttgtcgggatgctgtgcgccgccctgggggttagcagatgtaaagcctctaatgaatggcttcgaaagctgggctcgctttgtatgggggcgcgcattgatgcgccgggtgtccgctggtgggactatcagacggtcggagccaaggtcggaatacccagggcagatggtgctggcgctaagagaacggccgcgacgggggaaattgaaactctcatcacgcgtcgcgaatatctctgcgacgcatccttcctgatcgctttgcagggtgaggccgacctgatagcgcagttggagaccgcagtaggagcgcccaagtggacgctctatcttggtagaaaatgctgccctccgtcacgccctttgctggaaaaacccgcaagcggtgagtttcccgatttactctcagcccttaagtcgattccttggcgcaaacggatgaaggaggatcaaccgcccaaaacggttgactgcctgctcgattggcagcccacggcagatcagcctgaagcgcctgatgatgccttcgtctggtatgatgtgccccgcacctttgaaccaccctcgcacgaaccccgattcgtgctccggcgtcaattgccagtggccatcgagggcggcgtgggcgtcgcaggccagccggcgcagaccgaaactccgccgccgccccgcccgcgggccgattacaccaactccgcctacaggaacaagcgcctggagcggcttgcccgcgaccagcagctttgcgttttttgcaaggcgccagccacaacggtacaacacatcacctatcggcgcgccggaggcaatgaaagcttggaagatctgcgttcgctctgccgtttgtgtcatgacgccgtgaccatgatcgagtatggtttaaacatgggtctggatcggatcaatcccgaagagccacgttggcgcgaccagattattgccaagcggaacgagatcatcgccttccgctcgctcgaaacgcgtcggcgacgcctcgctccagaggaggtggaatagccatgtggatttcgtgtctcctgatcgacgtcggtgacaatcccgaccgcccccgccccgggcgccaatggctgcgaaacctctatcgcgttcaccagcgcctttgcatggcgtttccctccgaccgcagaaagcagtacgacccagagtttttaaagccctaccagccagaggattttgggaacggccatgttcatgttgagcgcgggccgaccgctggctttctcttccgccttgatcccgaggaacgatgttgccgcgaagcatcacaggctcggcattccggcagtcgggtggtaattctggtacagtctgcaccaaaacctgactgggaatacgcctttcacaacgcctgttatctgctggccgccccgccggaagtaaagccattcaacccgtgctacacaacgggtcagcggcttcgattccgcctccttgcgaatcctacccgccgcctcacggaacactcgcttggagccgacggacagctcgtcaagaaatgggcgaatacggataagaaagggatgcgcgtgcctgtgccgacggatcaactcctcgattggatcaatcggcgagctgaaaaggcggggttttctatcgagaaggattccatcaatgttttgccgggttatgtgttcgccaacaaaagaggggacaggcatggaattcgcctgcgctctgtccgttatgacgggcttctcagcgttaccgagcccgcactgtttcggcaagcgattatacaaggcatcgggccaggcaaagctttcggcttcgggctgctttcggtagcgccgtgttgtaccggaggtctatgaccgccatttttgacctcctgccccgtttgattctttacagtggagaccacaccatcgccacacttaccactaccgggcccttcctcagcgaagagggtaattccccgccttggttaaggaggggataaggggtggttggtgtaaagaacgggctgagagaggacgccagccgcctcgatcatcgatggggcgcagctacaaaaacatgaaagacctccatctgttgcccaaagtccgcgatagttccagtttcctttacgtcgagcattgcaagatcgaccaggagggcaaagcgatcgccattcacgacgcgaagggccgagtgccagtaccctgcgcgtcattgctggtgctgatgctcggtcccggcaccagcatcacgcacgcggctgtgcgatctcttgctgacaatggctgcaccatcctctggacgggcgaagagggcgtccgaacctacgctcagggcatgggagaaacgcgctcttccgaacgcctgctgcatcagtcacgcctctgctctgcgcccgaattgcgcttcatagtggttaaaaggctttacaagatgcgtttcccggagaagctggacccctccctgaccatccagcaattgcgcggcatggagggtgtccgggtgcgcgacgcatacttccgcgccagccgcgaggcgggcattccgtggtccggccgatcctacaaaaccgataactggcaggccgccgatgccgtcaatcgcgccctttcggtggccaacagttgcctctacggcgtctgccacgccgccattgtttccgtcggttattcaccggccttgggatttattcacaccggaaagatgctctcctttgtctacgatgttgccgacctgtataaaaccgaagtcaccattcccctcgcctttcgggccgcagccgaaggaatgggctttcaggaaagccacgtaagaaggaaatgtcgcgacgcgtttgtggaaagccgcttattacagagaattatccccgatatcgaccgcgctctcgattggggttcttcggaaggtgggcagggggatgccagactggatgcccaaccagcggctccagggtggctctgggatcccgaagtgggggcggtggagggaggcatcaaccgcggagatgatgctgaaggaggtgacaagccacggtcgtgatggtgctcgaaaatgcccctcccagcgtgcgcggggaactgacacgatggatgctggaattgcatgctggcgtttttgtgggaaacatttccgcgctggtgcgggaaaagctctggcaggaagtctgccgcaaattggcgggtggggctggaattctggtctacaatgctgccaacgagcaggggtttgatatccgcttttggggatcgccctctcggcgggtcgaaaacttcgagggacttcttctagttcgcgggccataagccctttaaatcgcagcgtcgtccccacgcgtgtgggggtgaaccgttcatcggcgcccggccaatcaagattacgcggtcgtccccacgcgtgtgggggtgaaccatgatctgaatcgcttccgtaatcggccttcttgtcgtccccacgcgtgtgggggtgaaccgccccgcggacggccaacgaagggcgtgagacagtcgtccccacgcgtgtgggggtgaaccgcttcgccgttccgcgagactgcaggcttggatgtcgtccccacgcgtgtgggggtgaaccgcttaaccctatcccctatcccaaacccttcccgtcgtccccacgcgtgtgggggtgaaccgacaactcgcgcgataacagccagttacggaccgtcgtccccacgcgtgtgggggtgaaccgtcc

SEQ ID NO: 998 - DNA, 112316 bp, Artificial Sequence
  Synthetic Oligonucleotide
  misc_feature (1)..(95794): n is a, c, g, or t
nnnnnnnnnnnnnnnnnnnnnnnnnnnnnnnnnnnnnnnnnnnnnnnnnnnnnnnnnnnnnnnnnnnnnnnnnnnnnnnnnnnnnnnnnnnnnnnnnnnnnnnnnnnnnnnnnnnnnnnnnnnnnnnnnnnnnnnnnnnnnnnnnnnnnnnnnnnnnnnnnnnnnnnnnnnnnnnnnnnnnnnnnnnnnnnnnnnnnnnnnnnnnnnnnnnnnnnnnnnnnnnnnnnnnnnnnnnnnnnnnnnnnnnnnnnnnnnnnnnnnnnnnnnnnnnnnnnnnnnnnnnnnnnnnnnnnnnnnnnnnnnnnnnnnnnnnnnnnnnnnnnnnnnnnnnnnnnnnnnnnnnnnnnnnnnnnnnnnnnnnnnnnnnnnnnnnnnnnnnnnnnnnnnnnnnnnnnnnnnnnnnnnnnnnnnnnnnnnnnnnnnnnnnnnnnnnnnnnnnnnnnnnnnnnnnnnnnnnnnnnnnnnnnnnnnnnnnnnnnnnnnnnnnnnnnnnnnnnnnnnnnnnnnnnnnnnnnnnnnnnnnnnnnnnnnnnnnnnnnnnnnnnnnnnnnnnnnnnnnnnnnnnnnnnnnnnnnnnnnnnnnnnnnnnnnnnnnnnnnnnnnnnnnnnnnnnnnnnnnnnnnnnnnnnnnnnnnnnnnnnnnnnnnnnnnnnnnnnnnnnnnnnnnnnnnnnnnnnnnnnnnnnnnnnnnnnnnnnnnnnnnnnnnnnnnnnnnnnnnnnnnnnnnnnnnnnnnnnnnnnnnnnnnnnnnnnnnnnnnnnnnnnnnnnnnnnnnnnnnnnnnnnnnnnnnnnnnnnnnnnnnnnnnnnnnnnnnnnnnnnnnnnnnnnnnnnnnnnnnnnnnnnnnnnnnnnnnnnnnnnnnnnnnnnnnnnnnnnnnnnnnnnnnnnnnnnnnnnnnnnnnnnnnnnnnnnnnnnnnnnnnnnnnnnnnnnnnnnnnnnnnnnnnnnnnnnnnnnnnnnnnnnnnnnnnnnnnnnnnnnnnnnnnnnnnnnnnnnnnnnnnnnnnnnnnnnnnnnnnnnnnnnnnnnnnnnnnnnnnnnnnnnnnnnnnnnnnnnnnnnnnnnnnnnnnnnnnnnnnnnnnnnnnnnnnnnnnnnnnnnnnnnnnnnnnnnnnnnnnnnnnnnnnnnnnnnnnnnnnnnnnnnnnnnnnnnnnnnnnnnnnnnnnnnnnnnnnnnnnnnnnnnnnnnnnnnnnnnnnnnnnnnnnnnnnnnnnnnnnnnnnnnnnnnnnnnnnnnnnnnnnnnnnnnnnnnnnnnnnnnnnnnnnnnnnnnnnnnnnnnnnnnnnnnnnnnnnnnnnnnnnnnnnnnnnnnnnnnnnnnnnnnnnnnnnnnnnnnnnnnnnnnnnnnnnnnnnnnnnnnnnnnnnnnnnnnnnnnnnnnnnnnnnnnnnnnnnnnnnnnnnnnnnnnnnnnnnnnnnnnnnnnnnnnnnnnnnnnnnnnnnnnnnnnnnnnnnnnnnnnnnnnnnnnnnnnnnnnnnnnnnnnnnnnnnnnnnnnnnnnnnnnnnnnnnnnnnnnnnnnnnnnnnnnnnnnnnnnnnnnnnnnnnnnnnnnnnnnnnnnnnnnnnnnnnnnnnnnnnnnnnnnnnnnnnnnnnnnnnnnnnnnnnnnnnnnnnnnnnnnnnnnnnnnnnnnnnnnnnnnnnnnnnnnnnnnnnnnnnnnnnnnnnnnnnnnnnnnnnnnnnnnnnnnnnnnnnnnnnnnnnnnnnnnnnnnnnnnnnnnnnnnnnnnnnnnnnnnnnnnnnnnnnnnnnnnnnnnnnnnnnnnnnnnnnnnnnnnnnnnnnnnnnnnnnnnnnnnnnnnnnnnnnnnnnnnnnnnnnnnnnnnnnnnnnnnnnnnnnnnnnnnnnnnnnnnnnnnnnnnnnnnnnnnnnnnnnnnnnnnnnnnnnnnnnnnnnnnnnnnnnnnnnnnnnnnnnnnnnnnnnnnnnnnnnnnnnnnnnnnnnnnnnnnnnnnnnnnnnnnnnnnnnnnnnnnnnnnnnnnnnnnnnnnnnnnnnnnnnnnnnnnnnnnnnnnnnnnnnnnnnnnnnnnnnnnnnnnnnnnnnnnnnnnnnnnnnnnnnnnnnnnnnnnnnnnnnnnnnnnnnnnnnnnnnnnnnnnnnnnnnnnnnnnnnnnnnnnnnnnnnnnnnnnnnnnnnnnnnnnnnnnnnnnnnnnnnnnnnnnnnnnnnnnnnnnnnnnnnnnnnnnnnnnnnnnnnnnnnnnnnnnnnnnnnnnnnnnnnnnnnnnnnnnnnnnnnnnnnnnnnnnnnnnnnnnnnnnnnnnnnnnnnnnnnnnnnnnnnnnnnnnnnnnnnnnnnnnnnnnnnnnnnnnnnnnnnnnnnnnnnnnnnnnnnnnnnnnnnnnnnnnnnnnnnnnnnnnnnnnnnnnnnnnnnnnnnnnnnnnnnnnnnnnnnnnnnnnnnnnnnnnnnnnnnnnnnnnnnnnnnnnnnnnnnnnnnnnnnnnnnnnnnnnnnnnnnnnnnnnnnnnnnnnnnnnnnnnnnnnnnnnnnnnnnnnnnnnnnnnnnnnnnnnnnnnnnnnnnnnnnnnnnnnnnnnnnnnnnnnnnnnnnnnnnnnnnnnnnnnnnnnnnnnnnnnnnnnnnnnnnnnnnnnnnnnnnnnnnnnnnnnnnnnnnnnnnnnnnnnnnnnnnnnnnnnnnnnnnnnnnnnnnnnnnnnnnnnnnnnnnnnnnnnnnnnnnnnnnnnnnnnnnnnnnnnnnnnnnnnnnnnnnnnnnnnnnnnnnnnnnnnnnnnnnnnnnnnnnnnnnnnnnnnnnnnnnnnnnnnnnnnnnnnnnnnnnnnnnnnnnnnnnnnnnnnnnnnnnnnnnnnnnnnnnnnnnnnnnnnnnnnnnnnnnnnnnnnnnnnnnnnnnnnnnnnnnnnnnnnnnnnnnnnnnnnnnnnnnnnnnnnnnnnnnnnnnnnnnnnnnnnnnnnnnnnnnnnnnnnnnnnnnnnnnnnnnnnnnnnnnnnnnnnnnnnnnnnnnnnnnnnnnnnnnnnnnnnnnnnnnnnnnnnnnnnnnnnnnnnnnnnnnnnnnnnnnnnnnnnnnnnnnnnnnnnnnnnnnnnnnnnnnnnnnnnnnnnnnnnnnnnnnnnnnnnnnnnnnnnnnnnnnnnnnnnnnnnnnnnnnnnnnnnnnnnnnnnnnnnnnnnnnnnnnnnnnnnnnnnnnnnnnnnnnnnnnnnnnnnnnnnnnnnnnnnnnnnnnnnnnnnnnnnnnnnnnnnnnnnnnnnnnnnnnnnnnnnnnnnnnnnnnnnnnnnnnnnnnnnnnnnnnnnnnnnnnnnnnnnnnnnnnnnnnnnnnnnnnnnnnnnnnnnnnnnnnnnnnnnnnnnnnnnnnnnnnnnnnnnnnnnnnnnnnnnnnnnnnnnnnnnnnnnnnnnnnnnnnnnnnnnnnnnnnnnnnnnnnnnnnnnnnnnnnnnnnnnnnnnnnnnnnnnnnnnnnnnnnnnnnnnnnnnnnnnnnnnnnnnnnnnnnnnnnnnnnnnnnnnnnnnnnnnnnnnnnnnnnnnnnnnnnnnnnnnnnnnnnnnnnnnnnnnnnnnnnnnnnnnnnnnnnnnnnnnnnnnnnnnnnnnnnnnnnnnnnnnnnnnnnnnnnnnnnnnnnnnnnnnnnnnnnnnnnnnnnnnnnnnnnnnnnnnnnnnnnnnnnnnnnnnnnnnnnnnnnnnnnnnnnnnnnnnnnnnnnnnnnnnnnnnnnnnnnnnnnnnnnnnnnnnnnnnnnnnnnnnnnnnnnnnnnnnnnnnnnnnnnnnnnnnnnnnnnnnnnnnnnnnnnnnnnnnnnnnnnnnnnnnnnnnnnnnnnnnnnnnnnnnnnnnnnnnnnnnnnnnnnnnnnnnnnnnnnnnnnnnnnnnnnnnnnnnnnnnnnnnnnnnnnnnnnnnnnnnnnnnnnnnnnnnnnnnnnnnnnnnnnnnnnnnnnnnnnnnnnnnnnnnnnnnnnnnnnnnnnnnnnnnnnnnnnnnnnnnnnnnnnnnnnnnnnnnnnnnnnnnnnnnnnnnnnnnnnnnnnnnnnnnnnnnnnnnnnnnnnnnnnnnnnnnnnnnnnnnnnnnnnnnnnnnnnnnnnnnnnnnnnnnnnnnnnnnnnnnnnnnnnnnnnnnnnnnnnnnnnnnnnnnnnnnnnnnnnnnnnnnnnnnnnnnnnnnnnnnnnnnnnnnnnnnnnnnnnnnnnnnnnnnnnnnnnnnnnnnnnnnnnnnnnnnnnnnnnnnnnnnnnnnnnnnnnnnnnnnnnnnnnnnnnnnnnnnnnnnnnnnnnnnnnnnnnnnnnnnnnnnnnnnnnnnnnnnnnnnnnnnnnnnnnnnnnnnnnnnnnnnnnnnnnnnnnnnnnnnnnnnnnnnnnnnnnnnnnnnnnnnnnnnnnnnnnnnnnnnnnnnnnnnnnnnnnnnnnnnnnnnnnnnnnnnnnnnnnnnnnnnnnnnnnnnnnnnnnnnnnnnnnnnnnnnnnnnnnnnnnnnnnnnnnnnnnnnnnnnnnnnnnnnnnnnnnnnnnnnnnnnnnnnnnnnnnnnnnnnnnnnnnnnnnnnnnnnnnnnnnnnnnnnnnnnnnnnnnnnnnnnnnnnnnnnnnnnnnnnnnnnnnnnnnnnnnnnnnnnnnnnnnnnnnnnnnnnnnnnnnnnnnnnnnnnnnnnnnnnnnnnnnnnnnnnnnnnnnnnnnnnnnnnnnnnnnnnnnnnnnnnnnnnnnnnnnnnnnnnnnnnnnnnnnnnnnnnnnnnnnnnnnnnnnnnnnnnnnnnnnnnnnnnnnnnnnnnnnnnnnnnnnnnnnnnnnnnnnnnnnnnnnnnnnnnnnnnnnnnnnnnnnnnnnnnnnnnnnnnnnnnnnnnnnnnnnnnnnnnnnnnnnnnnnnnnnnnnnnnnnnnnnnnnnnnnnnnnnnnnnnnnnnnnnnnnnnnnnnnnnnnnnnnnnnnnnnnnnnnnnnnnnnnnnnnnnnnnnnnnnnnnnnnnnnnnnnnnnnnnnnnnnnnnnnnnnnnnnnnnnnnnnnnnnnnnnnnnnnnnnnnnnnnnnnnnnnnnnnnnnnnnnnnnnnnnnnnnnnnnnnnnnnnnnnnnnnnnnnnnnnnnnnnnnnnnnnnnnnnnnnnnnnnnnnnnnnnnnnnnnnnnnnnnnnnnnnnnnnnnnnnnnnnnnnnnnnnnnnnnnnnnnnnnnnnnnnnnnnnnnnnnnnnnnnnnnnnnnnnnnnnnnnnnnnnnnnnnnnnnnnnnnnnnnnnnnnnnnnnnnnnnnnnnnnnnnnnnnnnnnnnnnnnnnnnnnnnnnnnnnnnnnnnnnnnnnnnnnnnnnnnnnnnnnnnnnnnnnnnnnnnnnnnnnnnnnnnnnnnnnnnnnnnnnnnnnnnnnnnnnnnnnnnnnnnnnnnnnnnnnnnnnnnnnnnnnnnnnnnnnnnnnnnnnnnnnnnnnnnnnnnnnnnnnnnnnnnnnnnnnnnnnnnnnnnnnnnnnnnnnnnnnnnnnnnnnnnnnnnnnnnnnnnnnnnnnnnnnnnnnnnnnnnnnnnnnnnnnnnnnnnnnnnnnnnnnnnnnnnnnnnnnnnnnnnnnnnnnnnnnnnnnnnnnnnnnnnnnnnnnnnnnnnnnnnnnnnnnnnnnnnnnnnnnnnnnnnnnnnnnnnnnnnnnnnnnnnnnnnnnnnnnnnnnnnnnnnnnnnnnnnnnnnnnnnnnnnnnnnnnnnnnnnnnnnnnnnnnnnnnnnnnnnnnnnnnnnnnnnnnnnnnnnnnnnnnnnnnnnnnnnnnnnnnnnnnnnnnnnnnnnnnnnnnnnnnnnnnnnnnnnnnnnnnnnnnnnnnnnnnnnnnnnnnnnnnnnnnnnnnnnnnnnnnnnnnnnnnnnnnnnnnnnnnnnnnnnnnnnnnnnnnnnnnnnnnnnnnnnnnnnnnnnnnnnnnnnnnnnnnnnnnnnnnnnnnnnnnnnnnnnnnnnnnnnnnnnnnnnnnnnnnnnnnnnnnnnnnnnnnnnnnnnnnnnnnnnnnnnnnnnnnnnnnnnnnnnnnnnnnnnnnnnnnnnnnnnnnnnnnnnnnnnnnnnnnnnnnnnnnnnnnnnnnnnnnnnnnnnnnnnnnnnnnnnnnnnnnnnnnnnnnnnnnnnnnnnnnnnnnnnnnnnnnnnnnnnnnnnnnnnnnnnnnnnnnnnnnnnnnnnnnnnnnnnnnnnnnnnnnnnnnnnnnnnnnnnnnnnnnnnnnnnnnnnnnnnnnnnnnnnnnnnnnnnnnnnnnnnnnnnnnnnnnnnnnnnnnnnnnnnnnnnnnnnnnnnnnnnnnnnnnnnnnnnnnnnnnnnnnnnnnnnnnnnnnnnnnnnnnnnnnnnnnnnnnnnnnnnnnnnnnnnnnnnnnnnnnnnnnnnnnnnnnnnnnnnnnnnnnnnnnnnnnnnnnnnnnnnnnnnnnnnnnnnnnnnnnnnnnnnnnnnnnnnnnnnnnnnnnnnnnnnnnnnnnnnnnnnnnnnnnnnnnnnnnnnnnnnnnnnnnnnnnnnnnnnnnnnnnnnnnnnnnnnnnnnnnnnnnnnnnnnnnnnnnnnnnnnnnnnnnnnnnnnnnnnnnnnnnnnnnnnnnnnnnnnnnnnnnnnnnnnnnnnnnnnnnnnnnnnnnnnnnnnnnnnnnnnnnnnnnnnnnnnnnnnnnnnnnnnnnnnnnnnnnnnnnnnnnnnnnnnnnnnnnnnnnnnnnnnnnnnnnnnnnnnnnnnnnnnnnnnnnnnnnnnnnnnnnnnnnnnnnnnnnnnnnnnnnnnnnnnnnnnnnnnnnnnnnnnnnnnnnnnnnnnnnnnnnnnnnnnnnnnnnnnnnnnnnnnnnnnnnnnnnnnnnnnnnnnnnnnnnnnnnnnnnnnnnnnnnnnnnnnnnnnnnnnnnnnnnnnnnnnnnnnnnnnnnnnnnnnnnnnnnnnnnnnnnnnnnnnnnnnnnnnnnnnnnnnnnnnnnnnnnnnnnnnnnnnnnnnnnnnnnnnnnnnnnnnnnnnnnnnnnnnnnnnnnnnnnnnnnnnnnnnnnnnnnnnnnnnnnnnnnnnnnnnnnnnnnnnnnnnnnnnnnnnnnnnnnnnnnnnnnnnnnnnnnnnnnnnnnnnnnnnnnnnnnnnnnnnnnnnnnnnnnnnnnnnnnnnnnnnnnnnnnnnnnnnnnnnnnnnnnnnnnnnnnnnnnnnnnnnnnnnnnnnnnnnnnnnnnnnnnnnnnnnnnnnnnnnnnnnnnnnnnnnnnnnnnnnnnnnnnnnnnnnnnnnnnnnnnnnnnnnnnnnnnnnnnnnnnnnnnnnnnnnnnnnnnnnnnnnnnnnnnnnnnnnnnnnnnnnnnnnnnnnnnnnnnnnnnnnnnnnnnnnnnnnnnnnnnnnnnnnnnnnnnnnnnnnnnnnnnnnnnnnnnnnnnnnnnnnnnnnnnnnnnnnnnnnnnnnnnnnnnnnnnnnnnnnnnnnnnnnnnnnnnnnnnnnnnnnnnnnnnnnnnnnnnnnnnnnnnnnnnnnnnnnnnnnnnnnnnnnnnnnnnnnnnnnnnnnnnnnnnnnnnnnnnnnnnnnnnnnnnnnnnnnnnnnnnnnnnnnnnnnnnnnnnnnnnnnnnnnnnnnnnnnnnnnnnnnnnnnnnnnnnnnnnnnnnnnnnnnnnnnnnnnnnnnnnnnnnnnnnnnnnnnnnnnnnnnnnnnnnnnnnnnnnnnnnnnnnnnnnnnnnnnnnnnnnnnnnnnnnnnnnnnnnnnnnnnnnnnnnnnnnnnnnnnnnnnnnnnnnnnnnnnnnnnnnnnnnnnnnnnnnnnnnnnnnnnnnnnnnnnnnnnnnnnnnnnnnnnnnnnnnnnnnnnnnnnnnnnnnnnnnnnnnnnnnnnnnnnnnnnnnnnnnnnnnnnnnnnnnnnnnnnnnnnnnnnnnnnnnnnnnnnnnnnnnnnnnnnnnnnnnnnnnnnnnnnnnnnnnnnnnnnnnnnnnnnnnnnnnnnnnnnnnnnnnnnnnnnnnnnnnnnnnnnnnnnnnnnnnnnnnnnnnnnnnnnnnnnnnnnnnnnnnnnnnnnnnnnnnnnnnnnnnnnnnnnnnnnnnnnnnnnnnnnnnnnnnnnnnnnnnnnnnnnnnnnnnnnnnnnnnnnnnnnnnnnnnnnnnnnnnnnnnnnnnnnnnnnnnnnnnnnnnnnnnnnnnnnnnnnnnnnnnnnnnnnnnnnnnnnnnnnnnnnnnnnnnnnnnnnnnnnnnnnnnnnnnnnnnnnnnnnnnnnnnnnnnnnnnnnnnnnnnnnnnnnnnnnnnnnnnnnnnnnnnnnnnnnnnnnnnnnnnnnnnnnnnnnnnnnnnnnnnnnnnnnnnnnnnnnnnnnnnnnnnnnnnnnnnnnnnnnnnnnnnnnnnnnnnnnnnnnnnnnnnnnnnnnnnnnnnnnnnnnnnnnnnnnnnnnnnnnnnnnnnnnnnnnnnnnnnnnnnnnnnnnnnnnnnnnnnnnnnnnnnnnnnnnnnnnnnnnnnnnnnnnnnnnnnnnnnnnnnnnnnnnnnnnnnnnnnnnnnnnnnnnnnnnnnnnnnnnnnnnnnnnnnnnnnnnnnnnnnnnnnnnnnnnnnnnnnnnnnnnnnnnnnnnnnnnnnnnnnnnnnnnnnnnnnnnnnnnnnnnnnnnnnnnnnnnnnnnnnnnnnnnnnnnnnnnnnnnnnnnnnnnnnnnnnnnnnnnnnnnnnnnnnnnnnnnnnnnnnnnnnnnnnnnnnnnnnnnnnnnnnnnnnnnnnnnnnnnnnnnnnnnnnnnnnnnnnnnnnnnnnnnnnnnnnnnnnnnnnnnnnnnnnnnnnnnnnnnnnnnnnnnnnnnnnnnnnnnnnnnnnnnnnnnnnnnnnnnnnnnnnnnnnnnnnnnnnnnnnnnnnnnnnnnnnnnnnnnnnnnnnnnnnnnnnnnnnnnnnnnnnnnnnnnnnnnnnnnnnnnnnnnnnnnnnnnnnnnnnnnnnnnnnnnnnnnnnnnnnnnnnnnnnnnnnnnnnnnnnnnnnnnnnnnnnnnnnnnnnnnnnnnnnnnnnnnnnnnnnnnnnnnnnnnnnnnnnnnnnnnnnnnnnnnnnnnnnnnnnnnnnnnnnnnnnnnnnnnnnnnnnnnnnnnnnnnnnnnnnnnnnnnnnnnnnnnnnnnnnnnnnnnnnnnnnnnnnnnnnnnnnnnnnnnnnnnnnnnnnnnnnnnnnnnnnnnnnnnnnnnnnnnnnnnnnnnnnnnnnnnnnnnnnnnnnnnnnnnnnnnnnnnnnnnnnnnnnnnnnnnnnnnnnnnnnnnnnnnnnnnnnnnnnnnnnnnnnnnnnnnnnnnnnnnnnnnnnnnnnnnnnnnnnnnnnnnnnnnnnnnnnnnnnnnnnnnnnnnnnnnnnnnnnnnnnnnnnnnnnnnnnnnnnnnnnnnnnnnnnnnnnnnnnnnnnnnnnnnnnnnnnnnnnnnnnnnnnnnnnnnnnnnnnnnnnnnnnnnnnnnnnnnnnnnnnnnnnnnnnnnnnnnnnnnnnnnnnnnnnnnnnnnnnnnnnnnnnnnnnnnnnnnnnnnnnnnnnnnnnnnnnnnnnnnnnnnnnnnnnnnnnnnnnnnnnnnnnnnnnnnnnnnnnnnnnnnnnnnnnnnnnnnnnnnnnnnnnnnnnnnnnnnnnnnnnnnnnnnnnnnnnnnnnnnnnnnnnnnnnnnnnnnnnnnnnnnnnnnnnnnnnnnnnnnnnnnnnnnnnnnnnnnnnnnnnnnnnnnnnnnnnnnnnnnnnnnnnnnnnnnnnnnnnnnnnnnnnnnnnnnnnnnnnnnnnnnnnnnnnnnnnnnnnnnnnnnnnnnnnnnnnnnnnnnnnnnnnnnnnnnnnnnnnnnnnnnnnnnnnnnnnnnnnnnnnnnnnnnnnnnnnnnnnnnnnnnnnnnnnnnnnnnnnnnnnnnnnnnnnnnnnnnnnnnnnnnnnnnnnnnnnnnnnnnnnnnnnnnnnnnnnnnnnnnnnnnnnnnnnnnnnnnnnnnnnnnnnnnnnnnnnnnnnnnnnnnnnnnnnnnnnnnnnnnnnnnnnnnnnnnnnnnnnnnnnnnnnnnnnnnnnnnnnnnnnnnnnnnnnnnnnnnnnnnnnnnnnnnnnnnnnnnnnnnnnnnnnnnnnnnnnnnnnnnnnnnnnnnnnnnnnnnnnnnnnnnnnnnnnnnnnnnnnnnnnnnnnnnnnnnnnnnnnnnnnnnnnnnnnnnnnnnnnnnnnnnnnnnnnnnnnnnnnnnnnnnnnnnnnnnnnnnnnnnnnnnnnnnnnnnnnnnnnnnnnnnnnnnnnnnnnnnnnnnnnnnnnnnnnnnnnnnnnnnnnnnnnnnnnnnnnnnnnnnnnnnnnnnnnnnnnnnnnnnnnnnnnnnnnnnnnnnnnnnnnnnnnnnnnnnnnnnnnnnnnnnnnnnnnnnnnnnnnnnnnnnnnnnnnnnnnnnnnnnnnnnnnnnnnnnnnnnnnnnnnnnnnnnnnnnnnnnnnnnnnnnnnnnnnnnnnnnnnnnnnnnnnnnnnnnnnnnnnnnnnnnnnnnnnnnnnnnnnnnnnnnnnnnnnnnnnnnnnnnnnnnnnnnnnnnnnnnnnnnnnnnnnnnnnnnnnnnnnnnnnnnnnnnnnnnnnnnnnnnnnnnnnnnnnnnnnnnnnnnnnnnnnnnnnnnnnnnnnnnnnnnnnnnnnnnnnnnnnnnnnnnnnnnnnnnnnnnnnnnnnnnnnnnnnnnnnnnnnnnnnnnnnnnnnnnnnnnnnnnnnnnnnnnnnnnnnnnnnnnnnnnnnnnnnnnnnnnnnnnnnnnnnnnnnnnnnnnnnnnnnnnnnnnnnnnnnnnnnnnnnnnnnnnnnnnnnnnnnnnnnnnnnnnnnnnnnnnnnnnnnnnnnnnnnnnnnnnnnnnnnnnnnnnnnnnnnnnnnnnnnnnnnnnnnnnnnnnnnnnnnnnnnnnnnnnnnnnnnnnnnnnnnnnnnnnnnnnnnnnnnnnnnnnnnnnnnnnnnnnnnnnnnnnnnnnnnnnnnnnnnnnnnnnnnnnnnnnnnnnnnnnnnnnnnnnnnnnnnnnnnnnnnnnnnnnnnnnnnnnnnnnnnnnnnnnnnnnnnnnnnnnnnnnnnnnnnnnnnnnnnnnnnnnnnnnnnnnnnnnnnnnnnnnnnnnnnnnnnnnnnnnnnnnnnnnnnnnnnnnnnnnnnnnnnnnnnnnnnnnnnnnnnnnnnnnnnnnnnnnnnnnnnnnnnnnnnnnnnnnnnnnnnnnnnnnnnnnnnnnnnnnnnnnnnnnnnnnnnnnnnnnnnnnnnnnnnnnnnnnnnnnnnnnnnnnnnnnnnnnnnnnnnnnnnnnnnnnnnnnnnnnnnnnnnnnnnnnnnnnnnnnnnnnnnnnnnnnnnnnnnnnnnnnnnnnnnnnnnnnnnnnnnnnnnnnnnnnnnnnnnnnnnnnnnnnnnnnnnnnnnnnnnnnnnnnnnnnnnnnnnnnnnnnnnnnnnnnnnnnnnnnnnnnnnnnnnnnnnnnnnnnnnnnnnnnnnnnnnnnnnnnnnnnnnnnnnnnnnnnnnnnnnnnnnnnnnnnnnnnnnnnnnnnnnnnnnnnnnnnnnnnnnnnnnnnnnnnnnnnnnnnnnnnnnnnnnnnnnnnnnnnnnnnnnnnnnnnnnnnnnnnnnnnnnnnnnnnnnnnnnnnnnnnnnnnnnnnnnnnnnnnnnnnnnnnnnnnnnnnnnnnnnnnnnnnnnnnnnnnnnnnnnnnnnnnnnnnnnnnnnnnnnnnnnnnnnnnnnnnnnnnnnnnnnnnnnnnnnnnnnnnnnnnnnnnnnnnnnnnnnnnnnnnnnnnnnnnnnnnnnnnnnnnnnnnnnnnnnnnnnnnnnnnnnnnnnnnnnnnnnnnnnnnnnnnnnnnnnnnnnnnnnnnnnnnnnnnnnnnnnnnnnnnnnnnnnnnnnnnnnnnnnnnnnnnnnnnnnnnnnnnnnnnnnnnnnnnnnnnnnnnnnnnnnnnnnnnnnnnnnnnnnnnnnnnnnnnnnnnnnnnnnnnnnnnnnnnnnnnnnnnnnnnnnnnnnnnnnnnnnnnnnnnnnnnnnnnnnnnnnnnnnnnnnnnnnnnnnnnnnnnnnnnnnnnnnnnnnnnnnnnnnnnnnnnnnnnnnnnnnnnnnnnnnnnnnnnnnnnnnnnnnnnnnnnnnnnnnnnnnnnnnnnnnnnnnnnnnnnnnnnnnnnnnnnnnnnnnnnnnnnnnnnnnnnnnnnnnnnnnnnnnnnnnnnnnnnnnnnnnnnnnnnnnnnnnnnnnnnnnnnnnnnnnnnnnnnnnnnnnnnnnnnnnnnnnnnnnnnnnnnnnnnnnnnnnnnnnnnnnnnnnnnnnnnnnnnnnnnnnnnnnnnnnnnnnnnnnnnnnnnnnnnnnnnnnnnnnnnnnnnnnnnnnnnnnnnnnnnnnnnnnnnnnnnnnnnnnnnnnnnnnnnnnnnnnnnnnnnnnnnnnnnnnnnnnnnnnnnnnnnnnnnnnnnnnnnnnnnnnnnnnnnnnnnnnnnnnnnnnnnnnnnnnnnnnnnnnnnnnnnnnnnnnnnnnnnnnnnnnnnnnnnnnnnnnnnnnnnnnnnnnnnnnnnnnnnnnnnnnnnnnnnnnnnnnnnnnnnnnnnnnnnnnnnnnnnnnnnnnnnnnnnnnnnnnnnnnnnnnnnnnnnnnnnnnnnnnnnnnnnnnnnnnnnnnnnnnnnnnnnnnnnnnnnnnnnnnnnnnnnnnnnnnnnnnnnnnnnnnnnnnnnnnnnnnnnnnnnnnnnnnnnnnnnnnnnnnnnnnnnnnnnnnnnnnnnnnnnnnnnnnnnnnnnnnnnnnnnnnnnnnnnnnnnnnnnnnnnnnnnnnnnnnnnnnnnnnnnnnnnnnnnnnnnnnnnnnnnnnnnnnnnnnnnnnnnnnnnnnnnnnnnnnnnnnnnnnnnnnnnnnnnnnnnnnnnnnnnnnnnnnnnnnnnnnnnnnnnnnnnnnnnnnnnnnnnnnnnnnnnnnnnnnnnnnnnnnnnnnnnnnnnnnnnnnnnnnnnnnnnnnnnnnnnnnnnnnnnnnnnnnnnnnnnnnnnnnnnnnnnnnnnnnnnnnnnnnnnnnnnnnnnnnnnnnnnnnnnnnnnnnnnnnnnnnnnnnnnnnnnnnnnnnnnnnnnnnnnnnnnnnnnnnnnnnnnnnnnnnnnnnnnnnnnnnnnnnnnnnnnnnnnnnnnnnnnnnnnnnnnnnnnnnnnnnnnnnnnnnnnnnnnnnnnnnnnnnnnnnnnnnnnnnnnnnnnnnnnnnnnnnnnnnnnnnnnnnnnnnnnnnnnnnnnnnnnnnnnnnnnnnnnnnnnnnnnnnnnnnnnnnnnnnnnnnnnnnnnnnnnnnnnnnnnnnnnnnnnnnnnnnnnnnnnnnnnnnnnnnnnnnnnnnnnnnnnnnnnnnnnnnnnnnnnnnnnnnnnnnnnnnnnnnnnnnnnnnnnnnnnnnnnnnnnnnnnnnnnnnnnnnnnnnnnnnnnnnnnnnnnnnnnnnnnnnnnnnnnnnnnnnnnnnnnnnnnnnnnnnnnnnnnnnnnnnnnnnnnnnnnnnnnnnnnnnnnnnnnnnnnnnnnnnnnnnnnnnnnnnnnnnnnnnnnnnnnnnnnnnnnnnnnnnnnnnnnnnnnnnnnnnnnnnnnnnnnnnnnnnnnnnnnnnnnnnnnnnnnnnnnnnnnnnnnnnnnnnnnnnnnnnnnnnnnnnnnnnnnnnnnnnnnnnnnnnnnnnnnnnnnnnnnnnnnnnnnnnnnnnnnnnnnnnnnnnnnnnnnnnnnnnnnnnnnnnnnnnnnnnnnnnnnnnnnnnnnnnnnnnnnnnnnnnnnnnnnnnnnnnnnnnnnnnnnnnnnnnnnnnnnnnnnnnnnnnnnnnnnnnnnnnnnnnnnnnnnnnnnnnnnnnnnnnnnnnnnnnnnnnnnnnnnnnnnnnnnnnnnnnnnnnnnnnnnnnnnnnnnnnnnnnnnnnnnnnnnnnnnnnnnnnnnnnnnnnnnnnnnnnnnnnnnnnnnnnnnnnnnnnnnnnnnnnnnnnnnnnnnnnnnnnnnnnnnnnnnnnnnnnnnnnnnnnnnnnnnnnnnnnnnnnnnnnnnnnnnnnnnnnnnnnnnnnnnnnnnnnnnnnnnnnnnnnnnnnnnnnnnnnnnnnnnnnnnnnnnnnnnnnnnnnnnnnnnnnnnnnnnnnnnnnnnnnnnnnnnnnnnnnnnnnnnnnnnnnnnnnnnnnnnnnnnnnnnnnnnnnnnnnnnnnnnnnnnnnnnnnnnnnnnnnnnnnnnnnnnnnnnnnnnnnnnnnnnnnnnnnnnnnnnnnnnnnnnnnnnnnnnnnnnnnnnnnnnnnnnnnnnnnnnnnnnnnnnnnnnnnnnnnnnnnnnnnnnnnnnnnnnnnnnnnnnnnnnnnnnnnnnnnnnnnnnnnnnnnnnnnnnnnnnnnnnnnnnnnnnnnnnnnnnnnnnnnnnnnnnnnnnnnnnnnnnnnnnnnnnnnnnnnnnnnnnnnnnnnnnnnnnnnnnnnnnnnnnnnnnnnnnnnnnnnnnnnnnnnnnnnnnnnnnnnnnnnnnnnnnnnnnnnnnnnnnnnnnnnnnnnnnnnnnnnnnnnnnnnnnnnnnnnnnnnnnnnnnnnnnnnnnnnnnnnnnnnnnnnnnnnnnnnnnnnnnnnnnnnnnnnnnnnnnnnnnnnnnnnnnnnnnnnnnnnnnnnnnnnnnnnnnnnnnnnnnnnnnnnnnnnnnnnnnnnnnnnnnnnnnnnnnnnnnnnnnnnnnnnnnnnnnnnnnnnnnnnnnnnnnnnnnnnnnnnnnnnnnnnnnnnnnnnnnnnnnnnnnnnnnnnnnnnnnnnnnnnnnnnnnnnnnnnnnnnnnnnnnnnnnnnnnnnnnnnnnnnnnnnnnnnnnnnnnnnnnnnnnnnnnnnnnnnnnnnnnnnnnnnnnnnnnnnnnnnnnnnnnnnnnnnnnnnnnnnnnnnnnnnnnnnnnnnnnnnnnnnnnnnnnnnnnnnnnnnnnnnnnnnnnnnnnnnnnnnnnnnnnnnnnnnnnnnnnnnnnnnnnnnnnnnnnnnnnnnnnnnnnnnnnnnnnnnnnnnnnnnnnnnnnnnnnnnnnnnnnnnnnnnnnnnnnnnnnnnnnnnnnnnnnnnnnnnnnnnnnnnnnnnnnnnnnnnnnnnnnnnnnnnnnnnnnnnnnnnnnnnnnnnnnnnnnnnnnnnnnnnnnnnnnnnnnnnnnnnnnnnnnnnnnnnnnnnnnnnnnnnnnnnnnnnnnnnnnnnnnnnnnnnnnnnnnnnnnnnnnnnnnnnnnnnnnnnnnnnnnnnnnnnnnnnnnnnnnnnnnnnnnnnnnnnnnnnnnnnnnnnnnnnnnnnnnnnnnnnnnnnnnnnnnnnnnnnnnnnnnnnnnnnnnnnnnnnnnnnnnnnnnnnnnnnnnnnnnnnnnnnnnnnnnnnnnnnnnnnnnnnnnnnnnnnnnnnnnnnnnnnnnnnnnnnnnnnnnnnnnnnnnnnnnnnnnnnnnnnnnnnnnnnnnnnnnnnnnnnnnnnnnnnnnnnnnnnnnnnnnnnnnnnnnnnnnnnnnnnnnnnnnnnnnnnnnnnnnnnnnnnnnnnnnnnnnnnnnnnnnnnnnnnnnnnnnnnnnnnnnnnnnnnnnnnnnnnnnnnnnnnnnnnnnnnnnnnnnnnnnnnnnnnnnnnnnnnnnnnnnnnnnnnnnnnnnnnnnnnnnnnnnnnnnnnnnnnnnnnnnnnnnnnnnnnnnnnnnnnnnnnnnnnnnnnnnnnnnnnnnnnnnnnnnnnnnnnnnnnnnnnnnnnnnnnnnnnnnnnnnnnnnnnnnnnnnnnnnnnnnnnnnnnnnnnnnnnnnnnnnnnnnnnnnnnnnnnnnnnnnnnnnnnnnnnnnnnnnnnnnnnnnnnnnnnnnnnnnnnnnnnnnnnnnnnnnnnnnnnnnnnnnnnnnnnnnnnnnnnnnnnnnnnnnnnnnnnnnnnnnnnnnnnnnnnnnnnnnnnnnnnnnnnnnnnnnnnnnnnnnnnnnnnnnnnnnnnnnnnnnnnnnnnnnnnnnnnnnnnnnnnnnnnnnnnnnnnnnnnnnnnnnnnnnnnnnnnnnnnnnnnnnnnnnnnnnnnnnnnnnnnnnnnnnnnnnnnnnnnnnnnnnnnnnnnnnnnnnnnnnnnnnnnnnnnnnnnnnnnnnnnnnnnnnnnnnnnnnnnnnnnnnnnnnnnnnnnnnnnnnnnnnnnnnnnnnnnnnnnnnnnnnnnnnnnnnnnnnnnnnnnnnnnnnnnnnnnnnnnnnnnnnnnnnnnnnnnnnnnnnnnnnnnnnnnnnnnnnnnnnnnnnnnnnnnnnnnnnnnnnnnnnnnnnnnnnnnnnnnnnnnnnnnnnnnnnnnnnnnnnnnnnnnnnnnnnnnnnnnnnnnnnnnnnnnnnnnnnnnnnnnnnnnnnnnnnnnnnnnnnnnnnnnnnnnnnnnnnnnnnnnnnnnnnnnnnnnnnnnnnnnnnnnnnnnnnnnnnnnnnnnnnnnnnnnnnnnnnnnnnnnnnnnnnnnnnnnnnnnnnnnnnnnnnnnnnnnnnnnnnnnnnnnnnnnnnnnnnnnnnnnnnnnnnnnnnnnnnnnnnnnnnnnnnnnnnnnnnnnnnnnnnnnnnnnnnnnnnnnnnnnnnnnnnnnnnnnnnnnnnnnnnnnnnnnnnnnnnnnnnnnnnnnnnnnnnnnnnnnnnnnnnnnnnnnnnnnnnnnnnnnnnnnnnnnnnnnnnnnnnnnnnnnnnnnnnnnnnnnnnnnnnnnnnnnnnnnnnnnnnnnnnnnnnnnnnnnnnnnnnnnnnnnnnnnnnnnnnnnnnnnnnnnnnnnnnnnnnnnnnnnnnnnnnnnnnnnnnnnnnnnnnnnnnnnnnnnnnnnnnnnnnnnnnnnnnnnnnnnnnnnnnnnnnnnnnnnnnnnnnnnnnnnnnnnnnnnnnnnnnnnnnnnnnnnnnnnnnnnnnnnnnnnnnnnnnnnnnnnnnnnnnnnnnnnnnnnnnnnnnnnnnnnnnnnnnnnnnnnnnnnnnnnnnnnnnnnnnnnnnnnnnnnnnnnnnnnnnnnnnnnnnnnnnnnnnnnnnnnnnnnnnnnnnnnnnnnnnnnnnnnnnnnnnnnnnnnnnnnnnnnnnnnnnnnnnnnnnnnnnnnnnnnnnnnnnnnnnnnnnnnnnnnnnnnnnnnnnnnnnnnnnnnnnnnnnnnnnnnnnnnnnnnnnnnnnnnnnnnnnnnnnnnnnnnnnnnnnnnnnnnnnnnnnnnnnnnnnnnnnnnnnnnnnnnnnnnnnnnnnnnnnnnnnnnnnnnnnnnnnnnnnnnnnnnnnnnnnnnnnnnnnnnnnnnnnnnnnnnnnnnnnnnnnnnnnnnnnnnnnnnnnnnnnnnnnnnnnnnnnnnnnnnnnnnnnnnnnnnnnnnnnnnnnnnnnnnnnnnnnnnnnnnnnnnnnnnnnnnnnnnnnnnnnnnnnnnnnnnnnnnnnnnnnnnnnnnnnnnnnnnnnnnnnnnnnnnnnnnnnnnnnnnnnnnnnnnnnnnnnnnnnnnnnnnnnnnnnnnnnnnnnnnnnnnnnnnnnnnnnnnnnnnnnnnnnnnnnnnnnnnnnnnnnnnnnnnnnnnnnnnnnnnnnnnnnnnnnnnnnnnnnnnnnnnnnnnnnnnnnnnnnnnnnnnnnnnnnnnnnnnnnnnnnnnnnnnnnnnnnnnnnnnnnnnnnnnnnnnnnnnnnnnnnnnnnnnnnnnnnnnnnnnnnnnnnnnnnnnnnnnnnnnnnnnnnnnnnnnnnnnnnnnnnnnnnnnnnnnnnnnnnnnnnnnnnnnnnnnnnnnnnnnnnnnnnnnnnnnnnnnnnnnnnnnnnnnnnnnnnnnnnnnnnnnnnnnnnnnnnnnnnnnnnnnnnnnnnnnnnnnnnnnnnnnnnnnnnnnnnnnnnnnnnnnnnnnnnnnnnnnnnnnnnnnnnnnnnnnnnnnnnnnnnnnnnnnnnnnnnnnnnnnnnnnnnnnnnnnnnnnnnnnnnnnnnnnnnnnnnnnnnnnnnnnnnnnnnnnnnnnnnnnnnnnnnnnnnnnnnnnnnnnnnnnnnnnnnnnnnnnnnnnnnnnnnnnnnnnnnnnnnnnnnnnnnnnnnnnnnnnnnnnnnnnnnnnnnnnnnnnnnnnnnnnnnnnnnnnnnnnnnnnnnnnnnnnnnnnnnnnnnnnnnnnnnnnnnnnnnnnnnnnnnnnnnnnnnnnnnnnnnnnnnnnnnnnnnnnnnnnnnnnnnnnnnnnnnnnnnnnnnnnnnnnnnnnnnnnnnnnnnnnnnnnnnnnnnnnnnnnnnnnnnnnnnnnnnnnnnnnnnnnnnnnnnnnnnnnnnnnnnnnnnnnnnnnnnnnnnnnnnnnnnnnnnnnnnnnnnnnnnnnnnnnnnnnnnnnnnnnnnnnnnnnnnnnnnnnnnnnnnnnnnnnnnnnnnnnnnnnnnnnnnnnnnnnnnnnnnnnnnnnnnnnnnnnnnnnnnnnnnnnnnnnnnnnnnnnnnnnnnnnnnnnnnnnnnnnnnnnnnnnnnnnnnnnnnnnnnnnnnnnnnnnnnnnnnnnnnnnnnnnnnnnnnnnnnnnnnnnnnnnnnnnnnnnnnnnnnnnnnnnnnnnnnnnnnnnnnnnnnnnnnnnnnnnnnnnnnnnnnnnnnnnnnnnnnnnnnnnnnnnnnnnnnnnnnnnnnnnnnnnnnnnnnnnnnnnnnnnnnnnnnnnnnnnnnnnnnnnnnnnnnnnnnnnnnnnnnnnnnnnnnnnnnnnnnnnnnnnnnnnnnnnnnnnnnnnnnnnnnnnnnnnnnnnnnnnnnnnnnnnnnnnnnnnnnnnnnnnnnnnnnnnnnnnnnnnnnnnnnnnnnnnnnnnnnnnnnnnnnnnnnnnnnnnnnnnnnnnnnnnnnnnnnnnnnnnnnnnnnnnnnnnnnnnnnnnnnnnnnnnnnnnnnnnnnnnnnnnnnnnnnnnnnnnnnnnnnnnnnnnnnnnnnnnnnnnnnnnnnnnnnnnnnnnnnnnnnnnnnnnnnnnnnnnnnnnnnnnnnnnnnnnnnnnnnnnnnnnnnnnnnnnnnnnnnnnnnnnnnnnnnnnnnnnnnnnnnnnnnnnnnnnnnnnnnnnnnnnnnnnnnnnnnnnnnnnnnnnnnnnnnnnnnnnnnnnnnnnnnnnnnnnnnnnnnnnnnnnnnnnnnnnnnnnnnnnnnnnnnnnnnnnnnnnnnnnnnnnnnnnnnnnnnnnnnnnnnnnnnnnnnnnnnnnnnnnnnnnnnnnnnnnnnnnnnnnnnnnnnnnnnnnnnnnnnnnnnnnnnnnnnnnnnnnnnnnnnnnnnnnnnnnnnnnnnnnnnnnnnnnnnnnnnnnnnnnnnnnnnnnnnnnnnnnnnnnnnnnnnnnnnnnnnnnnnnnnnnnnnnnnnnnnnnnnnnnnnnnnnnnnnnnnnnnnnnnnnnnnnnnnnnnnnnnnnnnnnnnnnnnnnnnnnnnnnnnnnnnnnnnnnnnnnnnnnnnnnnnnnnnnnnnnnnnnnnnnnnnnnnnnnnnnnnnnnnnnnnnnnnnnnnnnnnnnnnnnnnnnnnnnnnnnnnnnnnnnnnnnnnnnnnnnnnnnnnnnnnnnnnnnnnnnnnnnnnnnnnnnnnnnnnnnnnnnnnnnnnnnnnnnnnnnnnnnnnnnnnnnnnnnnnnnnnnnnnnnnnnnnnnnnnnnnnnnnnnnnnnnnnnnnnnnnnnnnnnnnnnnnnnnnnnnnnnnnnnnnnnnnnnnnnnnnnnnnnnnnnnnnnnnnnnnnnnnnnnnnnnnnnnnnnnnnnnnnnnnnnnnnnnnnnnnnnnnnnnnnnnnnnnnnnnnnnnnnnnnnnnnnnnnnnnnnnnnnnnnnnnnnnnnnnnnnnnnnnnnnnnnnnnnnnnnnnnnnnnnnnnnnnnnnnnnnnnnnnnnnnnnnnnnnnnnnnnnnnnnnnnnnnnnnnnnnnnnnnnnnnnnnnnnnnnnnnnnnnnnnnnnnnnnnnnnnnnnnnnnnnnnnnnnnnnnnnnnnnnnnnnnnnnnnnnnnnnnnnnnnnnnnnnnnnnnnnnnnnnnnnnnnnnnnnnnnnnnnnnnnnnnnnnnnnnnnnnnnnnnnnnnnnnnnnnnnnnnnnnnnnnnnnnnnnnnnnnnnnnnnnnnnnnnnnnnnnnnnnnnnnnnnnnnnnnnnnnnnnnnnnnnnnnnnnnnnnnnnnnnnnnnnnnnnnnnnnnnnnnnnnnnnnnnnnnnnnnnnnnnnnnnnnnnnnnnnnnnnnnnnnnnnnnnnnnnnnnnnnnnnnnnnnnnnnnnnnnnnnnnnnnnnnnnnnnnnnnnnnnnnnnnnnnnnnnnnnnnnnnnnnnnnnnnnnnnnnnnnnnnnnnnnnnnnnnnnnnnnnnnnnnnnnnnnnnnnnnnnnnnnnnnnnnnnnnnnnnnnnnnnnnnnnnnnnnnnnnnnnnnnnnnnnnnnnnnnnnnnnnnnnnnnnnnnnnnnnnnnnnnnnnnnnnnnnnnnnnnnnnnnnnnnnnnnnnnnnnnnnnnnnnnnnnnnnnnnnnnnnnnnnnnnnnnnnnnnnnnnnnnnnnnnnnnnnnnnnnnnnnnnnnnnnnnnnnnnnnnnnnnnnnnnnnnnnnnnnnnnnnnnnnnnnnnnnnnnnnnnnnnnnnnnnnnnnnnnnnnnnnnnnnnnnnnnnnnnnnnnnnnnnnnnnnnnnnnnnnnnnnnnnnnnnnnnnnnnnnnnnnnnnnnnnnnnnnnnnnnnnnnnnnnnnnnnnnnnnnnnnnnnnnnnnnnnnnnnnnnnnnnnnnnnnnnnnnnnnnnnnnnnnnnnnnnnnnnnnnnnnnnnnnnnnnnnnnnnnnnnnnnnnnnnnnnnnnnnnnnnnnnnnnnnnnnnnnnnnnnnnnnnnnnnnnnnnnnnnnnnnnnnnnnnnnnnnnnnnnnnnnnnnnnnnnnnnnnnnnnnnnnnnnnnnnnnnnnnnnnnnnnnnnnnnnnnnnnnnnnnnnnnnnnnnnnnnnnnnnnnnnnnnnnnnnnnnnnnnnnnnnnnnnnnnnnnnnnnnnnnnnnnnnnnnnnnnnnnnnnnnnnnnnnnnnnnnnnnnnnnnnnnnnnnnnnnnnnnnnnnnnnnnnnnnnnnnnnnnnnnnnnnnnnnnnnnnnnnnnnnnnnnnnnnnnnnnnnnnnnnnnnnnnnnnnnnnnnnnnnnnnnnnnnnnnnnnnnnnnnnnnnnnnnnnnnnnnnnnnnnnnnnnnnnnnnnnnnnnnnnnnnnnnnnnnnnnnnnnnnnnnnnnnnnnnnnnnnnnnnnnnnnnnnnnnnnnnnnnnnnnnnnnnnnnnnnnnnnnnnnnnnnnnnnnnnnnnnnnnnnnnnnnnnnnnnnnnnnnnnnnnnnnnnnnnnnnnnnnnnnnnnnnnnnnnnnnnnnnnnnnnnnnnnnnnnnnnnnnnnnnnnnnnnnnnnnnnnnnnnnnnnnnnnnnnnnnnnnnnnnnnnnnnnnnnnnnnnnnnnnnnnnnnnnnnnnnnnnnnnnnnnnnnnnnnnnnnnnnnnnnnnnnnnnnnnnnnnnnnnnnnnnnnnnnnnnnnnnnnnnnnnnnnnnnnnnnnnnnnnnnnnnnnnnnnnnnnnnnnnnnnnnnnnnnnnnnnnnnnnnnnnnnnnnnnnnnnnnnnnnnnnnnnnnnnnnnnnnnnnnnnnnnnnnnnnnnnnnnnnnnnnnnnnnnnnnnnnnnnnnnnnnnnnnnnnnnnnnnnnnnnnnnnnnnnnnnnnnnnnnnnnnnnnnnnnnnnnnnnnnnnnnnnnnnnnnnnnnnnnnnnnnnnnnnnnnnnnnnnnnnnnnnnnnnnnnnnnnnnnnnnnnnnnnnnnnnnnnnnnnnnnnnnnnnnnnnnnnnnnnnnnnnnnnnnnnnnnnnnnnnnnnnnnnnnnnnnnnnnnnnnnnnnnnnnnnnnnnnnnnnnnnnnnnnnnnnnnnnnnnnnnnnnnnnnnnnnnnnnnnnnnnnnnnnnnnnnnnnnnnnnnnnnnnnnnnnnnnnnnnnnnnnnnnnnnnnnnnnnnnnnnnnnnnnnnnnnnnnnnnnnnnnnnnnnnnnnnnnnnnnnnnnnnnnnnnnnnnnnnnnnnnnnnnnnnnnnnnnnnnnnnnnnnnnnnnnnnnnnnnnnnnnnnnnnnnnnnnnnnnnnnnnnnnnnnnnnnnnnnnnnnnnnnnnnnnnnnnnnnnnnnnnnnnnnnnnnnnnnnnnnnnnnnnnnnnnnnnnnnnnnnnnnnnnnnnnnnnnnnnnnnnnnnnnnnnnnnnnnnnnnnnnnnnnnnnnnnnnnnnnnnnnnnnnnnnnnnnnnnnnnnnnnnnnnnnnnnnnnnnnnnnnnnnnnnnnnnnnnnnnnnnnnnnnnnnnnnnnnnnnnnnnnnnnnnnnnnnnnnnnnnnnnnnnnnnnnnnnnnnnnnnnnnnnnnnnnnnnnnnnnnnnnnnnnnnnnnnnnnnnnnnnnnnnnnnnnnnnnnnnnnnnnnnnnnnnnnnnnnnnnnnnnnnnnnnnnnnnnnnnnnnnnnnnnnnnnnnnnnnnnnnnnnnnnnnnnnnnnnnnnnnnnnnnnnnnnnnnnnnnnnnnnnnnnnnnnnnnnnnnnnnnnnnnnnnnnnnnnnnnnnnnnnnnnnnnnnnnnnnnnnnnnnnnnnnnnnnnnnnnnnnnnnnnnnnnnnnnnnnnnnnnnnnnnnnnnnnnnnnnnnnnnnnnnnnnnnnnnnnnnnnnnnnnnnnnnnnnnnnnnnnnnnnnnnnnnnnnnnnnnnnnnnnnnnnnnnnnnnnnnnnnnnnnnnnnnnnnnnnnnnnnnnnnnnnnnnnnnnnnnnnnnnnnnnnnnnnnnnnnnnnnnnnnnnnnnnnnnnnnnnnnnnnnnnnnnnnnnnnnnnnnnnnnnnnnnnnnnnnnnnnnnnnnnnnnnnnnnnnnnnnnnnnnnnnnnnnnnnnnnnnnnnnnnnnnnnnnnnnnnnnnnnnnnnnnnnnnnnnnnnnnnnnnnnnnnnnnnnnnnnnnnnnnnnnnnnnnnnnnnnnnnnnnnnnnnnnnnnnnnnnnnnnnnnnnnnnnnnnnnnnnnnnnnnnnnnnnnnnnnnnnnnnnnnnnnnnnnnnnnnnnnnnnnnnnnnnnnnnnnnnnnnnnnnnnnnnnnnnnnnnnnnnnnnnnnnnnnnnnnnnnnnnnnnnnnnnnnnnnnnnnnnnnnnnnnnnnnnnnnnnnnnnnnnnnnnnnnnnnnnnnnnnnnnnnnnnnnnnnnnnnnnnnnnnnnnnnnnnnnnnnnnnnnnnnnnnnnnnnnnnnnnnnnnnnnnnnnnnnnnnnnnnnnnnnnnnnnnnnnnnnnnnnnnnnnnnnnnnnnnnnnnnnnnnnnnnnnnnnnnnnnnnnnnnnnnnnnnnnnnnnnnnnnnnnnnnnnnnnnnnnnnnnnnnnnnnnnnnnnnnnnnnnnnnnnnnnnnnnnnnnnnnnnnnnnnnnnnnnnnnnnnnnnnnnnnnnnnnnnnnnnnnnnnnnnnnnnnnnnnnnnnnnnnnnnnnnnnnnnnnnnnnnnnnnnnnnnnnnnnnnnnnnnnnnnnnnnnnnnnnnnnnnnnnnnnnnnnnnnnnnnnnnnnnnnnnnnnnnnnnnnnnnnnnnnnnnnnnnnnnnnnnnnnnnnnnnnnnnnnnnnnnnnnnnnnnnnnnnnnnnnnnnnnnnnnnnnnnnnnnnnnnnnnnnnnnnnnnnnnnnnnnnnnnnnnnnnnnnnnnnnnnnnnnnnnnnnnnnnnnnnnnnnnnnnnnnnnnnnnnnnnnnnnnnnnnnnnnnnnnnnnnnnnnnnnnnnnnnnnnnnnnnnnnnnnnnnnnnnnnnnnnnnnnnnnnnnnnnnnnnnnnnnnnnnnnnnnnnnnnnnnnnnnnnnnnnnnnnnnnnnnnnnnnnnnnnnnnnnnnnnnnnnnnnnnnnnnnnnnnnnnnnnnnnnnnnnnnnnnnnnnnnnnnnnnnnnnnnnnnnnnnnnnnnnnnnnnnnnnnnnnnnnnnnnnnnnnnnnnnnnnnnnnnnnnnnnnnnnnnnnnnnnnnnnnnnnnnnnnnnnnnnnnnnnnnnnnnnnnnnnnnnnnnnnnnnnnnnnnnnnnnnnnnnnnnnnnnnnnnnnnnnnnnnnnnnnnnnnnnnnnnnnnnnnnnnnnnnnnnnnnnnnnnnnnnnnnnnnnnnnnnnnnnnnnnnnnnnnnnnnnnnnnnnnnnnnnnnnnnnnnnnnnnnnnnnnnnnnnnnnnnnnnnnnnnnnnnnnnnnnnnnnnnnnnnnnnnnnnnnnnnnnnnnnnnnnnnnnnnnnnnnnnnnnnnnnnnnnnnnnnnnnnnnnnnnnnnnnnnnnnnnnnnnnnnnnnnnnnnnnnnnnnnnnnnnnnnnnnnnnnnnnnnnnnnnnnnnnnnnnnnnnnnnnnnnnnnnnnnnnnnnnnnnnnnnnnnnnnnnnnnnnnnnnnnnnnnnnnnnnnnnnnnnnnnnnnnnnnnnnnnnnnnnnnnnnnnnnnnnnnnnnnnnnnnnnnnnnnnnnnnnnnnnnnnnnnnnnnnnnnnnnnnnnnnnnnnnnnnnnnnnnnnnnnnnnnnnnnnnnnnnnnnnnnnnnnnnnnnnnnnnnnnnnnnnnnnnnnnnnnnnnnnnnnnnnnnnnnnnnnnnnnnnnnnnnnnnnnnnnnnnnnnnnnnnnnnnnnnnnnnnnnnnnnnnnnnnnnnnnnnnnnnnnnnnnnnnnnnnnnnnnnnnnnnnnnnnnnnnnnnnnnnnnnnnnnnnnnnnnnnnnnnnnnnnnnnnnnnnnnnnnnnnnnnnnnnnnnnnnnnnnnnnnnnnnnnnnnnnnnnnnnnnnnnnnnnnnnnnnnnnnnnnnnnnnnnnnnnnnnnnnnnnnnnnnnnnnnnnnnnnnnnnnnnnnnnnnnnnnnnnnnnnnnnnnnnnnnnnnnnnnnnnnnnnnnnnnnnnnnnnnnnnnnnnnnnnnnnnnnnnnnnnnnnnnnnnnnnnnnnnnnnnnnnnnnnnnnnnnnnnnnnnnnnnnnnnnnnnnnnnnnnnnnnnnnnnnnnnnnnnnnnnnnnnnnnnnnnnnnnnnnnnnnnnnnnnnnnnnnnnnnnnnnnnnnnnnnnnnnnnnnnnnnnnnnnnnnnnnnnnnnnnnnnnnnnnnnnnnnnnnnnnnnnnnnnnnnnnnnnnnnnnnnnnnnnnnnnnnnnnnnnnnnnnnnnnnnnnnnnnnnnnnnnnnnnnnnnnnnnnnnnnnnnnnnnnnnnnnnnnnnnnnnnnnnnnnnnnnnnnnnnnnnnnnnnnnnnnnnnnnnnnnnnnnnnnnnnnnnnnnnnnnnnnnnnnnnnnnnnnnnnnnnnnnnnnnnnnnnnnnnnnnnnnnnnnnnnnnnnnnnnnnnnnnnnnnnnnnnnnnnnnnnnnnnnnnnnnnnnnnnnnnnnnnnnnnnnnnnnnnnnnnnnnnnnnnnnnnnnnnnnnnnnnnnnnnnnnnnnnnnnnnnnnnnnnnnnnnnnnnnnnnnnnnnnnnnnnnnnnnnnnnnnnnnnnnnnnnnnnnnnnnnnnnnnnnnnnnnnnnnnnnnnnnnnnnnnnnnnnnnnnnnnnnnnnnnnnnnnnnnnnnnnnnnnnnnnnnnnnnnnnnnnnnnnnnnnnnnnnnnnnnnnnnnnnnnnnnnnnnnnnnnnnnnnnnnnnnnnnnnnnnnnnnnnnnnnnnnnnnnnnnnnnnnnnnnnnnnnnnnnnnnnnnnnnnnnnnnnnnnnnnnnnnnnnnnnnnnnnnnnnnnnnnnnnnnnnnnnnnnnnnnnnnnnnnnnnnnnnnnnnnnnnnnnnnnnnnnnnnnnnnnnnnnnnnnnnnnnnnnnnnnnnnnnnnnnnnnnnnnnnnnnnnnnnnnnnnnnnnnnnnnnnnnnnnnnnnnnnnnnnnnnnnnnnnnnnnnnnnnnnnnnnnnnnnnnnnnnnnnnnnnnnnnnnnnnnnnnnnnnnnnnnnnnnnnnnnnnnnnnnnnnnnnnnnnnnnnnnnnnnnnnnnnnnnnnnnnnnnnnnnnnnnnnnnnnnnnnnnnnnnnnnnnnnnnnnnnnnnnnnnnnnnnnnnnnnnnnnnnnnnnnnnnnnnnnnnnnnnnnnnnnnnnnnnnnnnnnnnnnnnnnnnnnnnnnnnnnnnnnnnnnnnnnnnnnnnnnnnnnnnnnnnnnnnnnnnnnnnnnnnnnnnnnnnnnnnnnnnnnnnnnnnnnnnnnnnnnnnnnnnnnnnnnnnnnnnnnnnnnnnnnnnnnnnnnnnnnnnnnnnnnnnnnnnnnnnnnnnnnnnnnnnnnnnnnnnnnnnnnnnnnnnnnnnnnnnnnnnnnnnnnnnnnnnnnnnnnnnnnnnnnnnnnnnnnnnnnnnnnnnnnnnnnnnnnnnnnnnnnnnnnnnnnnnnnnnnnnnnnnnnnnnnnnnnnnnnnnnnnnnnnnnnnnnnnnnnnnnnnnnnnnnnnnnnnnnnnnnnnnnnnnnnnnnnnnnnnnnnnnnnnnnnnnnnnnnnnnnnnnnnnnnnnnnnnnnnnnnnnnnnnnnnnnnnnnnnnnnnnnnnnnnnnnnnnnnnnnnnnnnnnnnnnnnnnnnnnnnnnnnnnnnnnnnnnnnnnnnnnnnnnnnnnnnnnnnnnnnnnnnnnnnnnnnnnnnnnnnnnnnnnnnnnnnnnnnnnnnnnnnnnnnnnnnnnnnnnnnnnnnnnnnnnnnnnnnnnnnnnnnnnnnnnnnnnnnnnnnnnnnnnnnnnnnnnnnnnnnnnnnnnnnnnnnnnnnnnnnnnnnnnnnnnnnnnnnnnnnnnnnnnnnnnnnnnnnnnnnnnnnnnnnnnnnnnnnnnnnnnnnnnnnnnnnnnnnnnnnnnnnnnnnnnnnnnnnnnnnnnnnnnnnnnnnnnnnnnnnnnnnnnnnnnnnnnnnnnnnnnnnnnnnnnnnnnnnnnnnnnnnnnnnnnnnnnnnnnnnnnnnnnnnnnnnnnnnnnnnnnnnnnnnnnnnnnnnnnnnnnnnnnnnnnnnnnnnnnnnnnnnnnnnnnnnnnnnnnnnnnnnnnnnnnnnnnnnnnnnnnnnnnnnnnnnnnnnnnnnnnnnnnnnnnnnnnnnnnnnnnnnnnnnnnnnnnnnnnnnnnnnnnnnnnnnnnnnnnnnnnnnnnnnnnnnnnnnnnnnnnnnnnnnnnnnnnnnnnnnnnnnnnnnnnnnnnnnnnnnnnnnnnnnnnnnnnnnnnnnnnnnnnnnnnnnnnnnnnnnnnnnnnnnnnnnnnnnnnnnnnnnnnnnnnnnnnnnnnnnnnnnnnnnnnnnnnnnnnnnnnnnnnnnnnnnnnnnnnnnnnnnnnnnnnnnnnnnnnnnnnnnnnnnnnnnnnnnnnnnnnnnnnnnnnnnnnnnnnnnnnnnnnnnnnnnnnnnnnnnnnnnnnnnnnnnnnnnnnnnnnnnnnnnnnnnnnnnnnnnnnnnnnnnnnnnnnnnnnnnnnnnnnnnnnnnnnnnnnnnnnnnnnnnnnnnnnnnnnnnnnnnnnnnnnnnnnnnnnnnnnnnnnnnnnnnnnnnnnnnnnnnnnnnnnnnnnnnnnnnnnnnnnnnnnnnnnnnnnnnnnnnnnnnnnnnnnnnnnnnnnnnnnnnnnnnnnnnnnnnnnnnnnnnnnnnnnnnnnnnnnnnnnnnnnnnnnnnnnnnnnnnnnnnnnnnnnnnnnnnnnnnnnnnnnnnnnnnnnnnnnnnnnnnnnnnnnnnnnnnnnnnnnnnnnnnnnnnnnnnnnnnnnnnnnnnnnnnnnnnnnnnnnnnnnnnnnnnnnnnnnnnnnnnnnnnnnnnnnnnnnnnnnnnnnnnnnnnnnnnnnnnnnnnnnnnnnnnnnnnnnnnnnnnnnnnnnnnnnnnnnnnnnnnnnnnnnnnnnnnnnnnnnnnnnnnnnnnnnnnnnnnnnnnnnnnnnnnnnnnnnnnnnnnnnnnnnnnnnnnnnnnnnnnnnnnnnnnnnnnnnnnnnnnnnnnnnnnnnnnnnnnnnnnnnnnnnnnnnnnnnnnnnnnnnnnnnnnnnnnnnnnnnnnnnnnnnnnnnnnnnnnnnnnnnnnnnnnnnnnnnnnnnnnnnnnnnnnnnnnnnnnnnnnnnnnnnnnnnnnnnnnnnnnnnnnnnnnnnnnnnnnnnnnnnnnnnnnnnnnnnnnnnnnnnnnnnnnnnnnnnnnnnnnnnnnnnnnnnnnnnnnnnnnnnnnnnnnnnnnnnnnnnnnnnnnnnnnnnnnnnnnnnnnnnnnnnnnnnnnnnnnnnnnnnnnnnnnnnnnnnnnnnnnnnnnnnnnnnnnnnnnnnnnnnnnnnnnnnnnnnnnnnnnnnnnnnnnnnnnnnnnnnnnnnnnnnnnnnnnnnnnnnnnnnnnnnnnnnnnnnnnnnnnnnnnnnnnnnnnnnnnnnnnnnnnnnnnnnnnnnnnnnnnnnnnnnnnnnnnnnnnnnnnnnnnnnnnnnnnnnnnnnnnnnnnnnnnnnnnnnnnnnnnnnnnnnnnnnnnnnnnnnnnnnnnnnnnnnnnnnnnnnnnnnnnnnnnnnnnnnnnnnnnnnnnnnnnnnnnnnnnnnnnnnnnnnnnnnnnnnnnnnnnnnnnnnnnnnnnnnnnnnnnnnnnnnnnnnnnnnnnnnnnnnnnnnnnnnnnnnnnnnnnnnnnnnnnnnnnnnnnnnnnnnnnnnnnnnnnnnnnnnnnnnnnnnnnnnnnnnnnnnnnnnnnnnnnnnnnnnnnnnnnnnnnnnnnnnnnnnnnnnnnnnnnnnnnnnnnnnnnnnnnnnnnnnnnnnnnnnnnnnnnnnnnnnnnnnnnnnnnnnnnnnnnnnnnnnnnnnnnnnnnnnnnnnnnnnnnnnnnnnnnnnnnnnnnnnnnnnnnnnnnnnnnnnnnnnnnnnnnnnnnnnnnnnnnnnnnnnnnnnnnnnnnnnnnnnnnnnnnnnnnnnnnnnnnnnnnnnnnnnnnnnnnnnnnnnnnnnnnnnnnnnnnnnnnnnnnnnnnnnnnnnnnnnnnnnnnnnnnnnnnnnnnnnnnnnnnnnnnnnnnnnnnnnnnnnnnnnnnnnnnnnnnnnnnnnnnnnnnnnnnnnnnnnnnnnnnnnnnnnnnnnnnnnnnnnnnnnnnnnnnnnnnnnnnnnnnnnnnnnnnnnnnnnnnnnnnnnnnnnnnnnnnnnnnnnnnnnnnnnnnnnnnnnnnnnnnnnnnnnnnnnnnnnnnnnnnnnnnnnnnnnnnnnnnnnnnnnnnnnnnnnnnnnnnnnnnnnnnnnnnnnnnnnnnnnnnnnnnnnnnnnnnnnnnnnnnnnnnnnnnnnnnnnnnnnnnnnnnnnnnnnnnnnnnnnnnnnnnnnnnnnnnnnnnnnnnnnnnnnnnnnnnnnnnnnnnnnnnnnnnnnnnnnnnnnnnnnnnnnnnnnnnnnnnnnnnnnnnnnnnnnnnnnnnnnnnnnnnnnnnnnnnnnnnnnnnnnnnnnnnnnnnnnnnnnnnnnnnnnnnnnnnnnnnnnnnnnnnnnnnnnnnnnnnnnnnnnnnnnnnnnnnnnnnnnnnnnnnnnnnnnnnnnnnnnnnnnnnnnnnnnnnnnnnnnnnnnnnnnnnnnnnnnnnnnnnnnnnnnnnnnnnnnnnnnnnnnnnnnnnnnnnnnnnnnnnnnnnnnnnnnnnnnnnnnnnnnnnnnnnnnnnnnnnnnnnnnnnnnnnnnnnnnnnnnnnnnnnnnnnnnnnnnnnnnnnnnnnnnnnnnnnnnnnnnnnnnnnnnnnnnnnnnnnnnnnnnnnnnnnnnnnnnnnnnnnnnnnnnnnnnnnnnnnnnnnnnnnnnnnnnnnnnnnnnnnnnnnnnnnnnnnnnnnnnnnnnnnnnnnnnnnnnnnnnnnnnnnnnnnnnnnnnnnnnnnnnnnnnnnnnnnnnnnnnnnnnnnnnnnnnnnnnnnnnnnnnnnnnnnnnnnnnnnnnnnnnnnnnnnnnnnnnnnnnnnnnnnnnnnnnnnnnnnnnnnnnnnnnnnnnnnnnnnnnnnnnnnnnnnnnnnnnnnnnnnnnnnnnnnnnnnnnnnnnnnnnnnnnnnnnnnnnnnnnnnnnnnnnnnnnnnnnnnnnnnnnnnnnnnnnnnnnnnnnnnnnnnnnnnnnnnnnnnnnnnnnnnnnnnnnnnnnnnnnnnnnnnnnnnnnnnnnnnnnnnnnnnnnnnnnnnnnnnnnnnnnnnnnnnnnnnnnnnnnnnnnnnnnnnnnnnnnnnnnnnnnnnnnnnnnnnnnnnnnnnnnnnnnnnnnnnnnnnnnnnnnnnnnnnnnnnnnnnnnnnnnnnnnnnnnnnnnnnnnnnnnnnnnnnnnnnnnnnnnnnnnnnnnnnnnnnnnnnnnnnnnnnnnnnnnnnnnnnnnnnnnnnnnnnnnnnnnnnnnnnnnnnnnnnnnnnnnnnnnnnnnnnnnnnnnnnnnnnnnnnnnnnnnnnnnnnnnnnnnnnnnnnnnnnnnnnnnnnnnnnnnnnnnnnnnnnnnnnnnnnnnnnnnnnnnnnnnnnnnnnnnnnnnnnnnnnnnnnnnnnnnnnnnnnnnnnnnnnnnnnnnnnnnnnnnnnnnnnnnnnnnnnnnnnnnnnnnnnnnnnnnnnnnnnnnnnnnnnnnnnnnnnnnnnnnnnnnnnnnnnnnnnnnnnnnnnnnnnnnnnnnnnnnnnnnnnnnnnnnnnnnnnnnnnnnnnnnnnnnnnnnnnnnnnnnnnnnnnnnnnnnnnnnnnnnnnnnnnnnnnnnnnnnnnnnnnnnnnnnnnnnnnnnnnnnnnnnnnnnnnnnnnnnnnnnnnnnnnnnnnnnnnnnnnnnnnnnnnnnnnnnnnnnnnnnnnnnnnnnnnnnnnnnnnnnnnnnnnnnnnnnnnnnnnnnnnnnnnnnnnnnnnnnnnnnnnnnnnnnnnnnnnnnnnnnnnnnnnnnnnnnnnnnnnnnnnnnnnnnnnnnnnnnnnnnnnnnnnnnnnnnnnnnnnnnnnnnnnnnnnnnnnnnnnnnnnnnnnnnnnnnnnnnnnnnnnnnnnnnnnnnnnnnnnnnnnnnnnnnnnnnnnnnnnnnnnnnnnnnnnnnnnnnnnnnnnnnnnnnnnnnnnnnnnnnnnnnnnnnnnnnnnnnnnnnnnnnnnnnnnnnnnnnnnnnnnnnnnnnnnnnnnnnnnnnnnnnnnnnnnnnnnnnnnnnnnnnnnnnnnnnnnnnnnnnnnnnnnnnnnnnnnnnnnnnnnnnnnnnnnnnnnnnnnnnnnnnnnnnnnnnnnnnnnnnnnnnnnnnnnnnnnnnnnnnnnnnnnnnnnnnnnnnnnnnnnnnnnnnnnnnnnnnnnnnnnnnnnnnnnnnnnnnnnnnnnnnnnnnnnnnnnnnnnnnnnnnnnnnnnnnnnnnnnnnnnnnnnnnnnnnnnnnnnnnnnnnnnnnnnnnnnnnnnnnnnnnnnnnnnnnnnnnnnnnnnnnnnnnnnnnnnnnnnnnnnnnnnnnnnnnnnnnnnnnnnnnnnnnnnnnnnnnnnnnnnnnnnnnnnnnnnnnnnnnnnnnnnnnnnnnnnnnnnnnnnnnnnnnnnnnnnnnnnnnnnnnnnnnnnnnnnnnnnnnnnnnnnnnnnnnnnnnnnnnnnnnnnnnnnnnnnnnnnnnnnnnnnnnnnnnnnnnnnnnnnnnnnnnnnnnnnnnnnnnnnnnnnnnnnnnnnnnnnnnnnnnnnnnnnnnnnnnnnnnnnnnnnnnnnnnnnnnnnnnnnnnnnnnnnnnnnnnnnnnnnnnnnnnnnnnnnnnnnnnnnnnnnnnnnnnnnnnnnnnnnnnnnnnnnnnnnnnnnnnnnnnnnnnnnnnnnnnnnnnnnnnnnnnnnnnnnnnnnnnnnnnnnnnnnnnnnnnnnnnnnnnnnnnnnnnnnnnnnnnnnnnnnnnnnnnnnnnnnnnnnnnnnnnnnnnnnnnnnnnnnnnnnnnnnnnnnnnnnnnnnnnnnnnnnnnnnnnnnnnnnnnnnnnnnnnnnnnnnnnnnnnnnnnnnnnnnnnnnnnnnnnnnnnnnnnnnnnnnnnnnnnnnnnnnnnnnnnnnnnnnnnnnnnnnnnnnnnnnnnnnnnnnnnnnnnnnnnnnnnnnnnnnnnnnnnnnnnnnnnnnnnnnnnnnnnnnnnnnnnnnnnnnnnnnnnnnnnnnnnnnnnnnnnnnnnnnnnnnnnnnnnnnnnnnnnnnnnnnnnnnnnnnnnnnnnnnnnnnnnnnnnnnnnnnnnnnnnnnnnnnnnnnnnnnnnnnnnnnnnnnnnnnnnnnnnnnnnnnnnnnnnnnnnnnnnnnnnnnnnnnnnnnnnnnnnnnnnnnnnnnnnnnnnnnnnnnnnnnnnnnnnnnnnnnnnnnnnnnnnnnnnnnnnnnnnnnnnnnnnnnnnnnnnnnnnnnnnnnnnnnnnnnnnnnnnnnnnnnnnnnnnnnnnnnnnnnnnnnnnnnnnnnnnnnnnnnnnnnnnnnnnnnnnnnnnnnnnnnnnnnnnnnnnnnnnnnnnnnnnnnnnnnnnnnnnnnnnnnnnnnnnnnnnnnnnnnnnnnnnnnnnnnnnnnnnnnnnnnnnnnnnnnnnnnnnnnnnnnnnnnnnnnnnnnnnnnnnnnnnnnnnnnnnnnnnnnnnnnnnnnnnnnnnnnnnnnnnnnnnnnnnnnnnnnnnnnnnnnnnnnnnnnnnnnnnnnnnnnnnnnnnnnnnnnnnnnnnnnnnnnnnnnnnnnnnnnnnnnnnnnnnnnnnnnnnnnnnnnnnnnnnnnnnnnnnnnnnnnnnnnnnnnnnnnnnnnnnnnnnnnnnnnnnnnnnnnnnnnnnnnnnnnnnnnnnnnnnnnnnnnnnnnnnnnnnnnnnnnnnnnnnnnnnnnnnnnnnnnnnnnnnnnnnnnnnnnnnnnnnnnnnnnnnnnnnnnnnnnnnnnnnnnnnnnnnnnnnnnnnnnnnnnnnnnnnnnnnnnnnnnnnnnnnnnnnnnnnnnnnnnnnnnnnnnnnnnnnnnnnnnnnnnnnnnnnnnnnnnnnnnnnnnnnnnnnnnnnnnnnnnnnnnnnnnnnnnnnnnnnnnnnnnnnnnnnnnnnnnnnnnnnnnnnnnnnnnnnnnnnnnnnnnnnnnnnnnnnnnnnnnnnnnnnnnnnnnnnnnnnnnnnnnnnnnnnnnnnnnnnnnnnnnnnnnnnnnnnnnnnnnnnnnnnnnnnnnnnnnnnnnnnnnnnnnnnnnnnnnnnnnnnnnnnnnnnnnnnnnnnnnnnnnnnnnnnnnnnnnnnnnnnnnnnnnnnnnnnnnnnnnnnnnnnnnnnnnnnnnnnnnnnnnnnnnnnnnnnnnnnnnnnnnnnnnnnnnnnnnnnnnnnnnnnnnnnnnnnnnnnnnnnnnnnnnnnnnnnnnnnnnnnnnnnnnnnnnnnnnnnnnnnnnnnnnnnnnnnnnnnnnnnnnnnnnnnnnnnnnnnnnnnnnnnnnnnnnnnnnnnnnnnnnnnnnnnnnnnnnnnnnnnnnnnnnnnnnnnnnnnnnnnnnnnnnnnnnnnnnnnnnnnnnnnnnnnnnnnnnnnnnnnnnnnnnnnnnnnnnnnnnnnnnnnnnnnnnnnnnnnnnnnnnnnnnnnnnnnnnnnnnnnnnnnnnnnnnnnnnnnnnnnnnnnnnnnnnnnnnnnnnnnnnnnnnnnnnnnnnnnnnnnnnnnnnnnnnnnnnnnnnnnnnnnnnnnnnnnnnnnnnnnnnnnnnnnnnnnnnnnnnnnnnnnnnnnnnnnnnnnnnnnnnnnnnnnnnnnnnnnnnnnnnnnnnnnnnnnnnnnnnnnnnnnnnnnnnnnnnnnnnnnnnnnnnnnnnnnnnnnnnnnnnnnnnnnnnnnnnnnnnnnnnnnnnnnnnnnnnnnnnnnnnnnnnnnnnnnnnnnnnnnnnnnnnnnnnnnnnnnnnnnnnnnnnnnnnnnnnnnnnnnnnnnnnnnnnnnnnnnnnnnnnnnnnnnnnnnnnnnnnnnnnnnnnnnnnnnnnnnnnnnnnnnnnnnnnnnnnnnnnnnnnnnnnnnnnnnnnnnnnnnnnnnnnnnnnnnnnnnnnnnnnnnnnnnnnnnnnnnnnnnnnnnnnnnnnnnnnnnnnnnnnnnnnnnnnnnnnnnnnnnnnnnnnnnnnnnnnnnnnnnnnnnnnnnnnnnnnnnnnnnnnnnnnnnnnnnnnnnnnnnnnnnnnnnnnnnnnnnnnnnnnnnnnnnnnnnnnnnnnnnnnnnnnnnnnnnnnnnnnnnnnnnnnnnnnnnnnnnnnnnnnnnnnnnnnnnnnnnnnnnnnnnnnnnnnnnnnnnnnnnnnnnnnnnnnnnnnnnnnnnnnnnnnnnnnnnnnnnnnnnnnnnnnnnnnnnnnnnnnnnnnnnnnnnnnnnnnnnnnnnnnnnnnnnnnnnnnnnnnnnnnnnnnnnnnnnnnnnnnnnnnnnnnnnnnnnnnnnnnnnnnnnnnnnnnnnnnnnnnnnnnnnnnnnnnnnnnnnnnnnnnnnnnnnnnnnnnnnnnnnnnnnnnnnnnnnnnnnnnnnnnnnnnnnnnnnnnnnnnnnnnnnnnnnnnnnnnnnnnnnnnnnnnnnnnnnnnnnnnnnnnnnnnnnnnnnnnnnnnnnnnnnnnnnnnnnnnnnnnnnnnnnnnnnnnnnnnnnnnnnnnnnnnnnnnnnnnnnnnnnnnnnnnnnnnnnnnnnnnnnnnnnnnnnnnnnnnnnnnnnnnnnnnnnnnnnnnnnnnnnnnnnnnnnnnnnnnnnnnnnnnnnnnnnnnnnnnnnnnnnnnnnnnnnnnnnnnnnnnnnnnnnnnnnnnnnnnnnnnnnnnnnnnnnnnnnnnnnnnnnnnnnnnnnnnnnnnnnnnnnnnnnnnnnnnnnnnnnnnnnnnnnnnnnnnnnnnnnnnnnnnnnnnnnnnnnnnnnnnnnnnnnnnnnnnnnnnnnnnnnnnnnnnnnnnnnnnnnnnnnnnnnnnnnnnnnnnnnnnnnnnnnnnnnnnnnnnnnnnnnnnnnnnnnnnnnnnnnnnnnnnnnnnnnnnnnnnnnnnnnnnnnnnnnnnnnnnnnnnnnnnnnnnnnnnnnnnnnnnnnnnnnnnnnnnnnnnnnnnnnnnnnnnnnnnnnnnnnnnnnnnnnnnnnnnnnnnnnnnnnnnnnnnnnnnnnnnnnnnnnnnnnnnnnnnnnnnnnnnnnnnnnnnnnnnnnnnnnnnnnnnnnnnnnnnnnnnnnnnnnnnnnnnnnnnnnnnnnnnnnnnnnnnnnnnnnnnnnnnnnnnnnnnnnnnnnnnnnnnnnnnnnnnnnnnnnnnnnnnnnnnnnnnnnnnnnnnnnnnnnnnnnnnnnnnnnnnnnnnnnnnnnnnnnnnnnnnnnnnnnnnnnnnnnnnnnnnnnnnnnnnnnnnnnnnnnnnnnnnnnnnnnnnnnnnnnnnnnnnnnnnnnnnnnnnnnnnnnnnnnnnnnnnnnnnnnnnnnnnnnnnnnnnnnnnnnnnnnnnnnnnnnnnnnnnnnnnnnnnnnnnnnnnnnnnnnnnnnnnnnnnnnnnnnnnnnnnnnnnnnnnnnnnnnnnnnnnnnnnnnnnnnnnnnnnnnnnnnnnnnnnnnnnnnnnnnnnnnnnnnnnnnnnnnnnnnnnnnnnnnnnnnnnnnnnnnnnnnnnnnnnnnnnnnnnnnnnnnnnnnnnnnnnnnnnnnnnnnnnnnnnnnnnnnnnnnnnnnnnnnnnnnnnnnnnnnnnnnnnnnnnnnnnnnnnnnnnnnnnnnnnnnnnnnnnnnnnnnnnnnnnnnnnnnnnnnnnnnnnnnnnnnnnnnnnnnnnnnnnnnnnnnnnnnnnnnnnnnnnnnnnnnnnnnnnnnnnnnnnnnnnnnnnnnnnnnnnnnnnnnnnnnnnnnnnnnnnnnnnnnnnnnnnnnnnnnnnnnnnnnnnnnnnnnnnnnnnnnnnnnnnnnnnnnnnnnnnnnnnnnnnnnnnnnnnnnnnnnnnnnnnnnnnnnnnnnnnnnnnnnnnnnnnnnnnnnnnnnnnnnnnnnnnnnnnnnnnnnnnnnnnnnnnnnnnnnnnnnnnnnnnnnnnnnnnnnnnnnnnnnnnnnnnnnnnnnnnnnnnnnnnnnnnnnnnnnnnnnnnnnnnnnnnnnnnnnnnnnnnnnnnnnnnnnnnnnnnnnnnnnnnnnnnnnnnnnnnnnnnnnnnnnnnnnnnnnnnnnnnnnnnnnnnnnnnnnnnnnnnnnnnnnnnnnnnnnnnnnnnnnnnnnnnnnnnnnnnnnnnnnnnnnnnnnnnnnnnnnnnnnnnnnnnnnnnnnnnnnnnnnnnnnnnnnnnnnnnnnnnnnnnnnnnnnnnnnnnnnnnnnnnnnnnnnnnnnnnnnnnnnnnnnnnnnnnnnnnnnnnnnnnnnnnnnnnnnnnnnnnnnnnnnnnnnnnnnnnnnnnnnnnnnnnnnnnnnnnnnnnnnnnnnnnnnnnnnnnnnnnnnnnnnnnnnnnnnnnnnnnnnnnnnnnnnnnnnnnnnnnnnnnnnnnnnnnnnnnnnnnnnnnnnnnnnnnnnnnnnnnnnnnnnnnnnnnnnnnnnnnnnnnnnnnnnnnnnnnnnnnnnnnnnnnnnnnnnnnnnnnnnnnnnnnnnnnnnnnnnnnnnnnnnnnnnnnnnnnnnnnnnnnnnnnnnnnnnnnnnnnnnnnnnnnnnnnnnnnnnnnnnnnnnnnnnnnnnnnnnnnnnnnnnnnnnnnnnnnnnnnnnnnnnnnnnnnnnnnnnnnnnnnnnnnnnnnnnnnnnnnnnnnnnnnnnnnnnnnnnnnnnnnnnnnnnnnnnnnnnnnnnnnnnnnnnnnnnnnnnnnnnnnnnnnnnnnnnnnnnnnnnnnnnnnnnnnnnnnnnnnnnnnnnnnnnnnnnnnnnnnnnnnnnnnnnnnnnnnnnnnnnnnnnnnnnnnnnnnnnnnnnnnnnnnnnnnnnnnnnnnnnnnnnnnnnnnnnnnnnnnnnnnnnnnnnnnnnnnnnnnnnnnnnnnnnnnnnnnnnnnnnnnnnnnnnnnnnnnnnnnnnnnnnnnnnnnnnnnnnnnnnnnnnnnnnnnnnnnnnnnnnnnnnnnnnnnnnnnnnnnnnnnnnnnnnnnnnnnnnnnnnnnnnnnnnnnnnnnnnnnnnnnnnnnnnnnnnnnnnnnnnnnnnnnnnnnnnnnnnnnnnnnnnnnnnnnnnnnnnnnnnnnnnnnnnnnnnnnnnnnnnnnnnnnnnnnnnnnnnnnnnnnnnnnnnnnnnnnnnnnnnnnnnnnnnnnnnnnnnnnnnnnnnnnnnnnnnnnnnnnnnnnnnnnnnnnnnnnnnnnnnnnnnnnnnnnnnnnnnnnnnnnnnnnnnnnnnnnnnnnnnnnnnnnnnnnnnnnnnnnnnnnnnnnnnnnnnnnnnnnnnnnnnnnnnnnnnnnnnnnnnnnnnnnnnnnnnnnnnnnnnnnnnnnnnnnnnnnnnnnnnnnnnnnnnnnnnnnnnnnnnnnnnnnnnnnnnnnnnnnnnnnnnnnnnnnnnnnnnnnnnnnnnnnnnnnnnnnnnnnnnnnnnnnnnnnnnnnnnnnnnnnnnnnnnnnnnnnnnnnnnnnnnnnnnnnnnnnnnnnnnnnnnnnnnnnnnnnnnnnnnnnnnnnnnnnnnnnnnnnnnnnnnnnnnnnnnnnnnnnnnnnnnnnnnnnnnnnnnnnnnnnnnnnnnnnnnnnnnnnnnnnnnnnnnnnnnnnnnnnnnnnnnnnnnnnnnnnnnnnnnnnnnnnnnnnnnnnnnnnnnnnnnnnnnnnnnnnnnnnnnnnnnnnnnnnnnnnnnnnnnnnnnnnnnnnnnnnnnnnnnnnnnnnnnnnnnnnnnnnnnnnnnnnnnnnnnnnnnnnnnnnnnnnnnnnnnnnnnnnnnnnnnnnnnnnnnnnnnnnnnnnnnnnnnnnnnnnnnnnnnnnnnnnnnnnnnnnnnnnnnnnnnnnnnnnnnnnnnnnnnnnnnnnnnnnnnnnnnnnnnnnnnnnnnnnnnnnnnnnnnnnnnnnnnnnnnnnnnnnnnnnnnnnnnnnnnnnnnnnnnnnnnnnnnnnnnnnnnnnnnnnnnnnnnnnnnnnnnnnnnnnnnnnnnnnnnnnnnnnnnnnnnnnnnnnnnnnnnnnnnnnnnnnnnnnnnnnnnnnnnnnnnnnnnnnnnnnnnnnnnnnnnnnnnnnnnnnnnnnnnnnnnnnnnnnnnnnnnnnnnnnnnnnnnnnnnnnnnnnnnnnnnnnnnnnnnnnnnnnnnnnnnnnnnnnnnnnnnnnnnnnnnnnnnnnnnnnnnnnnnnnnnnnnnnnnnnnnnnnnnnnnnnnnnnnnnnnnnnnnnnnnnnnnnnnnnnnnnnnnnnnnnnnnnnnnnnnnnnnnnnnnnnnnnnnnnnnnnnnnnnnnnnnnnnnnnnnnnnnnnnnnnnnnnnnnnnnnnnnnnnnnnnnnnnnnnnnnnnnnnnnnnnnnnnnnnnnnnnnnnnnnnnnnnnnnnnnnnnnnnnnnnnnnnnnnnnnnnnnnnnnnnnnnnnnnnnnnnnnnnnnnnnnnnnnnnnnnnnnnnnnnnnnnnnnnnnnnnnnnnnnnnnnnnnnnnnnnnnnnnnnnnnnnnnnnnnnnnnnnnnnnnnnnnnnnnnnnnnnnnnnnnnnnnnnnnnnnnnnnnnnnnnnnnnnnnnnnnnnnnnnnnnnnnnnnnnnnnnnnnnnnnnnnnnnnnnnnnnnnnnnnnnnnnnnnnnnnnnnnnnnnnnnnnnnnnnnnnnnnnnnnnnnnnnnnnnnnnnnnnnnnnnnnnnnnnnnnnnnnnnnnnnnnnnnnnnnnnnnnnnnnnnnnnnnnnnnnnnnnnnnnnnnnnnnnnnnnnnnnnnnnnnnnnnnnnnnnnnnnnnnnnnnnnnnnnnnnnnnnnnnnnnnnnnnnnnnnnnnnnnnnnnnnnnnnnnnnnnnnnnnnnnnnnnnnnnnnnnnnnnnnnnnnnnnnnnnnnnnnnnnnnnnnnnnnnnnnnnnnnnnnnnnnnnnnnnnnnnnnnnnnnnnnnnnnnnnnnnnnnnnnnnnnnnnnnnnnnnnnnnnnnnnnnnnnnnnnnnnnnnnnnnnnnnnnnnnnnnnnnnnnnnnnnnnnnnnnnnnnnnnnnnnnnnnnnnnnnnnnnnnnnnnnnnnnnnnnnnnnnnnnnnnnnnnnnnnnnnnnnnnnnnnnnnnnnnnnnnnnnnnnnnnnnnnnnnnnnnnnnnnnnnnnnnnnnnnnnnnnnnnnnnnnnnnnnnnnnnnnnnnnnnnnnnnnnnnnnnnnnnnnnnnnnnnnnnnnnnnnnnnnnnnnnnnnnnnnnnnnnnnnnnnnnnnnnnnnnnnnnnnnnnnnnnnnnnnnnnnnnnnnnnnnnnnnnnnnnnnnnnnnnnnnnnnnnnnnnnnnnnnnnnnnnnnnnnnnnnnnnnnnnnnnnnnnnnnnnnnnnnnnnnnnnnnnnnnnnnnnnnnnnnnnnnnnnnnnnnnnnnnnnnnnnnnnnnnnnnnnnnnnnnnnnnnnnnnnnnnnnnnnnnnnnnnnnnnnnnnnnnnnnnnnnnnnnnnnnnnnnnnnnnnnnnnnnnnnnnnnnnnnnnnnnnnnnnnnnnnnnnnnnnnnnnnnnnnnnnnnnnnnnnnnnnnnnnnnnnnnnnnnnnnnnnnnnnnnnnnnnnnnnnnnnnnnnnnnnnnnnnnnnnnnnnnnnnnnnnnnnnnnnnnnnnnnnnnnnnnnnnnnnnnnnnnnnnnnnnnnnnnnnnnnnnnnnnnnnnnnnnnnnnnnnnnnnnnnnnnnnnnnnnnnnnnnnnnnnnnnnnnnnnnnnnnnnnnnnnnnnnnnnnnnnnnnnnnnnnnnnnnnnnnnnnnnnnnnnnnnnnnnnnnnnnnnnnnnnnnnnnnnnnnnnnnnnnnnnnnnnnnnnnnnnnnnnnnnnnnnnnnnnnnnnnnnnnnnnnnnnnnnnnnnnnnnnnnnnnnnnnnnnnnnnnnnnnnnnnnnnnnnnnnnnnnnnnnnnnnnnnnnnnnnnnnnnnnnnnnnnnnnnnnnnnnnnnnnnnnnnnnnnnnnnnnnnnnnnnnnnnnnnnnnnnnnnnnnnnnnnnnnnnnnnnnnnnnnnnnnnnnnnnnnnnnnnnnnnnnnnnnnnnnnnnnnnnnnnnnnnnnnnnnnnnnnnnnnnnnnnnnnnnnnnnnnnnnnnnnnnnnnnnnnnnnnnnnnnnnnnnnnnnnnnnnnnnnnnnnnnnnnnnnnnnnnnnnnnnnnnnnnnnnnnnnnnnnnnnnnnnnnnnnnnnnnnnnnnnnnnnnnnnnnnnnnnnnnnnnnnnnnnnnnnnnnnnnnnnnnnnnnnnnnnnnnnnnnnnnnnnnnnnnnnnnnnnnnnnnnnnnnnnnnnnnnnnnnnnnnnnnnnnnnnnnnnnnnnnnnnnnnnnnnnnnnnnnnnnnnnnnnnnnnnnnnnnnnnnnnnnnnnnnnnnnnnnnnnnnnnnnnnnnnnnnnnnnnnnnnnnnnnnnnnnnnnnnnnnnnnnnnnnnnnnnnnnnnnnnnnnnnnnnnnnnnnnnnnnnnnnnnnnnnnnnnnnnnnnnnnnnnnnnnnnnnnnnnnnnnnnnnnnnnnnnnnnnnnnnnnnnnnnnnnnnnnnnnnnnnnnnnnnnnnnnnnnnnnnnnnnnnnnnnnnnnnnnnnnnnnnnnnnnnnnnnnnnnnnnnnnnnnnnnnnnnnnnnnnnnnnnnnnnnnnnnnnnnnnnnnnnnnnnnnnnnnnnnnnnnnnnnnnnnnnnnnnnnnnnnnnnnnnnnnnnnnnnnnnnnnnnnnnnnnnnnnnnnnnnnnnnnnnnnnnnnnnnnnnnnnnnnnnnnnnnnnnnnnnnnnnnnnnnnnnnnnnnnnnnnnnnnnnnnnnnnnnnnnnnnnnnnnnnnnnnnnnnnnnnnnnnnnnnnnnnnnnnnnnnnnnnnnnnnnnnnnnnnnnnnnnnnnnnnnnnnnnnnnnnnnnnnnnnnnnnnnnnnnnnnnnnnnnnnnnnnnnnnnnnnnnnnnnnnnnnnnnnnnnnnnnnnnnnnnnnnnnnnnnnnnnnnnnnnnnnnnnnnnnnnnnnnnnnnnnnnnnnnnnnnnnnnnnnnnnnnnnnnnnnnnnnnnnnnnnnnnnnnnnnnnnnnnnnnnnnnnnnnnnnnnnnnnnnnnnnnnnnnnnnnnnnnnnnnnnnnnnnnnnnnnnnnnnnnnnnnnnnnnnnnnnnnnnnnnnnnnnnnnnnnnnnnnnnnnnnnnnnnnnnnnnnnnnnnnnnnnnnnnnnnnnnnnnnnnnnnnnnnnnnnnnnnnnnnnnnnnnnnnnnnnnnnnnnnnnnnnnnnnnnnnnnnnnnnnnnnnnnnnnnnnnnnnnnnnnnnnnnnnnnnnnnnnnnnnnnnnnnnnnnnnnnnnnnnnnnnnnnnnnnnnnnnnnnnnnnnnnnnnnnnnnnnnnnnnnnnnnnnnnnnnnnnnnnnnnnnnnnnnnnnnnnnnnnnnnnnnnnnnnnnnnnnnnnnnnnnnnnnnnnnnnnnnnnnnnnnnnnnnnnnnnnnnnnnnnnnnnnnnnnnnnnnnnnnnnnnnnnnnnnnnnnnnnnnnnnnnnnnnnnnnnnnnnnnnnnnnnnnnnnnnnnnnnnnnnnnnnnnnnnnnnnnnnnnnnnnnnnnnnnnnnnnnnnnnnnnnnnnnnnnnnnnnnnnnnnnnnnnnnnnnnnnnnnnnnnnnnnnnnnnnnnnnnnnnnnnnnnnnnnnnnnnnnnnnnnnnnnnnnnnnnnnnnnnnnnnnnnnnnnnnnnnnnnnnnnnnnnnnnnnnnnnnnnnnnnnnnnnnnnnnnnnnnnnnnnnnnnnnnnnnnnnnnnnnnnnnnnnnnnnnnnnnnnnnnnnnnnnnnnnnnnnnnnnnnnnnnnnnnnnnnnnnnnnnnnnnnnnnnnnnnnnnnnnnnnnnnnnnnnnnnnnnnnnnnnnnnnnnnnnnnnnnnnnnnnnnnnnnnnnnnnnnnnnnnnnnnnnnnnnnnnnnnnnnnnnnnnnnnnnnnnnnnnnnnnnnnnnnnnnnnnnnnnnnnnnnnnnnnnnnnnnnnnnnnnnnnnnnnnnnnnnnnnnnnnnnnnnnnnnnnnnnnnnnnnnnnnnnnnnnnnnnnnnnnnnnnnnnnnnnnnnnnnnnnnnnnnnnnnnnnnnnnnnnnnnnnnnnnnnnnnnnnnnnnnnnnnnnnnnnnnnnnnnnnnnnnnnnnnnnnnnnnnnnnnnnnnnnnnnnnnnnnnnnnnnnnnnnnnnnnnnnnnnnnnnnnnnnnnnnnnnnnnnnnnnnnnnnnnnnnnnnnnnnnnnnnnnnnnnnnnnnnnnnnnnnnnnnnnnnnnnnnnnnnnnnnnnnnnnnnnnnnnnnnnnnnnnnnnnnnnnnnnnnnnnnnnnnnnnnnnnnnnnnnnnnnnnnnnnnnnnnnnnnnnnnnnnnnnnnnnnnnnnnnnnnnnnnnnnnnnnnnnnnnnnnnnnnnnnnnnnnnnnnnnnnnnnnnnnnnnnnnnnnnnnnnnnnnnnnnnnnnnnnnnnnnnnnnnnnnnnnnnnnnnnnnnnnnnnnnnnnnnnnnnnnnnnnnnnnnnnnnnnnnnnnnnnnnnnnnnnnnnnnnnnnnnnnnnnnnnnnnnnnnnnnnnnnnnnnnnnnnnnnnnnnnnnnnnnnnnnnnnnnnnnnnnnnnnnnnnnnnnnnnnnnnnnnnnnnnnnnnnnnnnnnnnnnnnnnnnnnnnnnnnnnnnnnnnnnnnnnnnnnnnnnnnnnnnnnnnnnnnnnnnnnnnnnnnnnnnnnnnnnnnnnnnnnnnnnnnnnnnnnnnnnnnnnnnnnnnnnnnnnnnnnnnnnnnnnnnnnnnnnnnnnnnnnnnnnnnnnnnnnnnnnnnnnnnnnnnnnnnnnnnnnnnnnnnnnnnnnnnnnnnnnnnnnnnnnnnnnnnnnnnnnnnnnnnnnnnnnnnnnnnnnnnnnnnnnnnnnnnnnnnnnnnnnnnnnnnnnnnnnnnnnnnnnnnnnnnnnnnnnnnnnnnnnnnnnnnnnnnnnnnnnnnnnnnnnnnnnnnnnnnnnnnnnnnnnnnnnnnnnnnnnnnnnnnnnnnnnnnnnnnnnnnnnnnnnnnnnnnnnnnnnnnnnnnnnnnnnnnnnnnnnnnnnnnnnnnnnnnnnnnnnnnnnnnnnnnnnnnnnnnnnnnnnnnnnnnnnnnnnnnnnnnnnnnnnnnnnnnnnnnnnnnnnnnnnnnnnnnnnnnnnnnnnnnnnnnnnnnnnnnnnnnnnnnnnnnnnnnnnnnnnnnnnnnnnnnnnnnnnnnnnnnnnnnnnnnnnnnnnnnnnnnnnnnnnnnnnnnnnnnnnnnnnnnnnnnnnnnnnnnnnnnnnnnnnnnnnnnnnnnnnnnnnnnnnnnnnnnnnnnnnnnnnnnnnnnnnnnnnnnnnnnnnnnnnnnnnnnnnnnnnnnnnnnnnnnnnnnnnnnnnnnnnnnnnnnnnnnnnnnnnnnnnnnnnnnnnnnnnnnnnnnnnnnnnnnnnnnnnnnnnnnnnnnnnnnnnnnnnnnnnnnnnnnnnnnnnnnnnnnnnnnnnnnnnnnnnnnnnnnnnnnnnnnnnnnnnnnnnnnnnnnnnnnnnnnnnnnnnnnnnnnnnnnnnnnnnnnnnnnnnnnnnnnnnnnnnnnnnnnnnnnnnnnnnnnnnnnnnnnnnnnnnnnnnnnnnnnnnnnnnnnnnnnnnnnnnnnnnnnnnnnnnnnnnnnnnnnnnnnnnnnnnnnnnnnnnnnnnnnnnnnnnnnnnnnnnnnnnnnnnnnnnnnnnnnnnnnnnnnnnnnnnnnnnnnnnnnnnnnnnnnnnnnnnnnnnnnnnnnnnnnnnnnnnnnnnnnnnnnnnnnnnnnnnnnnnnnnnnnnnnnnnnnnnnnnnnnnnnnnnnnnnnnnnnnnnnnnnnnnnnnnnnnnnnnnnnnnnnnnnnnnnnnnnnnnnnnnnnnnnnnnnnnnnnnnnnnnnnnnnnnnnnnnnnnnnnnnnnnnnnnnnnnnnnnnnnnnnnnnnnnnnnnnnnnnnnnnnnnnnnnnnnnnnnnnnnnnnnnnnnnnnnnnnnnnnnnnnnnnnnnnnnnnnnnnnnnnnnnnnnnnnnnnnnnnnnnnnnnnnnnnnnnnnnnnnnnnnnnnnnnnnnnnnnnnnnnnnnnnnnnnnnnnnnnnnnnnnnnnnnnnnnnnnnnnnnnnnnnnnnnnnnnnnnnnnnnnnnnnnnnnnnnnnnnnnnnnnnnnnnnnnnnnnnnnnnnnnnnnnnnnnnnnnnnnnnnnnnnnnnnnnnnnnnnnnnnnnnnnnnnnnnnnnnnnnnnnnnnnnnnnnnnnnnnnnnnnnnnnnnnnnnnnnnnnnnnnnnnnnnnnnnnnnnnnnnnnnnnnnnnnnnnnnnnnnnnnnnnnnnnnnnnnnnnnnnnnnnnnnnnnnnnnnnnnnnnnnnnnnnnnnnnnnnnnnnnnnnnnnnnnnnnnnnnnnnnnnnnnnnnnnnnnnnnnnnnnnnnnnnnnnnnnnnnnnnnnnnnnnnnnnnnnnnnnnnnnnnnnnnnnnnnnnnnnnnnnnnnnnnnnnnnnnnnnnnnnnnnnnnnnnnnnnnnnnnnnnnnnnnnnnnnnnnnnnnnnnnnnnnnnnnnnnnnnnnnnnnnnnnnnnnnnnnnnnnnnnnnnnnnnnnnnnnnnnnnnnnnnnnnnnnnnnnnnnnnnnnnnnnnnnnnnnnnnnnnnnnnnnnnnnnnnnnnnnnnnnnnnnnnnnnnnnnnnnnnnnnnnnnnnnnnnnnnnnnnnnnnnnnnnnnnnnnnnnnnnnnnnnnnnnnnnnnnnnnnnnnnnnnnnnnnnnnnnnnnnnnnnnnnnnnnnnnnnnnnnnnnnnnnnnnnnnnnnnnnnnnnnnnnnnnnnnnnnnnnnnnnnnnnnnnnnnnnnnnnnnnnnnnnnnnnnnnnnnnnnnnnnnnnnnnnnnnnnnnnnnnnnnnnnnnnnnnnnnnnnnnnnnnnnnnnnnnnnnnnnnnnnnnnnnnnnnnnnnnnnnnnnnnnnnnnnnnnnnnnnnnnnnnnnnnnnnnnnnnnnnnnnnnnnnnnnnnnnnnnnnnnnnnnnnnnnnnnnnnnnnnnnnnnnnnnnnnnnnnnnnnnnnnnnnnnnnnnnnnnnnnnnnnnnnnnnnnnnnnnnnnnnnnnnnnnnnnnnnnnnnnnnnnnnnnnnnnnnnnnnnnnnnnnnnnnnnnnnnnnnnnnnnnnnnnnnnnnnnnnnnnnnnnnnnnnnnnnnnnnnnnnnnnnnnnnnnnnnnnnnnnnnnnnnnnnnnnnnnnnnnnnnnnnnnnnnnnnnnnnnnnnnnnnnnnnnnnnnnnnnnnnnnnnnnnnnnnnnnnnnnnnnnnnnnnnnnnnnnnnnnnnnnnnnnnnnnnnnnnnnnnnnnnnnnnnnnnnnnnnnnnnnnnnnnnnnnnnnnnnnnnnnnnnnnnnnnnnnnnnnnnnnnnnnnnnnnnnnnnnnnnnnnnnnnnnnnnnnnnnnnnnnnnnnnnnnnnnnnnnnnnnnnnnnnnnnnnnnnnnnnnnnnnnnnnnnnnnnnnnnnnnnnnnnnnnnnnnnnnnnnnnnnnnnnnnnnnnnnnnnnnnnnnnnnnnnnnnnnnnnnnnnnnnnnnnnnnnnnnnnnnnnnnnnnnnnnnnnnnnnnnnnnnnnnnnnnnnnnnnnnnnnnnnnnnnnnnnnnnnnnnnnnnnnnnnnnnnnnnnnnnnnnnnnnnnnnnnnnnnnnnnnnnnnnnnnnnnnnnnnnnnnnnnnnnnnnnnnnnnnnnnnnnnnnnnnnnnnnnnnnnnnnnnnnnnnnnnnnnnnnnnnnnnnnnnnnnnnnnnnnnnnnnnnnnnnnnnnnnnnnnnnnnnnnnnnnnnnnnnnnnnnnnnnnnnnnnnnnnnnnnnnnnnnnnnnnnnnnnnnnnnnnnnnnnnnnnnnnnnnnnnnnnnnnnnnnnnnnnnnnnnnnnnnnnnnnnnnnnnnnnnnnnnnnnnnnnnnnnnnnnnnnnnnnnnnnnnnnnnnnnnnnnnnnnnnnnnnnnnnnnnnnnnnnnnnnnnnnnnnnnnnnnnnnnnnnnnnnnnnnnnnnnnnnnnnnnnnnnnnnnnnnnnnnnnnnnnnnnnnnnnnnnnnnnnnnnnnnnnnnnnnnnnnnnnnnnnnnnnnnnnnnnnnnnnnnnnnnnnnnnnnnnnnnnnnnnnnnnnnnnnnnnnnnnnnnnnnnnnnnnnnnnnnnnnnnnnnnnnnnnnnnnnnnnnnnnnnnnnnnnnnnnnnnnnnnnnnnnnnnnnnnnnnnnnnnnnnnnnnnnnnnnnnnnnnnnnnnnnnnnnnnnnnnnnnnnnnnnnnnnnnnnnnnnnnnnnnnnnnnnnnnnnnnnnnnnnnnnnnnnnnnnnnnnnnnnnnnnnnnnnnnnnnnnnnnnnnnnnnnnnnnnnnnnnnnnnnnnnnnnnnnnnnnnnnnnnnnnnnnnnnnnnnnnnnnnnnnnnnnnnnnnnnnnnnnnnnnnnnnnnnnnnnnnnnnnnnnnnnnnnnnnnnnnnnnnnnnnnnnnnnnnnnnnnnnnnnnnnnnnnnnnnnnnnnnnnnnnnnnnnnnnnnnnnnnnnnnnnnnnnnnnnnnnnnnnnnnnnnnnnnnnnnnnnnnnnnnnnnnnnnnnnnnnnnnnnnnnnnnnnnnnnnnnnnnnnnnnnnnnnnnnnnnnnnnnnnnnnnnnnnnnnnnnnnnnnnnnnnnnnnnnnnnnnnnnnnnnnnnnnnnnnnnnnnnnnnnnnnnnnnnnnnnnnnnnnnnnnnnnnnnnnnnnnnnnnnnnnnnnnnnnnnnnnnnnnnnnnnnnnnnnnnnnnnnnnnnnnnnnnnnnnnnnnnnnnnnnnnnnnnnnnnnnnnnnnnnnnnnnnnnnnnnnnnnnnnnnnnnnnnnnnnnnnnnnnnnnnnnnnnnnnnnnnnnnnnnnnnnnnnnnnnnnnnnnnnnnnnnnnnnnnnnnnnnnnnnnnnnnnnnnnnnnnnnnnnnnnnnnnnnnnnnnnnnnnnnnnnnnnnnnnnnnnnnnnnnnnnnnnnnnnnnnnnnnnnnnnnnnnnnnnnnnnnnnnnnnnnnnnnnnnnnnnnnnnnnnnnnnnnnnnnnnnnnnnnnnnnnnnnnnnnnnnnnnnnnnnnnnnnnnnnnnnnnnnnnnnnnnnnnnnnnnnnnnnnnnnnnnnnnnnnnnnnnnnnnnnnnnnnnnnnnnnnnnnnnnnnnnnnnnnnnnnnnnnnnnnnnnnnnnnnnnnnnnnnnnnnnnnnnnnnnnnnnnnnnnnnnnnnnnnnnnnnnnnnnnnnnnnnnnnnnnnnnnnnnnnnnnnnnnnnnnnnnnnnnnnnnnnnnnnnnnnnnnnnnnnnnnnnnnnnnnnnnnnnnnnnnnnnnnnnnnnnnnnnnnnnnnnnnnnnnnnnnnnnnnnnnnnnnnnnnnnnnnnnnnnnnnnnnnnnnnnnnnnnnnnnnnnnnnnnnnnnnnnnnnnnnnnnnnnnnnnnnnnnnnnnnnnnnnnnnnnnnnnnnnnnnnnnnnnnnnnnnnnnnnnnnnnnnnnnnnnnnnnnnnnnnnnnnnnnnnnnnnnnnnnnnnnnnnnnnnnnnnnnnnnnnnnnnnnnnnnnnnnnnnnnnnnnnnnnnnnnnnnnnnnnnnnnnnnnnnnnnnnnnnnnnnnnnnnnnnnnnnnnnnnnnnnnnnnnnnnnnnnnnnnnnnnnnnnnnnnnnnnnnnnnnnnnnnnnnnnnnnnnnnnnnnnnnnnnnnnnnnnnnnnnnnnnnnnnnnnnnnnnnnnnnnnnnnnnnnnnnnnnnnnnnnnnnnnnnnnnnnnnnnnnnnnnnnnnnnnnnnnnnnnnnnnnnnnnnnnnnnnnnnnnnnnnnnnnnnnnnnnnnnnnnnnnnnnnnnnnnnnnnnnnnnnnnnnnnnnnnnnnnnnnnnnnnnnnnnnnnnnnnnnnnnnnnnnnnnnnnnnnnnnnnnnnnnnnnnnnnnnnnnnnnnnnnnnnnnnnnnnnnnnnnnnnnnnnnnnnnnnnnnnnnnnnnnnnnnnnnnnnnnnnnnnnnnnnnnnnnnnnnnnnnnnnnnnnnnnnnnnnnnnnnnnnnnnnnnnnnnnnnnnnnnnnnnnnnnnnnnnnnnnnnnnnnnnnnnnnnnnnnnnnnnnnnnnnnnnnnnnnnnnnnnnnnnnnnnnnnnnnnnnnnnnnnnnnnnnnnnnnnnnnnnnnnnnnnnnnnnnnnnnnnnnnnnnnnnnnnnnnnnnnnnnnnnnnnnnnnnnnnnnnnnnnnnnnnnnnnnnnnnnnnnnnnnnnnnnnnnnnnnnnnnnnnnnnnnnnnnnnnnnnnnnnnnnnnnnnnnnnnnnnnnnnnnnnnnnnnnnnnnnnnnnnnnnnnnnnnnnnnnnnnnnnnnnnnnnnnnnnnnnnnnnnnnnnnnnnnnnnnnnnnnnnnnnnnnnnnnnnnnnnnnnnnnnnnnnnnnnnnnnnnnnnnnnnnnnnnnnnnnnnnnnnnnnnnnnnnnnnnnnnnnnnnnnnnnnnnnnnnnnnnnnnnnnnnnnnnnnnnnnnnnnnnnnnnnnnnnnnnnnnnnnnnnnnnnnnnnnnnnnnnnnnnnnnnnnnnnnnnnnnnnnnnnnnnnnnnnnnnnnnnnnnnnnnnnnnnnnnnnnnnnnnnnnnnnnnnnnnnnnnnnnnnnnnnnnnnnnnnnnnnnnnnnnnnnnnnnnnnnnnnnnnnnnnnnnnnnnnnnnnnnnnnnnnnnnnnnnnnnnnnnnnnnnnnnnnnnnnnnnnnnnnnnnnnnnnnnnnnnnnnnnnnnnnnnnnnnnnnnnnnnnnnnnnnnnnnnnnnnnnnnnnnnnnnnnnnnnnnnnnnnnnnnnnnnnnnnnnnnnnnnnnnnnnnnnnnnnnnnnnnnnnnnnnnnnnnnnnnnnnnnnnnnnnnnnnnnnnnnnnnnnnnnnnnnnnnnnnnnnnnnnnnnnnnnnnnnnnnnnnnnnnnnnnnnnnnnnnnnnnnnnnnnnnnnnnnnnnnnnnnnnnnnnnnnnnnnnnnnnnnnnnnnnnnnnnnnnnnnnnnnnnnnnnnnnnnnnnnnnnnnnnnnnnnnnnnnnnnnnnnnnnnnnnnnnnnnnnnnnnnnnnnnnnnnnnnnnnnnnnnnnnnnnnnnnnnnnnnnnnnnnnnnnnnnnnnnnnnnnnnnnnnnnnnnnnnnnnnnnnnnnnnnnnnnnnnnnnnnnnnnnnnnnnnnnnnnnnnnnnnnnnnnnnnnnnnnnnnnnnnnnnnnnnnnnnnnnnnnnnnnnnnnnnnnnnnnnnnnnnnnnnnnnnnnnnnnnnnnnnnnnnnnnnnnnnnnnnnnnnnnnnnnnnnnnnnnnnnnnnnnnnnnnnnnnnnnnnnnnnnnnnnnnnnnnnnnnnnnnnnnnnnnnnnnnnnnnnnnnnnnnnnnnnnnnnnnnnnnnnnnnnnnnnnnnnnnnnnnnnnnnnnnnnnnnnnnnnnnnnnnnnnnnnnnnnnnnnnnnnnnnnnnnnnnnnnnnnnnnnnnnnnnnnnnnnnnnnnnnnnnnnnnnnnnnnnnnnnnnnnnnnnnnnnnnnnnnnnnnnnnnnnnnnnnnnnnnnnnnnnnnnnnnnnnnnnnnnnnnnnnnnnnnnnnnnnnnnnnnnnnnnnnnnnnnnnnnnnnnnnnnnnnnnnnnnnnnnnnnnnnnnnnnnnnnnnnnnnnnnnnnnnnnnnnnnnnnnnnnnnnnnnnnnnnnnnnnnnnnnnnnnnnnnnnnnnnnnnnnnnnnnnnnnnnnnnnnnnnnnnnnnnnnnnnnnnnnnnnnnnnnnnnnnnnnnnnnnnnnnnnnnnnnnnnnnnnnnnnnnnnnnnnnnnnnnnnnnnnnnnnnnnnnnnnnnnnnnnnnnnnnnnnnnnnnnnnnnnnnnnnnnnnnnnnnnnnnnnnnnnnnnnnnnnnnnnnnnnnnnnnnnnnnnnnnnnnnnnnnnnnnnnnnnnnnnnnnnnnnnnnnnnnnnnnnnnnnnnnnnnnnnnnnnnnnnnnnnnnnnnnnnnnnnnnnnnnnnnnnnnnnnnnnnnnnnnnnnnnnnnnnnnnnnnnnnnnnnnnnnnnnnnnnnnnnnnnnnnnnnnnnnnnnnnnnnnnnnnnnnnnnnnnnnnnnnnnnnnnnnnnnnnnnnnnnnnnnnnnnnnnnnnnnnnnnnnnnnnnnnnnnnnnnnnnnnnnnnnnnnnnnnnnnnnnnnnnnnnnnnnnnnnnnnnnnnnnnnnnnnnnnnnnnnnnnnnnnnnnnnnnnnnnnnnnnnnnnnnnnnnnnnnnnnnnnnnnnnnnnnnnnnnnnnnnnnnnnnnnnnnnnnnnnnnnnnnnnnnnnnnnnnnnnnnnnnnnnnnnnnnnnnnnnnnnnnnnnnnnnnnnnnnnnnnnnnnnnnnnnnnnnnnnnnnnnnnnnnnnnnnnnnnnnnnnnnnnnnnnnnnnnnnnnnnnnnnnnnnnnnnnnnnnnnnnnnnnnnnnnnnnnnnnnnnnnnnnnnnnnnnnnnnnnnnnnnnnnnnnnnnnnnnnnnnnnnnnnnnnnnnnnnnnnnnnnnnnnnnnnnnnnnnnnnnnnnnnnnnnnnnnnnnnnnnnnnnnnnnnnnnnnnnnnnnnnnnnnnnnnnnnnnnnnnnnnnnnnnnnnnnnnnnnnnnnnnnnnnnnnnnnnnnnnnnnnnnnnnnnnnnnnnnnnnnnnnnnnnnnnnnnnnnnnnnnnnnnnnnnnnnnnnnnnnnnnnnnnnnnnnnnnnnnnnnnnnnnnnnnnnnnnnnnnnnnnnnnnnnnnnnnnnnnnnnnnnnnnnnnnnnnnnnnnnnnnnnnnnnnnnnnnnnnnnnnnnnnnnnnnnnnnnnnnnnnnnnnnnnnnnnnnnnnnnnnnnnnnnnnnnnnnnnnnnnnnnnnnnnnnnnnnnnnnnnnnnnnnnnnnnnnnnnnnnnnnnnnnnnnnnnnnnnnnnnnnnnnnnnnnnnnnnnnnnnnnnnnnnnnnnnnnnnnnnnnnnnnnnnnnnnnnnnnnnnnnnnnnnnnnnnnnnnnnnnnnnnnnnnnnnnnnnnnnnnnnnnnnnnnnnnnnnnnnnnnnnnnnnnnnnnnnnnnnnnnnnnnnnnnnnnnnnnnnnnnnnnnnnnnnnnnnnnnnnnnnnnnnnnnnnnnnnnnnnnnnnnnnnnnnnnnnnnnnnnnnnnnnnnnnnnnnnnnnnnnnnnnnnnnnnnnnnnnnnnnnnnnnnnnnnnnnnnnnnnnnnnnnnnnnnnnnnnnnnnnnnnnnnnnnnnnnnnnnnnnnnnnnnnnnnnnnnnnnnnnnnnnnnnnnnnnnnnnnnnnnnnnnnnnnnnnnnnnnnnnnnnnnnnnnnnnnnnnnnnnnnnnnnnnnnnnnnnnnnnnnnnnnnnnnnnnnnnnnnnnnnnnnnnnnnnnnnnnnnnnnnnnnnnnnnnnnnnnnnnnnnnnnnnnnnnnnnnnnnnnnnnnnnnnnnnnnnnnnnnnnnnnnnnnnnnnnnnnnnnnnnnnnnnnnnnnnnnnnnnnnnnnnnnnnnnnnnnnnnnnnnnnnnnnnnnnnnnnnnnnnnnnnnnnnnnnnnnnnnnnnnnnnnnnnnnnnnnnnnnnnnnnnnnnnnnnnnnnnnnnnnnnnnnnnnnnnnnnnnnnnnnnnnnnnnnnnnnnnnnnnnnnnnnnnnnnnnnnnnnnnnnnnnnnnnnnnnnnnnnnnnnnnnnnnnnnnnnnnnnnnnnnnnnnnnnnnnnnnnnnnnnnnnnnnnnnnnnnnnnnnnnnnnnnnnnnnnnnnnnnnnnnnnnnnnnnnnnnnnnnnnnnnnnnnnnnnnnnnnnnnnnnnnnnnnnnnnnnnnnnnnnnnnnnnnnnnnnnnnnnnnnnnnnnnnnnnnnnnnnnnnnnnnnnnnnnnnnnnnnnnnnnnnnnnnnnnnnnnnnnnnnnnnnnnnnnnnnnnnnnnnnnnnnnnnnnnnnnnnnnnnnnnnnnnnnnnnnnnnnnnnnnnnnnnnnnnnnnnnnnnnnnnnnnnnnnnnnnnnnnnnnnnnnnnnnnnnnnnnnnnnnnnnnnnnnnnnnnnnnnnnnnnnnnnnnnnnnnnnnnnnnnnnnnnnnnnnnnnnnnnnnnnnnnnnnnnnnnnnnnnnnnnnnnnnnnnnnnnnnnnnnnnnnnnnnnnnnnnnnnnnnnnnnnnnnnnnnnnnnnnnnnnnnnnnnnnnnnnnnnnnnnnnnnnnnnnnnnnnnnnnnnnnnnnnnnnnnnnnnnnnnnnnnnnnnnnnnnnnnnnnnnnnnnnnnnnnnnnnnnnnnnnnnnnnnnnnnnnnnnnnnnnnnnnnnnnnnnnnnnnnnnnnnnnnnnnnnnnnnnnnnnnnnnnnnnnnnnnnnnnnnnnnnnnnnnnnnnnnnnnnnnnnnnnnnnnnnnnnnnnnnnnnnnnnnnnnnnnnnnnnnnnnnnnnnnnnnnnnnnnnnnnnnnnnnnnnnnnnnnnnnnnnnnnnnnnnnnnnnnnnnnnnnnnnnnnnnnnnnnnnnnnnnnnnnnnnnnnnnnnnnnnnnnnnnnnnnnnnnnnnnnnnnnnnnnnnnnnnnnnnnnnnnnnnnnnnnnnnnnnnnnnnnnnnnnnnnnnnnnnnnnnnnnnnnnnnnnnnnnnnnnnnnnnnnnnnnnnnnnnnnnnnnnnnnnnnnnnnnnnnnnnnnnnnnnnnnnnnnnnnnnnnnnnnnnnnnnnnnnnnnnnnnnnnnnnnnnnnnnnnnnnnnnnnnnnnnnnnnnnnnnnnnnnnnnnnnnnnnnnnnnnnnnnnnnnnnnnnnnnnnnnnnnnnnnnnnnnnnnnnnnnnnnnnnnnnnnnnnnnnnnnnnnnnnnnnnnnnnnnnnnnnnnnnnnnnnnnnnnnnnnnnnnnnnnnnnnnnnnnnnnnnnnnnnnnnnnnnnnnnnnnnnnnnnnnnnnnnnnnnnnnnnnnnnnnnnnnnnnnnnnnnnnnnnnnnnnnnnnnnnnnnnnnnnnnnnnnnnnnnnnnnnnnnnnnnnnnnnnnnnnnnnnnnnnnnnnnnnnnnnnnnnnnnnnnnnnnnnnnnnnnnnnnnnnnnnnnnnnnnnnnnnnnnnnnnnnnnnnnnnnnnnnnnnnnnnnnnnnnnnnnnnnnnnnnnnnnnnnnnnnnnnnnnnnnnnnnnnnnnnnnnnnnnnnnnnnnnnnnnnnnnnnnnnnnnnnnnnnnnnnnnnnnnnnnnnnnnnnnnnnnnnnnnnnnnnnnnnnnnnnnnnnnnnnnnnnnnnnnnnnnnnnnnnnnnnnnnnnnnnnnnnnnnnnnnnnnnnnnnnnnnnnnnnnnnnnnnnnnnnnnnnnnnnnnnnnnnnnnnnnnnnnnnnnnnnnnnnnnnnnnnnnnnnnnnnnnnnnnnnnnnnnnnnnnnnnnnnnnnnnnnnnnnnnnnnnnnnnnnnnnnnnnnnnnnnnnnnnnnnnnnnnnnnnnnnnnnnnnnnnnnnnnnnnnnnnnnnnnnnnnnnnnnnnnnnnnnnnnnnnnnnnnnnnnnnnnnnnnnnnnnnnnnnnnnnnnnnnnnnnnnnnnnnnnnnnnnnnnnnnnnnnnnnnnnnnnnnnnnnnnnnnnnnnnnnnnnnnnnnnnnnnnnnnnnnnnnnnnnnnnnnnnnnnnnnnnnnnnnnnnnnnnnnnnnnnnnnnnnnnnnnnnnnnnnnnnnnnnnnnnnnnnnnnnnnnnnnnnnnnnnnnnnnnnnnnnnnnnnnnnnnnnnnnnnnnnnnnnnnnnnnnnnnnnnnnnnnnnnnnnnnnnnnnnnnnnnnnnnnnnnnnnnnnnnnnnnnnnnnnnnnnnnnnnnnnnnnnnnnnnnnnnnnnnnnnnnnnnnnnnnnnnnnnnnnnnnnnnnnnnnnnnnnnnnnnnnnnnnnnnnnnnnnnnnnnnnnnnnnnnnnnnnnnnnnnnnnnnnnnnnnnnnnnnnnnnnnnnnnnnnnnnnnnnnnnnnnnnnnnnnnnnnnnnnnnnnnnnnnnnnnnnnnnnnnnnnnnnnnnnnnnnnnnnnnnnnnnnnnnnnnnnnnnnnnnnnnnnnnnnnnnnnnnnnnnnnnnnnnnnnnnnnnnnnnnnnnnnnnnnnnnnnnnnnnnnnnnnnnnnnnnnnnnnnnnnnnnnnnnnnnnnnnnnnnnnnnnnnnnnnnnnnnnnnnnnnnnnnnnnnnnnnnnnnnnnnnnnnnnnnnnnnnnnnnnnnnnnnnnnnnnnnnnnnnnnnnnnnnnnnnnnnnnnnnnnnnnnnnnnnnnnnnnnnnnnnnnnnnnnnnnnnnnnnnnnnnnnnnnnnnnnnnnnnnnnnnnnnnnnnnnnnnnnnnnnnnnnnnnnnnnnnnnnnnnnnnnnnnnnnnnnnnnnnnnnnnnnnnnnnnnnnnnnnnnnnnnnnnnnnnnnnnnnnnnnnnnnnnnnnnnnnnnnnnnnnnnnnnnnnnnnnnnnnnnnnnnnnnnnnnnnnnnnnnnnnnnnnnnnnnnnnnnnnnnnnnnnnnnnnnnnnnnnnnnnnnnnnnnnnnnnnnnnnnnnnnnnnnnnnnnnnnnnnnnnnnnnnnnnnnnnnnnnnnnnnnnnnnnnnnnnnnnnnnnnnnnnnnnnnnnnnnnnnnnnnnnnnnnnnnnnnnnnnnnnnnnnnnnnnnnnnnnnnnnnnnnnnnnnnnnnnnnnnnnnnnnnnnnnnnnnnnnnnnnnnnnnnnnnnnnnnnnnnnnnnnnnnnnnnnnnnnnnnnnnnnnnnnnnnnnnnnnnnnnnnnnnnnnnnnnnnnnnnnnnnnnnnnnnnnnnnnnnnnnnnnnnnnnnnnnnnnnnnnnnnnnnnnnnnnnnnnnnnnnnnnnnnnnnnnnnnnnnnnnnnnnnnnnnnnnnnnnnnnnnnnnnnnnnnnnnnnnnnnnnnnnnnnnnnnnnnnnnnnnnnnnnnnnnnnnnnnnnnnnnnnnnnnnnnnnnnnnnnnnnnnnnnnnnnnnnnnnnnnnnnnnnnnnnnnnnnnnnnnnnnnnnnnnnnnnnnnnnnnnnnnnnnnnnnnnnnnnnnnnnnnnnnnnnnnnnnnnnnnnnnnnnnnnnnnnnnnnnnnnnnnnnnnnnnnnnnnnnnnnnnnnnnnnnnnnnnnnnnnnnnnnnnnnnnnnnnnnnnnnnnnnnnnnnnnnnnnnnnnnnnnnnnnnnnnnnnnnnnnnnnnnnnnnnnnnnnnnnnnnnnnnnnnnnnnnnnnnnnnnnnnnnnnnnnnnnnnnnnnnnnnnnnnnnnnnnnnnnnnnnnnnnnnnnnnnnnnnnnnnnnnnnnnnnnnnnnnnnnnnnnnnnnnnnnnnnnnnnnnnnnnnnnnnnnnnnnnnnnnnnnnnnnnnnnnnnnnnnnnnnnnnnnnnnnnnnnnnnnnnnnnnnnnnnnnnnnnnnnnnnnnnnnnnnnnnnnnnnnnnnnnnnnnnnnnnnnnnnnnnnnnnnnnnnnnnnnnnnnnnnnnnnnnnnnnnnnnnnnnnnnnnnnnnnnnnnnnnnnnnnnnnnnnnnnnnnnnnnnnnnnnnnnnnnnnnnnnnnnnnnnnnnnnnnnnnnnnnnnnnnnnnnnnnnnnnnnnnnnnnnnnnnnnnnnnnnnnnnnnnnnnnnnnnnnnnnnnnnnnnnnnnnnnnnnnnnnnnnnnnnnnnnnnnnnnnnnnnnnnnnnnnnnnnnnnnnnnnnnnnnnnnnnnnnnnnnnnnnnnnnnnnnnnnnnnnnnnnnnnnnnnnnnnnnnnnnnnnnnnnnnnnnnnnnnnnnnnnnnnnnnnnnnnnnnnnnnnnnnnnnnnnnnnnnnnnnnnnnnnnnnnnnnnnnnnnnnnnnnnnnnnnnnnnnnnnnnnnnnnnnnnnnnnnnnnnnnnnnnnnnnnnnnnnnnnnnnnnnnnnnnnnnnnnnnnnnnnnnnnnnnnnnnnnnnnnnnnnnnnnnnnnnnnnnnnnnnnnnnnnnnnnnnnnnnnnnnnnnnnnnnnnnnnnnnnnnnnnnnnnnnnnnnnnnnnnnnnnnnnnnnnnnnnnnnnnnnnnnnnnnnnnnnnnnnnnnnnnnnnnnnnnnnnnnnnnnnnnnnnnnnnnnnnnnnnnnnnnnnnnnnnnnnnnnnnnnnnnnnnnnnnnnnnnnnnnnnnnnnnnnnnnnnnnnnnnnnnnnnnnnnnnnnnnnnnnnnnnnnnnnnnnnnnnnnnnnnnnnnnnnnnnnnnnnnnnnnnnnnnnnnnnnnnnnnnnnnnnnnnnnnnnnnnnnnnnnnnnnnnnnnnnnnnnnnnnnnnnnnnnnnnnnnnnnnnnnnnnnnnnnnnnnnnnnnnnnnnnnnnnnnnnnnnnnnnnnnnnnnnnnnnnnnnnnnnnnnnnnnnnnnnnnnnnnnnnnnnnnnnnnnnnnnnnnnnnnnnnnnnnnnnnnnnnnnnnnnnnnnnnnnnnnnnnnnnnnnnnnnnnnnnnnnnnnnnnnnnnnnnnnnnnnnnnnnnnnnnnnnnnnnnnnnnnnnnnnnnnnnnnnnnnnnnnnnnnnnnnnnnnnnnnnnnnnnnnnnnnnnnnnnnnnnnnnnnnnnnnnnnnnnnnnnnnnnnnnnnnnnnnnnnnnnnnnnnnnnnnnnnnnnnnnnnnnnnnnnnnnnnnnnnnnnnnnnnnnnnnnnnnnnnnnnnnnnnnnnnnnnnnnnnnnnnnnnnnnnnnnnnnnnnnnnnnnnnnnnnnnnnnnnnnnnnnnnnnnnnnnnnnnnnnnnnnnnnnnnnnnnnnnnnnnnnnnnnnnnnnnnnnnnnnnnnnnnnnnnnnnnnnnnnnnnnnnnnnnnnnnnnnnnnnnnnnnnnnnnnnnnnnnnnnnnnnnnnnnnnnnnnnnnnnnnnnnnnnnnnnnnnnnnnnnnnnnnnnnnnnnnnnnnnnnnnnnnnnnnnnnnnnnnnnnnnnnnnnnnnnnnnnnnnnnnnnnnnnnnnnnnnnnnnnnnnnnnnnnnnnnnnnnnnnnnnnnnnnnnnnnnnnnnnnnnnnnnnnnnnnnnnnnnnnnnnnnnnnnnnnnnnnnnnnnnnnnnnnnnnnnnnnnnnnnnnnnnnnnnnnnnnnnnnnnnnnnnnnnnnnnnnnnnnnnnnnnnnnnnnnnnnnnnnnnnnnnnnnnnnnnnnnnnnnnnnnnnnnnnnnnnnnnnnnnnnnnnnnnnnnnnnnnnnnnnnnnnnnnnnnnnnnnnnnnnnnnnnnnnnnnnnnnnnnnnnnnnnnnnnnnnnnnnnnnnnnnnnnnnnnnnnnnnnnnnnnnnnnnnnnnnnnnnnnnnnnnnnnnnnnnnnnnnnnnnnnnnnnnnnnnnnnnnnnnnnnnnnnnnnnnnnnnnnnnnnnnnnnnnnnnnnnnnnnnnnnnnnnnnnnnnnnnnnnnnnnnnnnnnnnnnnnnnnnnnnnnnnnnnnnnnnnnnnnnnnnnnnnnnnnnnnnnnnnnnnnnnnnnnnnnnnnnnnnnnnnnnnnnnnnnnnnnnnnnnnnnnnnnnnnnnnnnnnnnnnnnnnnnnnnnnnnnnnnnnnnnnnnnnnnnnnnnnnnnnnnnnnnnnnnnnnnnnnnnnnnnnnnnnnnnnnnnnnnnnnnnnnnnnnnnnnnnnnnnnnnnnnnnnnnnnnnnnnnnnnnnnnnnnnnnnnnnnnnnnnnnnnnnnnnnnnnnnnnnnnnnnnnnnnnnnnnnnnnnnnnnnnnnnnnnnnnnnnnnnnnnnnnnnnnnnnnnnnnnnnnnnnnnnnnnnnnnnnnnnnnnnnnnnnnnnnnnnnnnnnnnnnnnnnnnnnnnnnnnnnnnnnnnnnnnnnnnnnnnnnnnnnnnnnnnnnnnnnnnnnnnnnnnnnnnnnnnnnnnnnnnnnnnnnnnnnnnnnnnnnnnnnnnnnnnnnnnnnnnnnnnnnnnnnnnnnnnnnnnnnnnnnnnnnnnnnnnnnnnnnnnnnnnnnnnnnnnnnnnnnnnnnnnnnnnnnnnnnnnnnnnnnnnnnnnnnnnnnnnnnnnnnnnnnnnnnnnnnnnnnnnnnnnnnnnnnnnnnnnnnnnnnnnnnnnnnnnnnnnnnnnnnnnnnnnnnnnnnnnnnnnnnnnnnnnnnnnnnnnnnnnnnnnnnnnnnnnnnnnnnnnnnnnnnnnnnnnnnnnnnnnnnnnnnnnnnnnnnnnnnnnnnnnnnnnnnnnnnnnnnnnnnnnnnnnnnnnnnnnnnnnnnnnnnnnnnnnnnnnnnnnnnnnnnnnnnnnnnnnnnnnnnnnnnnnnnnnnnnnnnnnnnnnnnnnnnnnnnnnnnnnnnnnnnnnnnnnnnnnnnnnnnnnnnnnnnnnnnnnnnnnnnnnnnnnnnnnnnnnnnnnnnnnnnnnnnnnnnnnnnnnnnnnnnnnnnnnnnnnnnnnnnnnnnnnnnnnnnnnnnnnnnnnnnnnnnnnnnnnnnnnnnnnnnnnnnnnnnnnnnnnnnnnnnnnnnnnnnnnnnnnnnnnnnnnnnnnnnnnnnnnnnnnnnnnnnnnnnnnnnnnnnnnnnnnnnnnnnnnnnnnnnnnnnnnnnnnnnnnnnnnnnnnnnnnnnnnnnnnnnnnnnnnnnnnnnnnnnnnnnnnnnnnnnnnnnnnnnnnnnnnnnnnnnnnnnnnnnnnnnnnnnnnnnnnnnnnnnnnnnnnnnnnnnnnnnnnnnnnnnnnnnnnnnnnnnnnnnnnnnnnnnnnnnnnnnnnnnnnnnnnnnnnnnnnnnnnnnnnnnnnnnnnnnnnnnnnnnnnnnnnnnnnnnnnnnnnnnnnnnnnnnnnnnnnnnnnnnnnnnnnnnnnnnnnnnnnnnnnnnnnnnnnnnnnnnnnnnnnnnnnnnnnnnnnnnnnnnnnnnnnnnnnnnnnnnnnnnnnnnnnnnnnnnnnnnnnnnnnnnnnnnnnnnnnnnnnnnnnnnnnnnnnnnnnnnnnnnnnnnnnnnnnnnnnnnnnnnnnnnnnnnnnnnnnnnnnnnnnnnnnnnnnnnnnnnnnnnnnnnnnnnnnnnnnnnnnnnnnnnnnnnnnnnnnnnnnnnnnnnnnnnnnnnnnnnnnnnnnnnnnnnnnnnnnnnnnnnnnnnnnnnnnnnnnnnnnnnnnnnnnnnnnnnnnnnnnnnnnnnnnnnnnnnnnnnnnnnnnnnnnnnnnnnnnnnnnnnnnnnnnnnnnnnnnnnnnnnnnnnnnnnnnnnnnnnnnnnnnnnnnnnnnnnnnnnnnnnnnnnnnnnnnnnnnnnnnnnnnnnnnnnnnnnnnnnnnnnnnnnnnnnnnnnnnnnnnnnnnnnnnnnnnnnnnnnnnnnnnnnnnnnnnnnnnnnnnnnnnnnnnnnnnnnnnnnnnnnnnnnnnnnnnnnnnnnnnnnnnnnnnnnnnnnnnnnnnnnnnnnnnnnnnnnnnnnnnnnnnnnnnnnnnnnnnnnnnnnnnnnnnnnnnnnnnnnnnnnnnnnnnnnnnnnnnnnnnnnnnnnnnnnnnnnnnnnnnnnnnnnnnnnnnnnnnnnnnnnnnnnnnnnnnnnnnnnnnnnnnnnnnnnnnnnnnnnnnnnnnnnnnnnnnnnnnnnnnnnnnnnnnnnnnnnnnnnnnnnnnnnnnnnnnnnnnnnnnnnnnnnnnnnnnnnnnnnnnnnnnnnnnnnnnnnnnnnnnnnnnnnnnnnnnnnnnnnnnnnnnnnnnnnnnnnnnnnnnnnnnnnnnnnnnnnnnnnnnnnnnnnnnnnnnnnnnnnnnnnnnnnnnnnnnnnnnnnnnnnnnnnnnnnnnnnnnnnnnnnnnnnnnnnnnnnnnnnnnnnnnnnnnnnnnnnnnnnnnnnnnnnnnnnnnnnnnnnnnnnnnnnnnnnnnnnnnnnnnnnnnnnnnnnnnnnnnnnnnnnnnnnnnnnnnnnnnnnnnnnnnnnnnnnnnnnnnnnnnnnnnnnnnnnnnnnnnnnnnnnnnnnnnnnnnnnnnnnnnnnnnnnnnnnnnnnnnnnnnnnnnnnnnnnnnnnnnnnnnnnnnnnnnnnnnnnnnnnnnnnnnnnnnnnnnnnnnnnnnnnnnnnnnnnnnnnnnnnnnnnnnnnnnnnnnnnnnnnnnnnnnnnnnnnnnnnnnnnnnnnnnnnnnnnnnnnnnnnnnnnnnnnnnnnnnnnnnnnnnnnnnnnnnnnnnnnnnnnnnnnnnnnnnnnnnnnnnnnnnnnnnnnnnnnnnnnnnnnnnnnnnnnnnnnnnnnnnnnnnnnnnnnnnnnnnnnnnnnnnnnnnnnnnnnnnnnnnnnnnnnnnnnnnnnnnnnnnnnnnnnnnnnnnnnnnnnnnnnnnnnnnnnnnnnnnnnnnnnnnnnnnnnnnnnnnnnnnnnnnnnnnnnnnnnnnnnnnnnnnnnnnnnnnnnnnnnnnnnnnnnnnnnnnnnnnnnnnnnnnnnnnnnnnnnnnnnnnnnnnnnnnnnnnnnnnnnnnnnnnnnnnnnnnnnnnnnnnnnnnnnnnnnnnnnnnnnnnnnnnnnnnnnnnnnnnnnnnnnnnnnnnnnnnnnnnnnnnnnnnnnnnnnnnnnnnnnnnnnnnnnnnnnnnnnnnnnnnnnnnnnnnnnnnnnnnnnnnnnnnnnnnnnnnnnnnnnnnnnnnnnnnnnnnnnnnnnnnnnnnnnnnnnnnnnnnnnnnnnnnnnnnnnnnnnnnnnnnnnnnnnnnnnnnnnnnnnnnnnnnnnnnnnnnnnnnnnnnnnnnnnnnnnnnnnnnnnnnnnnnnnnnnnnnnnnnnnnnnnnnnnnnnnnnnnnnnnnnnnnnnnnnnnnnnnnnnnnnnnnnnnnnnnnnnnnnnnnnnnnnnnnnnnnnnnnnnnnnnnnnnnnnnnnnnnnnnnnnnnnnnnnnnnnnnnnnnnnnnnnnnnnnnnnnnnnnnnnnnnnnnnnnnnnnnnnnnnnnnnnnnnnnnnnnnnnnnnnnnnnnnnnnnnnnnnnnnnnnnnnnnnnnnnnnnnnnnnnnnnnnnnnnnnnnnnnnnnnnnnnnnnnnnnnnnnnnnnnnnnnnnnnnnnnnnnnnnnnnnnnnnnnnnnnnnnnnnnnnnnnnnnnnnnnnnnnnnnnnnnnnnnnnnnnnnnnnnnnnnnnnnnnnnnnnnnnnnnnnnnnnnnnnnnnnnnnnnnnnnnnnnnnnnnnnnnnnnnnnnnnnnnnnnnnnnnnnnnnnnnnnnnnnnnnnnnnnnnnnnnnnnnnnnnnnnnnnnnnnnnnnnnnnnnnnnnnnnnnnnnnnnnnnnnnnnnnnnnnnnnnnnnnnnnnnnnnnnnnnnnnnnnnnnnnnnnnnnnnnnnnnnnnnnnnnnnnnnnnnnnnnnnnnnnnnnnnnnnnnnnnnnnnnnnnnnnnnnnnnnnnnnnnnnnnnnnnnnnnnnnnnnnnnnnnnnnnnnnnnnnnnnnnnnnnnnnnnnnnnnnnnnnnnnnnnnnnnnnnnnnnnnnnnnnnnnnnnnnnnnnnnnnnnnnnnnnnnnnnnnnnnnnnnnnnnnnnnnnnnnnnnnnnnnnnnnnnnnnnnnnnnnnnnnnnnnnnnnnnnnnnnnnnnnnnnnnnnnnnnnnnnnnnnnnnnnnnnnnnnnnnnnnnnnnnnnnnnnnnnnnnnnnnnnnnnnnnnnnnnnnnnnnnnnnnnnnnnnnnnnnnnnnnnnnnnnnnnnnnnnnnnnnnnnnnnnnnnnnnnnnnnnnnnnnnnnnnnnnnnnnnnnnnnnnnnnnnnnnnnnnnnnnnnnnnnnnnnnnnnnnnnnnnnnnnnnnnnnnnnnnnnnnnnnnnnnnnnnnnnnnnnnnnnnnnnnnnnnnnnnnnnnnnnnnnnnnnnnnnnnnnnnnnnnnnnnnnnnnnnnnnnnnnnnnnnnnnnnnnnnnnnnnnnnnnnnnnnnnnnnnnnnnnnnnnnnnnnnnnnnnnnnnnnnnnnnnnnnnnnnnnnnnnnnnnnnnnnnnnnnnnnnnnnnnnnnnnnnnnnnnnnnnnnnnnnnnnnnnnnnnnnnnnnnnnnnnnnnnnnnnnnnnnnnnnnnnnnnnnnnnnnnnnnnnnnnnnnnnnnnnnnnnnnnnnnnnnnnnnnnnnnnnnnnnnnnnnnnnnnnnnnnnnnnnnnnnnnnnnnnnnnnnnnnnnnnnnnnnnnnnnnnnnnnnnnnnnnnnnnnnnnnnnnnnnnnnnnnnnnnnnnnnnnnnnnnnnnnnnnnnnnnnnnnnnnnnnnnnnnnnnnnnnnnnnnnnnnnnnnnnnnnnnnnnnnnnnnnnnnnnnnnnnnnnnnnnnnnnnnnnnnnnnnnnnnnnnnnnnnnnnnnnnnnnnnnnnnnnnnnnnnnnnnnnnnnnnnnnnnnnnnnnnnnnnnnnnnnnnnnnnnnnnnnnnnnnnnnnnnnnnnnnnnnnnnnnnnnnnnnnnnnnnnnnnnnnnnnnnnnnnnnnnnnnnnnnnnnnnnnnnnnnnnnnnnnnnnnnnnnnnnnnnnnnnnnnnnnnnnnnnnnnnnnnnnnnnnnnnnnnnnnnnnnnnnnnnnnnnnnnnnnnnnnnnnnnnnnnnnnnnnnnnnnnnnnnnnnnnnnnnnnnnnnnnnnnnnnnnnnnnnnnnnnnnnnnnnnnnnnnnnnnnnnnnnnnnnnnnnnnnnnnnnnnnnnnnnnnnnnnnnnnnnnnnnnnnnnnnnnnnnnnnnnnnnnnnnnnnnnnnnnnnnnnnnnnnnnnnnnnnnnnnnnnnnnnnnnnnnnnnnnnnnnnnnnnnnnnnnnnnnnnnnnnnnnnnnnnnnnnnnnnnnnnnnnnnnnnnnnnnnnnnnnnnnnnnnnnnnnnnnnnnnnnnnnnnnnnnnnnnnnnnnnnnnnnnnnnnnnnnnnnnnnnnnnnnnnnnnnnnnnnnnnnnnnnnnnnnnnnnnnnnnnnnnnnnnnnnnnnnnnnnnnnnnnnnnnnnnnnnnnnnnnnnnnnnnnnnnnnnnnnnnnnnnnnnnnnnnnnnnnnnnnnnnnnnnnnnnnnnnnnnnnnnnnnnnnnnnnnnnnnnnnnnnnnnnnnnnnnnnnnnnnnnnnnnnnnnnnnnnnnnnnnnnnnnnnnnnnnnnnnnnnnnnnnnnnnnnnnnnnnnnnnnnnnnnnnnnnnnnnnnnnnnnnnnnnnnnnnnnnnnnnnnnnnnnnnnnnnnnnnnnnnnnnnnnnnnnnnnnnnnnnnnnnnnnnnnnnnnnnnnnnnnnnnnnnnnnnnnnnnnnnnnnnnnnnnnnnnnnnnnnnnnnnnnnnnnnnnnnnnnnnnnnnnnnnnnnnnnnnnnnnnnnnnnnnnnnnnnnnnnnnnnnnnnnnnnnnnnnnnnnnnnnnnnnnnnnnnnnnnnnnnnnnnnnnnnnnnnnnnnnnnnnnnnnnnnnnnnnnnnnnnnnnnnnnnnnnnnnnnnnnnnnnnnnnnnnnnnnnnnnnnnnnnnnnnnnnnnnnnnnnnnnnnnnnnnnnnnnnnnnnnnnnnnnnnnnnnnnnnnnnnnnnnnnnnnnnnnnnnnnnnnnnnnnnnnnnnnnnnnnnnnnnnnnnnnnnnnnnnnnnnnnnnnnnnnnnnnnnnnnnnnnnnnnnnnnnnnnnnnnnnnnnnnnnnnnnnnnnnnnnnnnnnnnnnnnnnnnnnnnnnnnnnnnnnnnnnnnnnnnnnnnnnnnnnnnnnnnnnnnnnnnnnnnnnnnnnnnnnnnnnnnnnnnnnnnnnnnnnnnnnnnnnnnnnnnnnnnnnnnnnnnnnnnnnnnnnnnnnnnnnnnnnnnnnnnnnnnnnnnnnnnnnnnnnnnnnnnnnnnnnnnnnnnnnnnnnnnnnnnnnnnnnnnnnnnnnnnnnnnnnnnnnnnnnnnnnnnnnnnnnnnnnnnnnnnnnnnnnnnnnnnnnnnnnnnnnnnnnnnnnnnnnnnnnnnnnnnnnnnnnnnnnnnnnnnnnnnnnnnnnnnnnnnnnnnnnnnnnnnnnnnnnnnnnnnnnnnnnnnnnnnnnnnnnnnnnnnnnnnnnnnnnnnnnnnnnnnnnnnnnnnnnnnnnnnnnnnnnnnnnnnnnnnnnnnnnnnnnnnnnnnnnnnnnnnnnnnnnnnnnnnnnnnnnnnnnnnnnnnnnnnnnnnnnnnnnnnnnnnnnnnnnnnnnnnnnnnnnnnnnnnnnnnnnnnnnnnnnnnnnnnnnnnnnnnnnnnnnnnnnnnnnnnnnnnnnnnnnnnnnnnnnnnnnnnnnnnnnnnnnnnnnnnnnnnnnnnnnnnnnnnnnnnnnnnnnnnnnnnnnnnnnnnnnnnnnnnnnnnnnnnnnnnnnnnnnnnnnnnnnnnnnnnnnnnnnnnnnnnnnnnnnnnnnnnnnnnnnnnnnnnnnnnnnnnnnnnnnnnnnnnnnnnnnnnnnnnnnnnnnnnnnnnnnnnnnnnnnnnnnnnnnnnnnnnnnnnnnnnnnnnnnnnnnnnnnnnnnnnnnnnnnnnnnnnnnnnnnnnnnnnnnnnnnnnnnnnnnnnnnnnnnnnnnnnnnnnnnnnnnnnnnnnnnnnnnnnnnnnnnnnnnnnnnnnnnnnnnnnnnnnnnnnnnnnnnnnnnnnnnnnnnnnnnnnnnnnnnnnnnnnnnnnnnnnnnnnnnnnnnnnnnnnnnnnnnnnnnnnnnnnnnnnnnnnnnnnnnnnnnnnnnnnnnnnnnnnnnnnnnnnnnnnnnnnnnnnnnnnnnnnnnnnnnnnnnnnnnnnnnnnnnnnnnnnnnnnnnnnnnnnnnnnnnnnnnnnnnnnnnnnnnnnnnnnnnnnnnnnnnnnnnnnnnnnnnnnnnnnnnnnnnnnnnnnnnnnnnnnnnnnnnnnnnnnnnnnnnnnnnnnnnnnnnnnnnnnnnnnnnnnnnnnnnnnnnnnnnnnnnnnnnnnnnnnnnnnnnnnnnnnnnnnnnnnnnnnnnnnnnnnnnnnnnnnnnnnnnnnnnnnnnnnnnnnnnnnnnnnnnnnnnnnnnnnnnnnnnnnnnnnnnnnnnnnnnnnnnnnnnnnnnnnnnnnnnnnnnnnnnnnnnnnnnnnnnnnnnnnnnnnnnnnnnnnnnnnnnnnnnnnnnnnnnnnnnnnnnnnnnnnnnnnnnnnnnnnnnnnnnnnnnnnnnnnnnnnnnnnnnnnnnnnnnnnnnnnnnnnnnnnnnnnnnnnnnnnnnnnnnnnnnnnnnnnnnnnnnnnnnnnnnnnnnnnnnnnnnnnnnnnnnnnnnnnnnnnnnnnnnnnnnnnnnnnnnnnnnnnnnnnnnnnnnnnnnnnnnnnnnnnnnnnnnnnnnnnnnnnnnnnnnnnnnnnnnnnnnnnnnnnnnnnnnnnnnnnnnnnnnnnnnnnnnnnnnnnnnnnnnnnnnnnnnnnnnnnnnnnnnnnnnnnnnnnnnnnnnnnnnnnnnnnnnnnnnnnnnnnnnnnnnnnnnnnnnnnnnnnnnnnnnnnnnnnnnnnnnnnnnnnnnnnnnnnnnnnnnnnnnnnnnnnnnnnnnnnnnnnnnnnnnnnnnnnnnnnnnnnnnnnnnnnnnnnnnnnnnnnnnnnnnnnnnnnnnnnnnnnnnnnnnnnnnnnnnnnnnnnnnnnnnnnnnnnnnnnnnnnnnnnnnnnnnnnnnnnnnnnnnnnnnnnnnnnnnnnnnnnnnnnnnnnnnnnnnnnnnnnnnnnnnnnnnnnnnnnnnnnnnnnnnnnnnnnnnnnnnnnnnnnnnnnnnnnnnnnnnnnnnnnnnnnnnnnnnnnnnnnnnnnnnnnnnnnnnnnnnnnnnnnnnnnnnnnnnnnnnnnnnnnnnnnnnnnnnnnnnnnnnnnnnnnnnnnnnnnnnnnnnnnnnnnnnnnnnnnnnnnnnnnnnnnnnnnnnnnnnnnnnnnnnnnnnnnnnnnnnnnnnnnnnnnnnnnnnnnnnnnnnnnnnnnnnnnnnnnnnnnnnnnnnnnnnnnnnnnnnnnnnnnnnnnnnnnnnnnnnnnnnnnnnnnnnnnnnnnnnnnnnnnnnnnnnnnnnnnnnnnnnnnnnnnnnnnnnnnnnnnnnnnnnnnnnnnnnnnnnnnnnnnnnnnnnnnnnnnnnnnnnnnnnnnnnnnnnnnnnnnnnnnnnnnnnnnnnnnnnnnnnnnnnnnnnnnnnnnnnnnnnnnnnnnnnnnnnnnnnnnnnnnnnnnnnnnnnnnnnnnnnnnnnnnnnnnnnnnnnnnnnnnnnnnnnnnnnnnnnnnnnnnnnnnnnnnnnnnnnnnnnnnnnnnnnnnnnnnnnnnnnnnnnnnnnnnnnnnnnnnnnnnnnnnnnnnnnnnnnnnnnnnnnnnnnnnnnnnnnnnnnnnnnnnnnnnnnnnnnnnnnnnnnnnnnnnnnnnnnnnnnnnnnnnnnnnnnnnnnnnnnnnnnnnnnnnnnnnnnnnnnnnnnnnnnnnnnnnnnnnnnnnnnnnnnnnnnnnnnnnnnnnnnnnnnnnnnnnnnnnnnnnnnnnnnnnnnnnnnnnnnnnnnnnnnnnnnnnnnnnnnnnnnnnnnnnnnnnnnnnnnnnnnnnnnnnnnnnnnnnnnnnnnnnnnnnnnnnnnnnnnnnnnnnnnnnnnnnnnnnnnnnnnnnnnnnnnnnnnnnnnnnnnnnnnnnnnnnnnnnnnnnnnnnnnnnnnnnnnnnnnnnnnnnnnnnnnnnnnnnnnnnnnnnnnnnnnnnnnnnnnnnnnnnnnnnnnnnnnnnnnnnnnnnnnnnnnnnnnnnnnnnnnnnnnnnnnnnnnnnnnnnnnnnnnnnnnnnnnnnnnnnnnnnnnnnnnnnnnnnnnnnnnnnnnnnnnnnnnnnnnnnnnnnnnnnnnnnnnnnnnnnnnnnnnnnnnnnnnnnnnnnnnnnnnnnnnnnnnnnnnnnnnnnnnnnnnnnnnnnnnnnnnnnnnnnnnnnnnnnnnnnnnnnnnnnnnnnnnnnnnnnnnnnnnnnnnnnnnnnnnnnnnnnnnnnnnnnnnnnnnnnnnnnnnnnnnnnnnnnnnnnnnnnnnnnnnnnnnnnnnnnnnnnnnnnnnnnnnnnnnnnnnnnnnnnnnnnnnnnnnnnnnnnnnnnnnnnnnnnnnnnnnnnnnnnnnnnnnnnnnnnnnnnnnnnnnnnnnnnnnnnnnnnnnnnnnnnnnnnnnnnnnnnnnnnnnnnnnnnnnnnnnnnnnnnnnnnnnnnnnnnnnnnnnnnnnnnnnnnnnnnnnnnnnnnnnnnnnnnnnnnnnnnnnnnnnnnnnnnnnnnnnnnnnnnnnnnnnnnnnnnnnnnnnnnnnnnnnnnnnnnnnnnnnnnnnnnnnnnnnnnnnnnnnnnnnnnnnnnnnnnnnnnnnnnnnnnnnnnnnnnnnnnnnnnnnnnnnnnnnnnnnnnnnnnnnnnnnnnnnnnnnnnnnnnnnnnnnnnnnnnnnnnnnnnnnnnnnnnnnnnnnnnnnnnnnnnnnnnnnnnnnnnnnnnnnnnnnnnnnnnnnnnnnnnnnnnnnnnnnnnnnnnnnnnnnnnnnnnnnnnnnnnnnnnnnnnnnnnnnnnnnnnnnnnnnnnnnnnnnnnnnnnnnnnnnnnnnnnnnnnnnnnnnnnnnnnnnnnnnnnnnnnnnnnnnnnnnnnnnnnnnnnnnnnnnnnnnnnnnnnnnnnnnnnnnnnnnnnnnnnnnnnnnnnnnnnnnnnnnnnnnnnnnnnnnnnnnnnnnnnnnnnnnnnnnnnnnnnnnnnnnnnnnnnnnnnnnnnnnnnnnnnnnnnnnnnnnnnnnnnnnnnnnnnnnnnnnnnnnnnnnnnnnnnnnnnnnnnnnnnnnnnnnnnnnnnnnnnnnnnnnnnnnnnnnnnnnnnnnnnnnnnnnnnnnnnnnnnnnnnnnnnnnnnnnnnnnnnnnnnnnnnnnnnnnnnnnnnnnnnnnnnnnnnnnnnnnnnnnnnnnnnnnnnnnnnnnnnnnnnnnnnnnnnnnnnnnnnnnnnnnnnnnnnnnnnnnnnnnnnnnnnnnnnnnnnnnnnnnnnnnnnnnnnnnnnnnnnnnnnnnnnnnnnnnnnnnnnnnnnnnnnnnnnnnnnnnnnnnnnnnnnnnnnnnnnnnnnnnnnnnnnnnnnnnnnnnnnnnnnnnnnnnnnnnnnnnnnnnnnnnnnnnnnnnnnnnnnnnnnnnnnnnnnnnnnnnnnnnnnnnnnnnnnnnnnnnnnnnnnnnnnnnnnnnnnnnnnnnnnnnnnnnnnnnnnnnnnnnnnnnnnnnnnnnnnnnnnnnnnnnnnnnnnnnnnnnnnnnnnnnnnnnnnnnnnnnnnnnnnnnnnnnnnnnnnnnnnnnnnnnnnnnnnnnnnnnnnnnnnnnnnnnnnnnnnnnnnnnnnnnnnnnnnnnnnnnnnnnnnnnnnnnnnnnnnnnnnnnnnnnnnnnnnnnnnnnnnnnnnnnnnnnnnnnnnnnnnnnnnnnnnnnnnnnnnnnnnnnnnnnnnnnnnnnnnnnnnnnnnnnnnnnnnnnnnnnnnnnnnnnnnnnnnnnnnnnnnnnnnnnnnnnnnnnnnnnnnnnnnnnnnnnnnnnnnnnnnnnnnnnnnnnnnnnnnnnnnnnnnnnnnnnnnnnnnnnnnnnnnnnnnnnnnnnnnnnnnnnnnnnnnnnnnnnnnnnnnnnnnnnnnnnnnnnnnnnnnnnnnnnnnnnnnnnnnnnnnnnnnnnnnnnnnnnnnnnnnnnnnnnnnnnnnnnnnnnnnnnnnnnnnnnnnnnnnnnnnnnnnnnnnnnnnnnnnnnnnnnnnnnnnnnnnnnnnnnnnnnnnnnnnnnnnnnnnnnnnnnnnnnnnnnnnnnnnnnnnnnnnnnnnnnnnnnnnnnnnnnnnnnnnnnnnnnnnnnnnnnnnnnnnnnnnnnnnnnnnnnnnnnnnnnnnnnnnnnnnnnnnnnnnnnnnnnnnnnnnnnnnnnnnnnnnnnnnnnnnnnnnnnnnnnnnnnnnnnnnnnnnnnnnnnnnnnnnnnnnnnnnnnnnnnnnnnnnnnnnnnnnnnnnnnnnnnnnnnnnnnnnnnnnnnnnnnnnnnnnnnnnnnnnnnnnnnnnnnnnnnnnnnnnnnnnnnnnnnnnnnnnnnnnnnnnnnnnnnnnnnnnnnnnnnnnnnnnnnnnnnnnnnnnnnnnnnnnnnnnnnnnnnnnnnnnnnnnnnnnnnnnnnnnnnnnnnnnnnnnnnnnnnnnnnnnnnnnnnnnnnnnnnnnnnnnnnnnnnnnnnnnnnnnnnnnnnnnnnnnnnnnnnnnnnnnnnnnnnnnnnnnnnnnnnnnnnnnnnnnnnnnnnnnnnnnnnnnnnnnnnnnnnnnnnnnnnnnnnnnnnnnnnnnnnnnnnnnnnnnnnnnnnnnnnnnnnnnnnnnnnnnnnnnnnnnnnnnnnnnnnnnnnnnnnnnnnnnnnnnnnnnnnnnnnnnnnnnnnnnnnnnnnnnnnnnnnnnnnnnnnnnnnnnnnnnnnnnnnnnnnnnnnnnnnnnnnnnnnnnnnnnnnnnnnnnnnnnnnnnnnnnnnnnnnnnnnnnnnnnnnnnnnnnnnnnnnnnnnnnnnnnnnnnnnnnnnnnnnnnnnnnnnnnnnnnnnnnnnnnnnnnnnnnnnnnnnnnnnnnnnnnnnnnnnnnnnnnnnnnnnnnnnnnnnnnnnnnnnnnnnnnnnnnnnnnnnnnnnnnnnnnnnnnnnnnnnnnnnnnnnnnnnnnnnnnnnnnnnnnnnnnnnnnnnnnnnnnnnnnnnnnnnnnnnnnnnnnnnnnnnnnnnnnnnnnnnnnnnnnnnnnnnnnnnnnnnnnnnnnnnnnnnnnnnnnnnnnnnnnnnnnnnnnnnnnnnnnnnnnnnnnnnnnnnnnnnnnnnnnnnnnnnnnnnnnnnnnnnnnnnnnnnnnnnnnnnnnnnnnnnnnnnnnnnnnnnnnnnnnnnnnnnnnnnnnnnnnnnnnnnnnnnnnnnnnnnnnnnnnnnnnnnnnnnnnnnnnnnnnnnnnnnnnnnnnnnnnnnnnnnnnnnnnnnnnnnnnnnnnnnnnnnnnnnnnnnnnnnnnnnnnnnnnnnnnnnnnnnnnnnnnnnnnnnnnnnnnnnnnnnnnnnnnnnnnnnnnnnnnnnnnnnnnnnnnnnnnnnnnnnnnnnnnnnnnnnnnnnnnnnnnnnnnnnnnnnnnnnnnnnnnnnnnnnnnnnnnnnnnnnnnnnnnnnnnnnnnnnnnnnnnnnnnnnnnnnnnnnnnnnnnnnnnnnnnnnnnnnnnnnnnnnnnnnnnnnnnnnnnnnnnnnnnnnnnnnnnnnnnnnnnnnnnnnnnnnnnnnnnnnnnnnnnnnnnnnnnnnnnnnnnnnnnnnnnnnnnnnnnnnnnnnnnnnnnnnnnnnnnnnnnnnnnnnnnnnnnnnnnnnnnnnnnnnnnnnnnnnnnnnnnnnnnnnnnnnnnnnnnnnnnnnnnnnnnnnnnnnnnnnnnnnnnnnnnnnnnnnnnnnnnnnnnnnnnnnnnnnnnnnnnnnnnnnnnnnnnnnnnnnnnnnnnnnnnnnnnnnnnnnnnnnnnnnnnnnnnnnnnnnnnnnnnnnnnnnnnnnnnnnnnnnnnnnnnnnnnnnnnnnnnnnnnnnnnnnnnnnnnnnnnnnnnnnnnnnnnnnnnnnnnnnnnnnnnnnnnnnnnnnnnnnnnnnnnnnnnnnnnnnnnnnnnnnnnnnnnnnnnnnnnnnnnnnnnnnnnnnnnnnnnnnnnnnnnnnnnnnnnnnnnnnnnnnnnnnnnnnnnnnnnnnnnnnnnnnnnnnnnnnnnnnnnnnnnnnnnnnnnnnnnnnnnnnnnnnnnnnnnnnnnnnnnnnnnnnnnnnnnnnnnnnnnnnnnnnnnnnnnnnnnnnnnnnnnnnnnnnnnnnnnnnnnnnnnnnnnnnnnnnnnnnnnnnnnnnnnnnnnnnnnnnnnnnnnnnnnnnnnnnnnnnnnnnnnnnnnnnnnnnnnnnnnnnnnnnnnnnnnnnnnnnnnnnnnnnnnnnnnnnnnnnnnnnnnnnnnnnnnnnnnnnnnnnnnnnnnnnnnnnnnnnnnnnnnnnnnnnnnnnnnnnnnnnnnnnnnnnnnnnnnnnnnnnnnnnnnnnnnnnnnnnnnnnnnnnnnnnnnnnnnnnnnnnnnnnnnnnnnnnnnnnnnnnnnnnnnnnnnnnnnnnnnnnnnnnnnnnnnnnnnnnnnnnnnnnnnnnnnnnnnnnnnnnnnnnnnnnnnnnnnnnnnnnnnnnnnnnnnnnnnnnnnnnnnnnnnnnnnnnnnnnnnnnnnnnnnnnnnnnnnnnnnnnnnnnnnnnnnnnnnnnnnnnnnnnnnnnnnnnnnnnnnnnnnnnnnnnnnnnnnnnnnnnnnnnnnnnnnnnnnnnnnnnnnnnnnnnnnnnnnnnnnnnnnnnnnnnnnnnnnnnnnnnnnnnnnnnnnnnnnnnnnnnnnnnnnnnnnnnnnnnnnnnnnnnnnnnnnnnnnnnnnnnnnnnnnnnnnnnnnnnnnnnnnnnnnnnnnnnnnnnnnnnnnnnnnnnnnnnnnnnnnnnnnnnnnnnnnnnnnnnnnnnnnnnnnnnnnnnnnnnnnnnnnnnnnnnnnnnnnnnnnnnnnnnnnnnnnnnnnnnnnnnnnnnnnnnnnnnnnnnnnnnnnnnnnnnnnnnnnnnnnnnnnnnnnnnnnnnnnnnnnnnnnnnnnnnnnnnnnnnnnnnnnnnnnnnnnnnnnnnnnnnnnnnnnnnnnnnnnnnnnnnnnnnnnnnnnnnnnnnnnnnnnnnnnnnnnnnnnnnnnnnnnnnnnnnnnnnnnnnnnnnnnnnnnnnnnnnnnnnnnnnnnnnnnnnnnnnnnnnnnnnnnnnnnnnnnnnnnnnnnnnnnnnnnnnnnnnnnnnnnnnnnnnnnnnnnnnnnnnnnnnnnnnnnnnnnnnnnnnnnnnnnnnnnnnnnnnnnnnnnnnnnnnnnnnnnnnnnnnnnnnnnnnnnnnnnnnnnnnnnnnnnnnnnnnnnnnnnnnnnnnnnnnnnnnnnnnnnnnnnnnnnnnnnnnnnnnnnnnnnnnnnnnnnnnnnnnnnnnnnnnnnnnnnnnnnnnnnnnnnnnnnnnnnnnnnnnnnnnnnnnnnnnnnnnnnnnnnnnnnnnnnnnnnnnnnnnnnnnnnnnnnnnnnnnnnnnnnnnnnnnnnnnnnnnnnnnnnnnnnnnnnnnnnnnnnnnnnnnnnnnnnnnnnnnnnnnnnnnnnnnnnnnnnnnnnnnnnnnnnnnnnnnnnnnnnnnnnnnnnnnnnnnnnnnnnnnnnnnnnnnnnnnnnnnnnnnnnnnnnnnnnnnnnnnnnnnnnnnnnnnnnnnnnnnnnnnnnnnnnnnnnnnnnnnnnnnnnnnnnnnnnnnnnnnnnnnnnnnnnnnnnnnnnnnnnnnnnnnnnnnnnnnnnnnnnnnnnnnnnnnnnnnnnnnnnnnnnnnnnnnnnnnnnnnnnnnnnnnnnnnnnnnnnnnnnnnnnnnnnnnnnnnnnnnnnnnnnnnnnnnnnnnnnnnnnnnnnnnnnnnnnnnnnnnnnnnnnnnnnnnnnnnnnnnnnnnnnnnnnnnnnnnnnnnnnnnnnnnnnnnnnnnnnnnnnnnnnnnnnnnnnnnnnnnnnnnnnnnnnnnnnnnnnnnnnnnnnnnnnnnnnnnnnnnnnnnnnnnnnnnnnnnnnnnnnnnnnnnnnnnnnnnnnnnnnnnnnnnnnnnnnnnnnnnnnnnnnnnnnnnnnnnnnnnnnnnnnnnnnnnnnnnnnnnnnnnnnnnnnnnnnnnnnnnnnnnnnnnnnnnnnnnnnnnnnnnnnnnnnnnnnnnnnnnnnnnnnnnnnnnnnnnnnnnnnnnnnnnnnnnnnnnnnnnnnnnnnnnnnnnnnnnnnnnnnnnnnnnnnnnnnnnnnnnnnnnnnnnnnnnnnnnnnnnnnnnnnnnnnnnnnnnnnnnnnnnnnnnnnnnnnnnnnnnnnnnnnnnnnnnnnnnnnnnnnnnnnnnnnnnnnnnnnnnnnnnnnnnnnnnnnnnnnnnnnnnnnnnnnnnnnnnnnnnnnnnnnnnnnnnnnnnnnnnnnnnnnnnnnnnnnnnnnnnnnnnnnnnnnnnnnnnnnnnnnnnnnnnnnnnnnnnnnnnnnnnnnnnnnnnnnnnnnnnnnnnnnnnnnnnnnnnnnnnnnnnnnnnnnnnnnnnnnnnnnnnnnnnnnnnnnnnnnnnnnnnnnnnnnnnnnnnnnnnnnnnnnnnnnnnnnnnnnnnnnnnnnnnnnnnnnnnnnnnnnnnnnnnnnnnnnnnnnnnnnnnnnnnnnnnnnnnnnnnnnnnnnnnnnnnnnnnnnnnnnnnnnnnnnnnnnnnnnnnnnnnnnnnnnnnnnnnnnnnnnnnnnnnnnnnnnnnnnnnnnnnnnnnnnnnnnnnnnnnnnnnnnnnnnnnnnnnnnnnnnnnnnnnnnnnnnnnnnnnnnnnnnnnnnnnnnnnnnnnnnnnnnnnnnnnnnnnnnnnnnnnnnnnnnnnnnnnnnnnnnnnnnnnnnnnnnnnnnnnnnnnnnnnnnnnnnnnnnnnnnnnnnnnnnnnnnnnnnnnnnnnnnnnnnnnnnnnnnnnnnnnnnnnnnnnnnnnnnnnnnnnnnnnnnnnnnnnnnnnnnnnnnnnnnnnnnnnnnnnnnnnnnnnnnnnnnnnnnnnnnnnnnnnnnnnnnnnnnnnnnnnnnnnnnnnnnnnnnnnnnnnnnnnnnnnnnnnnnnnnnnnnnnnnnnnnnnnnnnnnnnnnnnnnnnnnnnnnnnnnnnnnnnnnnnnnnnnnnnnnnnnnnnnnnnnnnnnnnnnnnnnnnnnnnnnnnnnnnnnnnnnnnnnnnnnnnnnnnnnnnnnnnnnnnnnnnnnnnnnnnnnnnnnnnnnnnnnnnnnnnnnnnnnnnnnnnnnnnnnnnnnnnnnnnnnnnnnnnnnnnnnnnnnnnnnnnnnnnnnnnnnnnnnnnnnnnnnnnnnnnnnnnnnnnnnnnnnnnnnnnnnnnnnnnnnnnnnnnnnnnnnnnnnnnnnnnnnnnnnnnnnnnnnnnnnnnnnnnnnnnnnnnnnnnnnnnnnnnnnnnnnnnnnnnnnnnnnnnnnnnnnnnnnnnnnnnnnnnnnnnnnnnnnnnnnnnnnnnnnnnnnnnnnnnnnnnnnnnnnnnnnnnnnnnnnnnnnnnnnnnnnnnnnnnnnnnnnnnnnnnnnnnnnnnnnnnnnnnnnnnnnnnnnnnnnnnnnnnnnnnnnnnnnnnnnnnnnnnnnnnnnnnnnnnnnnnnnnnnnnnnnnnnnnnnnnnnnnnnnnnnnnnnnnnnnnnnnnnnnnnnnnnnnnnnnnnnnnnnnnnnnnnnnnnnnnnnnnnnnnnnnnnnnnnnnnnnnnnnnnnnnnnnnnnnnnnnnnnnnnnnnnnnnnnnnnnnnnnnnnnnnnnnnnnnnnnnnnnnnnnnnnnnnnnnnnnnnnnnnnnnnnnnnnnnnnnnnnnnnnnnnnnnnnnnnnnnnnnnnnnnnnnnnnnnnnnnnnnnnnnnnnnnnnnnnnnnnnnnnnnnnnnnnnnnnnnnnnnnnnnnnnnnnnnnnnnnnnnnnnnnnnnnnnnnnnnnnnnnnnnnnnnnnnnnnnnnnnnnnnnnnnnnnnnnnnnnnnnnnnnnnnnnnnnnnnnnnnnnnnnnnnnnnnnnnnnnnnnnnnnnnnnnnnnnnnnnnnnnnnnnnnnnnnnnnnnnnnnnnnnnnnnnnnnnnnnnnnnnnnnnnnnnnnnnnnnnnnnnnnnnnnnnnnnnnnnnnnnnnnnnnnnnnnnnnnnnnnnnnnnnnnnnnnnnnnnnnnnnnnnnnnnnnnnnnnnnnnnnnnnnnnnnnnnnnnnnnnnnnnnnnnnnnnnnnnnnnnnnnnnnnnnnnnnnnnnnnnnnnnnnnnnnnnnnnnnnnnnnnnnnnnnnnnnnnnnnnnnnnnnnnnnnnnnnnnnnnnnnnnnnnnnnnnnnnnnnnnnnnnnnnnnnnnnnnnnnnnnnnnnnnnnnnnnnnnnnnnnnnnnnnnnnnnnnnnnnnnnnnnnnnnnnnnnnnnnnnnnnnnnnnnnnnnnnnnnnnnnnnnnnnnnnnnnnnnnnnnnnnnnnnnnnnnnnnnnnnnnnnnnnnnnnnnnnnnnnnnnnnnnnnnnnnnnnnnnnnnnnnnnnnnnnnnnnnnnnnnnnnnnnnnnnnnnnnnnnnnnnnnnnnnnnnnnnnnnnnnnnnnnnnnnnnnnnnnnnnnnnnnnnnnnnnnnnnnnnnnnnnnnnnnnnnnnnnnnnnnnnnnnnnnnnnnnnnnnnnnnnnnnnnnnnnnnnnnnnnnnnnnnnnnnnnnnnnnnnnnnnnnnnnnnnnnnnnnnnnnnnnnnnnnnnnnnnnnnnnnnnnnnnnnnnnnnnnnnnnnnnnnnnnnnnnnnnnnnnnnnnnnnnnnnnnnnnnnnnnnnnnnnnnnnnnnnnnnnnnnnnnnnnnnnnnnnnnnnnnnnnnnnnnnnnnnnnnnnnnnnnnnnnnnnnnnnnnnnnnnnnnnnnnnnnnnnnnnnnnnnnnnnnnnnnnnnnnnnnnnnnnnnnnnnnnnnnnnnnnnnnnnnnnnnnnnnnnnnnnnnnnnnnnnnnnnnnnnnnnnnnnnnnnnnnnnnnnnnnnnnnnnnnnnnnnnnnnnnnnnnnnnnnnnnnnnnnnnnnnnnnnnnnnnnnnnnnnnnnnnnnnnnnnnnnnnnnnnnnnnnnnnnnnnnnnnnnnnnnnnnnnnnnnnnnnnnnnnnnnnnnnnnnnnnnnnnnnnnnnnnnnnnnnnnnnnnnnnnnnnnnnnnnnnnnnnnnnnnnnnnnnnnnnnnnnnnnnnnnnnnnnnnnnnnnnnnnnnnnnnnnnnnnnnnnnnnnnnnnnnnnnnnnnnnnnnnnnnnnnnnnnnnnnnnnnnnnnnnnnnnnnnnnnnnnnnnnnnnnnnnnnnnnnnnnnnnnnnnnnnnnnnnnnnnnnnnnnnnnnnnnnnnnnnnnnnnnnnnnnnnnnnnnnnnnnnnnnnnnnnnnnnnnnnnnnnnnnnnnnnnnnnnnnnnnnnnnnnnnnnnnnnnnnnnnnnnnnnnnnnnnnnnnnnnnnnnnnnnnnnnnnnnnnnnnnnnnnnnnnnnnnnnnnnnnnnnnnnnnnnnnnnnnnnnnnnnnnnnnnnnnnnnnnnnnnnnnnnnnnnnnnnnnnnnnnnnnnnnnnnnnnnnnnnnnnnnnnnnnnnnnnnnnnnnnnnnnnnnnnnnnnnnnnnnnnnnnnnnnnnnnnnnnnnnnnnnnnnnnnnnnnnnnnnnnnnnnnnnnnnnnnnnnnnnnnnnnnnnnnnnnnnnnnnnnnnnnnnnnnnnnnnnnnnnnnnnnnnnnnnnnnnnnnnnnnnnnnnnnnnnnnnnnnnnnnnnnnnnnnnnnnnnnnnnnnnnnnnnnnnnnnnnnnnnnnnnnnnnnnnnnnnnnnnnnnnnnnnnnnnnnnnnnnnnnnnnnnnnnnnnnnnnnnnnnnnnnnnnnnnnnnnnnnnnnnnnnnnnnnnnnnnnnnnnnnnnnnnnnnnnnnnnnnnnnnnnnnnnnnnnnnnnnnnnnnnnnnnnnnnnnnnnnnnnnnnnnnnnnnnnnnnnnnnnnnnnnnnnnnnnnnnnnnnnnnnnnnnnnnnnnnnnnnnnnnnnnnnnnnnnnnnnnnnnnnnnnnnnnnnnnnnnnnnnnnnnnnnnnnnnnnnnnnnnnnnnnnnnnnnnnnnnnnnnnnnnnnnnnnnnnnnnnnnnnnnnnnnnnnnnnnnnnnnnnnnnnnnnnnnnnnnnnnnnnnnnnnnnnnnnnnnnnnnnnnnnnnnnnnnnnnnnnnnnnnnnnnnnnnnnnnnnnnnnnnnnnnnnnnnnnnnnnnnnnnnnnnnnnnnnnnnnnnnnnnnnnnnnnnnnnnnnnnnnnnnnnnnnnnnnnnnnnnnnnnnnnnnnnnnnnnnnnnnnnnnnnnnnnnnnnnnnnnnnnnnnnnnnnnnnnnnnnnnnnnnnnnnnnnnnnnnnnnnnnnnnnnnnnnnnnnnnnnnnnnnnnnnnnnnnnnnnnnnnnnnnnnnnnnnnnnnnnnnnnnnnnnnnnnnnnnnnnnnnnnnnnnnnnnnnnnnnnnnnnnnnnnnnnnnnnnnnnnnnnnnnnnnnnnnnnnnnnnnnnnnnnnnnnnnnnnnnnnnnnnnnnnnnnnnnnnnnnnnnnnnnnnnnnnnnnnnnnnnnnnnnnnnnnnnnnnnnnnnnnnnnnnnnnnnnnnnnnnnnnnnnnnnnnnnnnnnnnnnnnnnnnnnnnnnnnnnnnnnnnnnnnnnnnnnnnnnnnnnnnnnnnnnnnnnnnnnnnnnnnnnnnnnnnnnnnnnnnnnnnnnnnnnnnnnnnnnnnnnnnnnnnnnnnnnnnnnnnnnnnnnnnnnnnnnnnnnnnnnnnnnnnnnnnnnnnnnnnnnnnnnnnnnnnnnnnnnnnnnnnnnnnnnnnnnnnnnnnnnnnnnnnnnnnnnnnnnnnnnnnnnnnnnnnnnnnnnnnnnnnnnnnnnnnnnnnnnnnnnnnnnnnnnnnnnnnnnnnnnnnnnnnnnnnnnnnnnnnnnnnnnnnnnnnnnnnnnnnnnnnnnnnnnnnnnnnnnnnnnnnnnnnnnnnnnnnnnnnnnnnnnnnnnnnnnnnnnnnnnnnnnnnnnnnnnnnnnnnnnnnnnnnnnnnnnnnnnnnnnnnnnnnnnnnnnnnnnnnnnnnnnnnnnnnnnnnnnnnnnnnnnnnnnnnnnnnnnnnnnnnnnnnnnnnnnnnnnnnnnnnnnnnnnnnnnnnnnnnnnnnnnnnnnnnnnnnnnnnnnnnnnnnnnnnnnnnnnnnnnnnnnnnnnnnnnnnnnnnnnnnnnnnnnnnnnnnnnnnnnnnnnnnnnnnnnnnnnnnnnnnnnnnnnnnnnnnnnnnnnnnnnnnnnnnnnnnnnnnnnnnnnnnnnnnnnnnnnnnnnnnnnnnnnnnnnnnnnnnnnnnnnnnnnnnnnnnnnnnnnnnnnnnnnnnnnnnnnnnnnnnnnnnnnnnnnnnnnnnnnnnnnnnnnnnnnnnnnnnnnnnnnnnnnnnnnnnnnnnnnnnnnnnnnnnnnnnnnnnnnnnnnnnnnnnnnnnnnnnnnnnnnnnnnnnnnnnnnnnnnnnnnnnnnnnnnnnnnnnnnnnnnnnnnnnnnnnnnnnnnnnnnnnnnnnnnnnnnnnnnnnnnnnnnnnnnnnnnnnnnnnnnnnnnnnnnnnnnnnnnnnnnnnnnnnnnnnnnnnnnnnnnnnnnnnnnnnnnnnnnnnnnnnnnnnnnnnnnnnnnnnnnnnnnnnnnnnnnnnnnnnnnnnnnnnnnnnnnnnnnnnnnnnnnnnnnnnnnnnnnnnnnnnnnnnnnnnnnnnnnnnnnnnnnnnnnnnnnnnnnnnnnnnnnnnnnnnnnnnnnnnnnnnnnnnnnnnnnnnnnnnnnnnnnnnnnnnnnnnnnnnnnnnnnnnnnnnnnnnnnnnnnnnnnnnnnnnnnnnnnnnnnnnnnnnnnnnnnnnnnnnnnnnnnnnnnnnnnnnnnnnnnnnnnnnnnnnnnnnnnnnnnnnnnnnnnnnnnnnnnnnnnnnnnnnnnnnnnnnnnnnnnnnnnnnnnnnnnnnnnnnnnnnnnnnnnnnnnnnnnnnnnnnnnnnnnnnnnnnnnnnnnnnnnnnnnnnnnnnnnnnnnnnnnnnnnnnnnnnnnnnnnnnnnnnnnnnnnnnnnnnnnnnnnnnnnnnnnnnnnnnnnnnnnnnnnnnnnnnnnnnnnnnnnnnnnnnnnnnnnnnnnnnnnnnnnnnnnnnnnnnnnnnnnnnnnnnnnnnnnnnnnnnnnnnnnnnnnnnnnnnnnnnnnnnnnnnnnnnnnnnnnnnnnnnnnnnnnnnnnnnnnnnnnnnnnnnnnnnnnnnnnnnnnnnnnnnnnnnnnnnnnnnnnnnnnnnnnnnnnnnnnnnnnnnnnnnnnnnnnnnnnnnnnnnnnnnnnnnnnnnnnnnnnnnnnnnnnnnnnnnnnnnnnnnnnnnnnnnnnnnnnnnnnnnnnnnnnnnnnnnnnnnnnnnnnnnnnnnnnnnnnnnnnnnnnnnnnnnnnnnnnnnnnnnnnnnnnnnnnnnnnnnnnnnnnnnnnnnnnnnnnnnnnnnnnnnnnnnnnnnnnnnnnnnnnnnnnnnnnnnnnnnnnnnnnnnnnnnnnnnnnnnnnnnnnnnnnnnnnnnnnnnnnnnnnnnnnnnnnnnnnnnnnnnnnnnnnnnnnnnnnnnnnnnnnnnnnnnnnnnnnnnnnnnnnnnnnnnnnnnnnnnnnnnnnnnnnnnnnnnnnnnnnnnnnnnnnnnnnnnnnnnnnnnnnnnnnnnnnnnnnnnnnnnnnnnnnnnnnnnnnnnnnnnnnnnnnnnnnnnnnnnnnnnnnnnnnnnnnnnnnnnnnnnnnnnnnnnnnnnnnnnnnnnnnnnnnnnnnnnnnnnnnnnnnnnnnnnnnnnnnnnnnnnnnnnnnnnnnnnnnnnnnnnnnnnnnnnnnnnnnnnnnnnnnnnnnnnnnnnnnnnnnnnnnnnnnnnnnnnnnnnnnnnnnnnnnnnnnnnnnnnnnnnnnnnnnnnnnnnnnnnnnnnnnnnnnnnnnnnnnnnnnnnnnnnnnnnnnnnnnnnnnnnnnnnnnnnnnnnnnnnnnnnnnnnnnnnnnnnnnnnnnnnnnnnnnnnnnnnnnnnnnnnnnnnnnnnnnnnnnnnnnnnnnnnnnnnnnnnnnnnnnnnnnnnnnnnnnnnnnnnnnnnnnnnnnnnnnnnnnnnnnnnnnnnnnnnnnnnnnnnnnnnnnnnnnnnnnnnnnnnnnnnnnnnnnnnnnnnnnnnnnnnnnnnnnnnnnnnnnnnnnnnnnnnnnnnnnnnnnnnnnnnnnnnnnnnnnnnnnnnnnnnnnnnnnnnnnnnnnnnnnnnnnnnnnnnnnnnnnnnnnnnnnnnnnnnnnnnnnnnnnnnnnnnnnnnnnnnnnnnnnnnnnnnnnnnnnnnnnnnnnnnnnnnnnnnnnnnnnnnnnnnnnnnnnnnnnnnnnnnnnnnnnnnnnnnnnnnnnnnnnnnnnnnnnnnnnnnnnnnnnnnnnnnnnnnnnnnnnnnnnnnnnnnnnnnnnnnnnnnnnnnnnnnnnnnnnnnnnnnnnnnnnnnnnnnnnnnnnnnnnnnnnnnnnnnnnnnnnnnnnnnnnnnnnnnnnnnnnnnnnnnnnnnnnnnnnnnnnnnnnnnnnnnnnnnnnnnnnnnnnnnnnnnnnnnnnnnnnnnnnnnnnnnnnnnnnnnnnnnnnnnnnnnnnnnnnnnnnnnnnnnnnnnnnnnnnnnnnnnnnnnnnnnnnnnnnnnnnnnnnnnnnnnnnnnnnnnnnnnnnnnnnnnnnnnnnnnnnnnnnnnnnnnnnnnnnnnnnnnnnnnnnnnnnnnnnnnnnnnnnnnnnnnnnnnnnnnnnnnnnnnnnnnnnnnnnnnnnnnnnnnnnnnnnnnnnnnnnnnnnnnnnnnnnnnnnnnnnnnnnnnnnnnnnnnnnnnnnnnnnnnnnnnnnnnnnnnnnnnnnnnnnnnnnnnnnnnnnnnnnnnnnnnnnnnnnnnnnnnnnnnnnnnnnnnnnnnnnnnnnnnnnnnnnnnnnnnnnnnnnnnnnnnnnnnnnnnnnnnnnnnnnnnnnnnnnnnnnnnnnnnnnnnnnnnnnnnnnnnnnnnnnnnnnnnnnnnnnnnnnnnnnnnnnnnnnnnnnnnnnnnnnnnnnnnnnnnnnnnnnnnnnnnnnnnnnnnnnnnnnnnnnnnnnnnnnnnnnnnnnnnnnnnnnnnnnnnnnnnnnnnnnnnnnnnnnnnnnnnnnnnnnnnnnnnnnnnnnnnnnnnnnnnnnnnnnnnnnnnnnnnnnnnnnnnnnnnnnnnnnnnnnnnnnnnnnnnnnnnnnnnnnnnnnnnnnnnnnnnnnnnnnnnnnnnnnnnnnnnnnnnnnnnnnnnnnnnnnnnnnnnnnnnnnnnnnnnnnnnnnnnnnnnnnnnnnnnnnnnnnnnnnnnnnnnnnnnnnnnnnnnnnnnnnnnnnnnnnnnnnnnnnnnnnnnnnnnnnnnnnnnnnnnnnnnnnnnnnnnnnnnnnnnnnnnnnnnnnnnnnnnnnnnnnnnnnnnnnnnnnnnnnnnnnnnnnnnnnnnnnnnnnnnnnnnnnnnnnnnnnnnnnnnnnnnnnnnnnnnnnnnnnnnnnnnnnnnnnnnnnnnnnnnnnnnnnnnnnnnnnnnnnnnnnnnnnnnnnnnnnnnnnnnnnnnnnnnnnnnnnnnnnnnnnnnnnnnnnnnnnnnnnnnnnnnnnnnnnnnnnnnnnnnnnnnnnnnnnnnnnnnnnnnnnnnnnnnnnnnnnnnnnnnnnnnnnnnnnnnnnnnnnnnnnnnnnnnnnnnnnnnnnnnnnnnnnnnnnnnnnnnnnnnnnnnnnnnnnnnnnnnnnnnnnnnnnnnnnnnnnnnnnnnnnnnnnnnnnnnnnnnnnnnnnnnnnnnnnnnnnnnnnnnnnnnnnnnnnnnnnnnnnnnnnnnnnnnnnnnnnnnnnnnnnnnnnnnnnnnnnnnnnnnnnnnnnnnnnnnnnnnnnnnnnnnnnnnnnnnnnnnnnnnnnnnnnnnnnnnnnnnnnnnnnnnnnnnnnnnnnnnnnnnnnnnnnnnnnnnnnnnnnnnnnnnnnnnnnnnnnnnnnnnnnnnnnnnnnnnnnnnnnnnnnnnnnnnnnnnnnnnnnnnnnnnnnnnnnnnnnnnnnnnnnnnnnnnnnnnnnnnnnnnnnnnnnnnnnnnnnnnnnnnnnnnnnnnnnnnnnnnnnnnnnnnnnnnnnnnnnnnnnnnnnnnnnnnnnnnnnnnnnnnnnnnnnnnnnnnnnnnnnnnnnnnnnnnnnnnnnnnnnnnnnnnnnnnnnnnnnnnnnnnnnnnnnnnnnnnnnnnnnnnnnnnnnnnnnnnnnnnnnnnnnnnnnnnnnnnnnnnnnnnnnnnnnnnnnnnnnnnnnnnnnnnnnnnnnnnnnnnnnnnnnnnnnnnnnnnnnnnnnnnnnnnnnnnnnnnnnnnnnnnnnnnnnnnnnnnnnnnnnnnnnnnnnnnnnnnnnnnnnnnnnnnnnnnnnnnnnnnnnnnnnnnnnnnnnnnnnnnnnnnnnnnnnnnnnnnnnnnnnnnnnnnnnnnnnnnnnnnnnnnnnnnnnnnnnnnnnnnnnnnnnnnnnnnnnnnnnnnnnnnnnnnnnnnnnnnnnnnnnnnnnnnnnnnnnnnnnnnnnnnnnnnnnnnnnnnnnnnnnnnnnnnnnnnnnnnnnnnnnnnnnnnnnnnnnnnnnnnnnnnnnnnnnnnnnnnnnnnnnnnnnnnnnnnnnnnnnnnnnnnnnnnnnnnnnnnnnnnnnnnnnnnnnnnnnnnnnnnnnnnnnnnnnnnnnnnnnnnnnnnnnnnnnnnnnnnnnnnnnnnnnnnnnnnnnnnnnnnnnnnnnnnnnnnnnnnnnnnnnnnnnnnnnnnnnnnnnnnnnnnnnnnnnnnnnnnnnnnnnnnnnnnnnnnnnnnnnnnnnnnnnnnnnnnnnnnnnnnnnnnnnnnnnnnnnnnnnnnnnnnnnnnnnnnnnnnnnnnnnnnnnnnnnnnnnnnnnnnnnnnnnnnnnnnnnnnnnnnnnnnnnnnnnnnnnnnnnnnnnnnnnnnnnnnnnnnnnnnnnnnnnnnnnnnnnnnnnnnnnnnnnnnnnnnnnnnnnnnnnnnnnnnnnnnnnnnnnnnnnnnnnnnnnnnnnnnnnnnnnnnnnnnnnnnnnnnnnnnnnnnnnnnnnnnnnnnnnnnnnnnnnnnnnnnnnnnnnnnnnnnnnnnnnnnnnnnnnnnnnnnnnnnnnnnnnnnnnnnnnnnnnnnnnnnnnnnnnnnnnnnnnnnnnnnnnnnnnnnnnnnnnnnnnnnnnnnnnnnnnnnnnnnnnnnnnnnnnnnnnnnnnnnnnnnnnnnnnnnnnnnnnnnnnnnnnnnnnnnnnnnnnnnnnnnnnnnnnnnnnnnnnnnnnnnnnnnnnnnnnnnnnnnnnnnnnnnnnnnnnnnnnnnnnnnnnnnnnnnnnnnnnnnnnnnnnnnnnnnnnnnnnnnnnnnnnnnnnnnnnnnnnnnnnnnnnnnnnnnnnnnnnnnnnnnnnnnnnnnnnnnnnnnnnnnnnnnnnnnnnnnnnnnnnnnnnnnnnnnnnnnnnnnnnnnnnnnnnnnnnnnnnnnnnnnnnnnnnnnnnnnnnnnnnnnnnnnnnnnnnnnnnnnnnnnnnnnnnnnnnnnnnnnnnnnnnnnnnnnnnnnnnnnnnnnnnnnnnnnnnnnnnnnnnnnnnnnnnnnnnnnnnnnnnnnnnnnnnnnnnnnnnnnnnnnnnnnnnnnnnnnnnnnnnnnnnnnnnnnnnnnnnnnnnnnnnnnnnnnnnnnnnnnnnnnnnnnnnnnnnnnnnnnnnnnnnnnnnnnnnnnnnnnnnnnnnnnnnnnnnnnnnnnnnnnnnnnnnnnnnnnnnnnnnnnnnnnnnnnnnnnnnnnnnnnnnnnnnnnnnnnnnnnnnnnnnnnnnnnnnnnnnnnnnnnnnnnnnnnnnnnnnnnnnnnnnnnnnnnnnnnnnnnnnnnnnnnnnnnnnnnnnnnnnnnnnnnnnnnnnnnnnnnnnnnnnnnnnnnnnnnnnnnnnnnnnnnnnnnnnnnnnnnnnnnnnnnnnnnnnnnnnnnnnnnnnnnnnnnnnnnnnnnnnnnnnnnnnnnnnnnnnnnnnnnnnnnnnnnnnnnnnnnnnnnnnnnnnnnnnnnnnnnnnnnnnnnnnnnnnnnnnnnnnnnnnnnnnnnnnnnnnnnnnnnnnnnnnnnnnnnnnnnnnnnnnnnnnnnnnnnnnnnnnnnnnnnnnnnnnnnnnnnnnnnnnnnnnnnnnnnnnnnnnnnnnnnnnnnnnnnnnnnnnnnnnnnnnnnnnnnnnnnnnnnnnnnnnnnnnnnnnnnnnnnnnnnnnnnnnnnnnnnnnnnnnnnnnnnnnnnnnnnnnnnnnnnnnnnnnnnnnnnnnnnnnnnnnnnnnnnnnnnnnnnnnnnnnnnnnnnnnnnnnnnnnnnnnnnnnnnnnnnnnnnnnnnnnnnnnnnnnnnnnnnnnnnnnnnnnnnnnnnnnnnnnnnnnnnnnnnnnnnnnnnnnnnnnnnnnnnnnnnnnnnnnnnnnnnnnnnnnnnnnnnnnnnnnnnnnnnnnnnnnnnnnnnnnnnnnnnnnnnnnnnnnnnnnnnnnnnnnnnnnnnnnnnnnnnnnnnnnnnnnnnnnnnnnnnnnnnnnnnnnnnnnnnnnnnnnnnnnnnnnnnnnnnnnnnnnnnnnnnnnnnnnnnnnnnnnnnnnnnnnnnnnnnnnnnnnnnnnnnnnnnnnnnnnnnnnnnnnnnnnnnnnnnnnnnnnnnnnnnnnnnnnnnnnnnnnnnnnnnnnnnnnnnnnnnnnnnnnnnnnnnnnnnnnnnnnnnnnnnnnnnnnnnnnnnnnnnnnnnnnnnnnnnnnnnnnnnnnnnnnnnnnnnnnnnnnnnnnnnnnnnnnnnnnnnnnnnnnnnnnnnnnnnnnnnnnnnnnnnnnnnnnnnnnnnnnnnnnnnnnnnnnnnnnnnnnnnnnnnnnnnnnnnnnnnnnnnnnnnnnnnnnnnnnnnnnnnnnnnnnnnnnnnnnnnnnnnnnnnnnnnnnnnnnnnnnnnnnnnnnnnnnnnnnnnnnnnnnnnnnnnnnnnnnnnnnnnnnnnnnnnnnnnnnnnnnnnnnnnnnnnnnnnnnnnnnnnnnnnnnnnnnnnnnnnnnnnnnnnnnnnnnnnnnnnnnnnnnnnnnnnnnnnnnnnnnnnnnnnnnnnnnnnnnnnnnnnnnnnnnnnnnnnnnnnnnnnnnnnnnnnnnnnnnnnnnnnnnnnnnnnnnnnnnnnnnnnnnnnnnnnnnnnnnnnnnnnnnnnnnnnnnnnnnnnnnnnnnnnnnnnnnnnnnnnnnnnnnnnnnnnnnnnnnnnnnnnnnnnnnnnnnnnnnnnnnnnnnnnnnnnnnnnnnnnnnnnnnnnnnnnnnnnnnnnnnnnnnnnnnnnnnnnnnnnnnnnnnnnnnnnnnnnnnnnnnnnnnnnnnnnnnnnnnnnnnnnnnnnnnnnnnnnnnnnnnnnnnnnnnnnnnnnnnnnnnnnnnnnnnnnnnnnnnnnnnnnnnnnnnnnnnnnnnnnnnnnnnnnnnnnnnnnnnnnnnnnnnnnnnnnnnnnnnnnnnnnnnnnnnnnnnnnnnnnnnnnnnnnnnnnnnnnnnnnnnnnnnnnnnnnnnnnnnnnnnnnnnnnnnnnnnnnnnnnnnnnnnnnnnnnnnnnnnnnnnnnnnnnnnnnnnnnnnnnnnnnnnnnnnnnnnnnnnnnnnnnnnnnnnnnnnnnnnnnnnnnnnnnnnnnnnnnnnnnnnnnnnnnnnnnnnnnnnnnnnnnnnnnnnnnnnnnnnnnnnnnnnnnnnnnnnnnnnnnnnnnnnnnnnnnnnnnnnnnnnnnnnnnnnnnnnnnnnnnnnnnnnnnnnnnnnnnnnnnnnnnnnnnnnnnnnnnnnnnnnnnnnnnnnnnnnnnnnnnnnnnnnnnnnnnnnnnnnnnnnnnnnnnnnnnnnnnnnnnnnnnnnnnnnnnnnnnnnnnnnnnnnnnnnnnnnnnnnnnnnnnnnnnnnnnnnnnnnnnnnnnnnnnnnnnnnnnnnnnnnnnnnnnnnnnnnnnnnnnnnnnnnnnnnnnnnnnnnnnnnnnnnnnnnnnnnnnnnnnnnnnnnnnnnnnnnnnnnnnnnnnnnnnnnnnnnnnnnnnnnnnnnnnnnnnnnnnnnnnnnnnnnnnnnnnnnnnnnnnnnnnnnnnnnnnnnnnnnnnnnnnnnnnnnnnnnnnnnnnnnnnnnnnnnnnnnnnnnnnnnnnnnnnnnnnnnnnnnnnnnnnnnnnnnnnnnnnnnnnnnnnnnnnnnnnnnnnnnnnnnnnnnnnnnnnnnnnnnnnnnnnnnnnnnnnnnnnnnnnnnnnnnnnnnnnnnnnnnnnnnnnnnnnnnnnnnnnnnnnnnnnnnnnnnnnnnnnnnnnnnnnnnnnnnnnnnnnnnnnnnnnnnnnnnnnnnnnnnnnnnnnnnnnnnnnnnnnnnnnnnnnnnnnnnnnnnnnnnnnnnnnnnnnnnnnnnnnnnnnnnnnnnnnnnnnnnnnnnnnnnnnnnnnnnnnnnnnnnnnnnnnnnnnnnnnnnnnnnnnnnnnnnnnnnnnnnnnnnnnnnnnnnnnnnnnnnnnnnnnnnnnnnnnnnnnnnnnnnnnnnnnnnnnnnnnnnnnnnnnnnnnnnnnnnnnnnnnnnnnnnnnnnnnnnnnnnnnnnnnnnnnnnnnnnnnnnnnnnnnnnnnnnnnnnnnnnnnnnnnnnnnnnnnnnnnnnnnnnnnnnnnnnnnnnnnnnnnnnnnnnnnnnnnnnnnnnnnnnnnnnnnnnnnnnnnnnnnnnnnnnnnnnnnnnnnnnnnnnnnnnnnnnnnnnnnnnnnnnnnnnnnnnnnnnnnnnnnnnnnnnnnnnnnnnnnnnnnnnnnnnnnnnnnnnnnnnnnnnnnnnnnnnnnnnnnnnnnnnnnnnnnnnnnnnnnnnnnnnnnnnnnnnnnnnnnnnnnnnnnnnnnnnnnnnnnnnnnnnnnnnnnnnnnnnnnnnnnnnnnnnnnnnnnnnnnnnnnnnnnnnnnnnnnnnnnnnnnnnnnnnnnnnnnnnnnnnnnnnnnnnnnnnnnnnnnnnnnnnnnnnnnnnnnnnnnnnnnnnnnnnnnnnnnnnnnnnnnnnnnnnnnnnnnnnnnnnnnnnnnnnnnnnnnnnnnnnnnnnnnnnnnnnnnnnnnnnnnnnnnnnnnnnnnnnnnnnnnnnnnnnnnnnnnnnnnnnnnnnnnnnnnnnnnnnnnnnnnnnnnnnnnnnnnnnnnnnnnnnnnnnnnnnnnnnnnnnnnnnnnnnnnnnnnnnnnnnnnnnnnnnnnnnnnnnnnnnnnnnnnnnnnnnnnnnnnnnnnnnnnnnnnnnnnnnnnnnnnnnnnnnnnnnnnnnnnnnnnnnnnnnnnnnnnnnnnnnnnnnnnnnnnnnnnnnnnnnnnnnnnnnnnnnnnnnnnnnnnnnnnnnnnnnnnnnnnnnnnnnnnnnnnnnnnnnnnnnnnnnnnnnnnnnnnnnnnnnnnnnnnnnnnnnnnnnnnnnnnnnnnnnnnnnnnnnnnnnnnnnnnnnnnnnnnnnnnnnnnnnnnnnnnnnnnnnnnnnnnnnnnnnnnnnnnnnnnnnnnnnnnnnnnnnnnnnnnnnnnnnnnnnnnnnnnnnnnnnnnnnnnnnnnnnnnnnnnnnnnnnnnnnnnnnnnnnnnnnnnnnnnnnnnnnnnnnnnnnnnnnnnnnnnnnnnnnnnnnnnnnnnnnnnnnnnnnnnnnnnnnnnnnnnnnnnnnnnnnnnnnnnnnnnnnnnnnnnnnnnnnnnnnnnnnnnnnnnnnnnnnnnnnnnnnnnnnnnnnnnnnnnnnnnnnnnnnnnnnnnnnnnnnnnnnnnnnnnnnnnnnnnnnnnnnnnnnnnnnnnnnnnnnnnnnnnnnnnnnnnnnnnnnnnnnnnnnnnnnnnnnnnnnnnnnnnnnnnnnnnnnnnnnnnnnnnnnnnnnnnnnnnnnnnnnnnnnnnnnnnnnnnnnnnnnnnnnnnnnnnnnnnnnnnnnnnnnnnnnnnnnnnnnnnnnnnnnnnnnnnnnnnnnnnnnnnnnnnnnnnnnnnnnnnnnnnnnnnnnnnnnnnnnnnnnnnnnnnnnnnnnnnnnnnnnnnnnnnnnnnnnnnnnnnnnnnnnnnnnnnnnnnnnnnnnnnnnnnnnnnnnnnnnnnnnnnnnnnnnnnnnnnnnnnnnnnnnnnnnnnnnnnnnnnnnnnnnnnnnnnnnnnnnnnnnnnnnnnnnnnnnnnnnnnnnnnnnnnnnnnnnnnnnnnnnnnnnnnnnnnnnnnnnnnnnnnnnnnnnnnnnnnnnnnnnnnnnnnnnnnnnnnnnnnnnnnnnnnnnnnnnnnnnnnnnnnnnnnnnnnnnnnnnnnnnnnnnnnnnnnnnnnnnnnnnnnnnnnnnnnnnnnnnnnnnnnnnnnnnnnnnnnnnnnnnnnnnnnnnnnnnnnnnnnnnnnnnnnnnnnnnnnnnnnnnnnnnnnnnnnnnnnnnnnnnnnnnnnnnnnnnnnnnnnnnnnnnnnnnnnnnnnnnnnnnnnnnnnnnnnnnnnnnnnnnnnnnnnnnnnnnnnnnnnnnnnnnnnnnnnnnnnnnnnnnnnnnnnnnnnnnnnnnnnnnnnnnnnnnnnnnnnnnnnnnnnnnnnnnnnnnnnnnnnnnnnnnnnnnnnnnnnnnnnnnnnnnnnnnnnnnnnnnnnnnnnnnnnnnnnnnnnnnnnnnnnnnnnnnnnnnnnnnnnnnnnnnnnnnnnnnnnnnnnnnnnnnnnnnnnnnnnnnnnnnnnnnnnnnnnnnnnnnnnnnnnnnnnnnnnnnnnnnnnnnnnnnnnnnnnnnnnnnnnnnnnnnnnnnnnnnnnnnnnnnnnnnnnnnnnnnnnnnnnnnnnnnnnnnnnnnnnnnnnnnnnnnnnnnnnnnnnnnnnnnnnnnnnnnnnnnnnnnnnnnnnnnnnnnnnnnnnnnnnnnnnnnnnnnnnnnnnnnnnnnnnnnnnnnnnnnnnnnnnnnnnnnnnnnnnnnnnnnnnnnnnnnnnnnnnnnnnnnnnnnnnnnnnnnnnnnnnnnnnnnnnnnnnnnnnnnnnnnnnnnnnnnnnnnnnnnnnnnnnnnnnnnnnnnnnnnnnnnnnnnnnnnnnnnnnnnnnnnnnnnnnnnnnnnnnnnnnnnnnnnnnnnnnnnnnnnnnnnnnnnnnnnnnnnnnnnnnnnnnnnnnnnnnnnnnnnnnnnnnnnnnnnnnnnnnnnnnnnnnnnnnnnnnnnnnnnnnnnnnnnnnnnnnnnnnnnnnnnnnnnnnnnnnnnnnnnnnnnnnnnnnnnnnnnnnnnnnnnnnnnnnnnnnnnnnnnnnnnnnnnnnnnnnnnnnnnnnnnnnnnnnnnnnnnnnnnnnnnnnnnnnnnnnnnnnnnnnnnnnnnnnnnnnnnnnnnnnnnnnnnnnnnnnnnnnnnnnnnnnnnnnnnnnnnnnnnnnnnnnnnnnnnnnnnnnnnnnnnnnnnnnnnnnnnnnnnnnnnnnnnnnnnnnnnnnnnnnnnnnnnnnnnnnnnnnnnnnnnnnnnnnnnnnnnnnnnnnnnnnnnnnnnnnnnnnnnnnnnnnnnnnnnnnnnnnnnnnnnnnnnnnnnnnnnnnnnnnnnnnnnnnnnnnnnnnnnnnnnnnnnnnnnnnnnnnnnnnnnnnnnnnnnnnnnnnnnnnnnnnnnnnnnnnnnnnnnnnnnnnnnnnnnnnnnnnnnnnnnnnnnnnnnnnnnnnnnnnnnnnnnnnnnnnnnnnnnnnnnnnnnnnnnnnnnnnnnnnnnnnnnnnnnnnnnnnnnnnnnnnnnnnnnnnnnnnnnnnnnnnnnnnnnnnnnnnnnnnnnnnnnnnnnnnnnnnnnnnnnnnnnnnnnnnnnnnnnnnnnnnnnnnnnnnnnnnnnnnnnnnnnnnnnnnnnnnnnnnnnnnnnnnnnnnnnnnnnnnnnnnnnnnnnnnnnnnnnnnnnnnnnnnnnnnnnnnnnnnnnnnnnnnnnnnnnnnnnnnnnnnnnnnnnnnnnnnnnnnnnnnnnnnnnnnnnnnnnnnnnnnnnnnnnnnnnnnnnnnnnnnnnnnnnnnnnnnnnnnnnnnnnnnnnnnnnnnnnnnnnnnnnnnnnnnnnnnnnnnnnnnnnnnnnnnnnnnnnnnnnnnnnnnnnnnnnnnnnnnnnnnnnnnnnnnnnnnnnnnnnnnnnnnnnnnnnnnnnnnnnnnnnnnnnnnnnnnnnnnnnnnnnnnnnnnnnnnnnnnnnnnnnnnnnnnnnnnnnnnnnnnnnnnnnnnnnnnnnnnnnnnnnnnnnnnnnnnnnnnnnnnnnnnnnnnnnnnnnnnnnnnnnnnnnnnnnnnnnnnnnnnnnnnnnnnnnnnnnnnnnnnnnnnnnnnnnnnnnnnnnnnnnnnnnnnnnnnnnnnnnnnnnnnnnnnnnnnnnnnnnnnnnnnnnnnnnnnnnnnnnnnnnnnnnnnnnnnnnnnnnnnnnnnnnnnnnnnnnnnnnnnnnnnnnnnnnnnnnnnnnnnnnnnnnnnnnnnnnnnnnnnnnnnnnnnnnnnnnnnnnnnnnnnnnnnnnnnnnnnnnnnnnnnnnnnnnnnnnnnnnnnnnnnnnnnnnnnnnnnnnnnnnnnnnnnnnnnnnnnnnnnnnnnnnnnnnnnnnnnnnnnnnnnnnnnnnnnnnnnnnnnnnnnnnnnnnnnnnnnnnnnnnnnnnnnnnnnnnnnnnnnnnnnnnnnnnnnnnnnnnnnnnnnnnnnnnnnnnnnnnnnnnnnnnnnnnnnnnnnnnnnnnnnnnnnnnnnnnnnnnnnnnnnnnnnnnnnnnnnnnnnnnnnnnnnnnnnnnnnnnnnnnnnnnnnnnnnnnnnnnnnnnnnnnnnnnnnnnnnnnnnnnnnnnnnnnnnnnnnnnnnnnnnnnnnnnnnnnnnnnnnnnnnnnnnnnnnnnnnnnnnnnnnnnnnnnnnnnnnnnnnnnnnnnnnnnnnnnnnnnnnnnnnnnnnnnnnnnnnnnnnnnnnnnnnnnnnnnnnnnnnnnnnnnnnnnnnnnnnnnnnnnnnnnnnnnnnnnnnnnnnnnnnnnnnnnnnnnnnnnnnnnnnnnnnnnnnnnnnnnnnnnnnnnnnnnnnnnnnnnnnnnnnnnnnnnnnnnnnnnnnnnnnnnnnnnnnnnnnnnnnnnnnnnnnnnnnnnnnnnnnnnnnnnnnnnnnnnnnnnnnnnnnnnnnnnnnnnnnnnnnnnnnnnnnnnnnnnnnnnnnnnnnnnnnnnnnnnnnnnnnnnnnnnnnnnnnnnnnnnnnnnnnnnnnnnnnnnnnnnnnnnnnnnnnnnnnnnnnnnnnnnnnnnnnnnnnnnnnnnnnnnnnnnnnnnnnnnnnnnnnnnnnnnnnnnnnnnnnnnnnnnnnnnnnnnnnnnnnnnnnnnnnnnnnnnnnnnnnnnnnnnnnnnnnnnnnnnnnnnnnnnnnnnnnnnnnnnnnnnnnnnnnnnnnnnnnnnnnnnnnnnnnnnnnnnnnnnnnnnnnnnnnnnnnnnnnnnnnnnnnnnnnnnnnnnnnnnnnnnnnnnnnnnnnnnnnnnnnnnnnnnnnnnnnnnnnnnnnnnnnnnnnnnnnnnnnnnnnnnnnnnnnnnnnnnnnnnnnnnnnnnnnnnnnnnnnnnnnnnnnnnnnnnnnnnnnnnnnnnnnnnnnnnnnnnnnnnnnnnnnnnnnnnnnnnnnnnnnnnnnnnnnnnnnnnnnnnnnnnnnnnnnnnnnnnnnnnnnnnnnnnnnnnnnnnnnnnnnnnnnnnnnnnnnnnnnnnnnnnnnnnnnnnnnnnnnnnnnnnnnnnnnnnnnnnnnnnnnnnnnnnnnnnnnnnnnnnnnnnnnnnnnnnnnnnnnnnnnnnnnnnnnnnnnnnnnnnnnnnnnnnnnnnnnnnnnnnnnnnnnnnnnnnnnnnnnnnnnnnnnnnnnnnnnnnnnnnnnnnnnnnnnnnnnnnnnnnnnnnnnnnnnnnnnnnnnnnnnnnnnnnnnnnnnnnnnnnnnnnnnnnnnnnnnnnnnnnnnnnnnnnnnnnnnnnnnnnnnnnnnnnnnnnnnnnnnnnnnnnnnnnnnnnnnnnnnnnnnnnnnnnnnnnnnnnnnnnnnnnnnnnnnnnnnnnnnnnnnnnnnnnnnnnnnnnnnnnnnnnnnnnnnnnnnnnnnnnnnnnnnnnnnnnnnnnnnnnnnnnnnnnnnnnnnnnnnnnnnnnnnnnnnnnnnnnnnnnnnnnnnnnnnnnnnnnnnnnnnnnnnnnnnnnnnnnnnnnnnnnnnnnnnnnnnnnnnnnnnnnnnnnnnnnnnnnnnnnnnnnnnnnnnnnnnnnnnnnnnnnnnnnnnnnnnnnnnnnnnnnnnnnnnnnnnnnnnnnnnnnnnnnnnnnnnnnnnnnnnnnnnnnnnnnnnnnnnnnnnnnnnnnnnnnnnnnnnnnnnnnnnnnnnnnnnnnnnnnnnnnnnnnnnnnnnnnnnnnnnnnnnnnnnnnnnnnnnnnnnnnnnnnnnnnnnnnnnnnnnnnnnnnnnnnnnnnnnnnnnnnnnnnnnnnnnnnnnnnnnnnnnnnnnnnnnnnnnnnnnnnnnnnnnnnnnnnnnnnnnnnnnnnnnnnnnnnnnnnnnnnnnnnnnnnnnnnnnnnnnnnnnnnnnnnnnnnnnnnnnnnnnnnnnnnnnnnnnnnnnnnnnnnnnnnnnnnnnnnnnnnnnnnnnnnnnnnnnnnnnnnnnnnnnnnnnnnnnnnnnnnnnnnnnnnnnnnnnnnnnnnnnnnnnnnnnnnnnnnnnnnnnnnnnnnnnnnnnnnnnnnnnnnnnnnnnnnnnnnnnnnnnnnnnnnnnnnnnnnnnnnnnnnnnnnnnnnnnnnnnnnnnnnnnnnnnnnnnnnnnnnnnnnnnnnnnnnnnnnnnnnnnnnnnnnnnnnnnnnnnnnnnnnnnnnnnnnnnnnnnnnnnnnnnnnnnnnnnnnnnnnnnnnnnnnnnnnnnnnnnnnnnnnnnnnnnnnnnnnnnnnnnnnnnnnnnnnnnnnnnnnnnnnnnnnnnnnnnnnnnnnnnnnnnnnnnnnnnnnnnnnnnnnnnnnnnnnnnnnnnnnnnnnnnnnnnnnnnnnnnnnnnnnnnnnnnnnnnnnnnnnnnnnnnnnnnnnnnnnnnnnnnnnnnnnnnnnnnnnnnnnnnnnnnnnnnnnnnnnnnnnnnnnnnnnnnnnnnnnnnnnnnnnnnnnnnnnnnnnnnnnnnnnnnnnnnnnnnnnnnnnnnnnnnnnnnnnnnnnnnnnnnnnnnnnnnnnnnnnnnnnnnnnnnnnnnnnnnnnnnnnnnnnnnnnnnnnnnnnnnnnnnnnnnnnnnnnnnnnnnnnnnnnnnnnnnnnnnnnnnnnnnnnnnnnnnnnnnnnnnnnnnnnnnnnnnnnnnnnnnnnnnnnnnnnnnnnnnnnnnnnnnnnnnnnnnnnnnnnnnnnnnnnnnnnnnnnnnnnnnnnnnnnnnnnnnnnnnnnnnnnnnnnnnnnnnnnnnnnnnnnnnnnnnnnnnnnnnnnnnnnnnnnnnnnnnnnnnnnnnnnnnnnnnnnnnnnnnnnnnnnnnnnnnnnnnnnnnnnnnnnnnnnnnnnnnnnnnnnnnnnnnnnnnnnnnnnnnnnnnnnnnnnnnnnnnnnnnnnnnnnnnnnnnnnnnnnnnnnnnnnnnnnnnnnnnnnnnnnnnnnnnnnnnnnnnnnnnnnnnnnnnnnnnnnnnnnnnnnnnnnnnnnnnnnnnnnnnnnnnnnnnnnnnnnnnnnnnnnnnnnnnnnnnnnnnnnnnnnnnnnnnnnnnnnnnnnnnnnnnnnnnnnnnnnnnnnnnnnnnnnnnnnnnnnnnnnnnnnnnnnnnnnnnnnnnnnnnnnnnnnnnnnnnnnnnnnnnnnnnnnnnnnnnnnnnnnnnnnnnnnnnnnnnnnnnnnnnnnnnnnnnnnnnnnnnnnnnnnnnnnnnnnnnnnnnnnnnnnnnnnnnnnnnnnnnnnnnnnnnnnnnnnnnnnnnnnnnnnnnnnnnnnnnnnnnnnnnnnnnnnnnnnnnnnnnnnnnnnnnnnnnnnnnnnnnnnnnnnnnnnnnnnnnnnnnnnnnnnnnnnnnnnnnnnnnnnnnnnnnnnnnnnnnnnnnnnnnnnnnnnnnnnnnnnnnnnnnnnnnnnnnnnnnnnnnnnnnnnnnnnnnnnnnnnnnnnnnnnnnnnnnnnnnnnnnnnnnnnnnnnnnnnnnnnnnnnnnnnnnnnnnnnnnnnnnnnnnnnnnnnnnnnnnnnnnnnnnnnnnnnnnnnnnnnnnnnnnnnnnnnnnnnnnnnnnnnnnnnnnnnnnnnnnnnnnnnnnnnnnnnnnnnnnnnnnnnnnnnnnnnnnnnnnnnnnnnnnnnnnnnnnnnnnnnnnnnnnnnnnnnnnnnnnnnnnnnnnnnnnnnnnnnnnnnnnnnnnnnnnnnnnnnnnnnnnnnnnnnnnnnnnnnnnnnnnnnnnnnnnnnnnnnnnnnnnnnnnnnnnnnnnnnnnnnnnnnnnnnnnnnnnnnnnnnnnnnnnnnnnnnnnnnnnnnnnnnnnnnnnnnnnnnnnnnnnnnnnnnnnnnnnnnnnnnnnnnnnnnnnnnnnnnnnnnnnnnnnnnnnnnnnnnnnnnnnnnnnnnnnnnnnnnnnnnnnnnnnnnnnnnnnnnnnnnnnnnnnnnnnnnnnnnnnnnnnnnnnnnnnnnnnnnnnnnnnnnnnnnnnnnnnnnnnnnnnnnnnnnnnnnnnnnnnnnnnnnnnnnnnnnnnnnnnnnnnnnnnnnnnnnnnnnnnnnnnnnnnnnnnnnnnnnnnnnnnnnnnnnnnnnnnnnnnnnnnnnnnnnnnnnnnnnnnnnnnnnnnnnnnnnnnnnnnnnnnnnnnnnnnnnnnnnnnnnnnnnnnnnnnnnnnnnnnnnnnnnnnnnnnnnnnnnnnnnnnnnnnnnnnnnnnnnnnnnnnnnnnnnnnnnnnnnnnnnnnnnnnnnnnnnnnnnnnnnnnnnnnnnnnnnnnnnnnnnnnnnnnnnnnnnnnnnnnnnnnnnnnnnnnnnnnnnnnnnnnnnnnnnnnnnnnnnnnnnnnnnnnnnnnnnnnnnnnnnnnnnnnnnnnnnnnnnnnnnnnnnnnnnnnnnnnnnnnnnnnnnnnnnnnnnnnnnnnnnnnnnnnnnnnnnnnnnnnnnnnnnnnnnnnnnnnnnnnnnnnnnnnnnnnnnnnnnnnnnnnnnnnnnnnnnnnnnnnnnnnnnnnnnnnnnnnnnnnnnnnnnnnnnnnnnnnnnnnnnnnnnnnnnnnnnnnnnnnnnnnnnnnnnnnnnnnnnnnnnnnnnnnnnnnnnnnnnnnnnnnnnnnnnnnnnnnnnnnnnnnnnnnnnnnnnnnnnnnnnnnnnnnnnnnnnnnnnnnnnnnnnnnnnnnnnnnnnnnnnnnnnnnnnnnnnnnnnnnnnnnnnnnnnnnnnnnnnnnnnnnnnnnnnnnnnnnnnnnnnnnnnnnnnnnnnnnnnnnnnnnnnnnnnnnnnnnnnnnnnnnnnnnnnnnnnnnnnnnnnnnnnnnnnnnnnnnnnnnnnnnnnnnnnnnnnnnnnnnnnnnnnnnnnnnnnnnnnnnnnnnnnnnnnnnnnnnnnnnnnnnnnnnnnnnnnnnnnnnnnnnnnnnnnnnnnnnnnnnnnnnnnnnnnnnnnnnnnnnnnnnnnnnnnnnnnnnnnnnnnnnnnnnnnnnnnnnnnnnnnnnnnnnnnnnnnnnnnnnnnnnnnnnnnnnnnnnnnnnnnnnnnnnnnnnnnnnnnnnnnnnnnnnnnnnnnnnnnnnnnnnnnnnnnnnnnnnnnnnnnnnnnnnnnnnnnnnnnnnnnnnnnnnnnnnnnnnnnnnnnnnnnnnnnnnnnnnnnnnnnnnnnnnnnnnnnnnnnnnnnnnnnnnnnnnnnnnnnnnnnnnnnnnnnnnnnnnnnnnnnnnnnnnnnnnnnnnnnnnnnnnnnnnnnnnnnnnnnnnnnnnnnnnnnnnnnnnnnnnnnnnnnnnnnnnnnnnnnnnnnnnnnnnnnnnnnnnnnnnnnnnnnnnnnnnnnnnnnnnnnnnnnnnnnnnnnnnnnnnnnnnnnnnnnnnnnnnnnnnnnnnnnnnnnnnnnnnnnnnnnnnnnnnnnnnnnnnnnnnnnnnnnnnnnnnnnnnnnnnnnnnnnnnnnnnnnnnnnnnnnnnnnnnnnnnnnnnnnnnnnnnnnnnnnnnnnnnnnnnnnnnnnnnnnnnnnnnnnnnnnnnnnnnnnnnnnnnnnnnnnnnnnnnnnnnnnnnnnnnnnnnnnnnnnnnnnnnnnnnnnnnnnnnnnnnnnnnnnnnnnnnnnnnnnnnnnnnnnnnnnnnnnnnnnnnnnnnnnnnnnnnnnnnnnnnnnnnnnnnnnnnnnnnnnnnnnnnnnnnnnnnnnnnnnnnnnnnnnnnnnnnnnnnnnnnnnnnnnnnnnnnnnnnnnnnnnnnnnnnnnnnnnnnnnnnnnnnnnnnnnnnnnnnnnnnnnnnnnnnnnnnnnnnnnnnnnnnnnnnnnnnnnnnnnnnnnnnnnnnnnnnnnnnnnnnnnnnnnnnnnnnnnnnnnnnnnnnnnnnnnnnnnnnnnnnnnnnnnnnnnnnnnnnnnnnnnnnnnnnnnnnnnnnnnnnnnnnnnnnnnnnnnnnnnnnnnnnnnnnnnnnnnnnnnnnnnnnnnnnnnnnnnnnnnnnnnnnnnnnnnnnnnnnnnnnnnnnnnnnnnnnnnnnnnnnnnnnnnnnnnnnnnnnnnnnnnnnnnnnnnnnnnnnnnnnnnnnnnnnnnnnnnnnnnnnnnnnnnnnnnnnnnnnnnnnnnnnnnnnnnnnnnnnnnnnnnnnnnnnnnnnnnnnnnnnnnnnnnnnnnnnnnnnnnnnnnnnnnnnnnnnnnnnnnnnnnnnnnnnnnnnnnnnnnnnnnnnnnnnnnnnnnnnnnnnnnnnnnnnnnnnnnnnnnnnnnnnnnnnnnnnnnnnnnnnnnnnnnnnnnnnnnnnnnnnnnnnnnnnnnnnnnnnnnnnnnnnnnnnnnnnnnnnnnnnnnnnnnnnnnnnnnnnnnnnnnnnnnnnnnnnnnnnnnnnnnnnnnnnnnnnnnnnnnnnnnnnnnnnnnnnnnnnnnnnnnnnnnnnnnnnnnnnnnnnnnnnnnnnnnnnnnnnnnnnnnnnnnnnnnnnnnnnnnnnnnnnnnnnnnnnnnnnnnnnnnnnnnnnnnnnnnnnnnnnnnnnnnnnnnnnnnnnnnnnnnnnnnnnnnnnnnnnnnnnnnnnnnnnnnnnnnnnnnnnnnnnnnnnnnnnnnnnnnnnnnnnnnnnnnnnnnnnnnnnnnnnnnnnnnnnnnnnnnnnnnnnnnnnnnnnnnnnnnnnnnnnnnnnnnnnnnnnnnnnnnnnnnnnnnnnnnnnnnnnnnnnnnnnnnnnnnnnnnnnnnnnnnatcatagcggctttggcctgtcccgccgagataggccaggagcgagcatgcacaaaggaccaactaatggaggcggttcgggcttatgctgaggtgtgtgccgattatacgcccaagtttaagatccgcaactacaattttttccgagaaggccattatttaaactacatcaaccaagatgccgatggaagcgacagaggctggccccatggaatggaagcattgcaagcccacgagcccgaggatagtgatcagggcattatctgtcgccctgttgctagttatcgcattgcgccatcaccactcggacaaccttacgccgattgccacagaagccgtccacctccctctgctgggatccagtccatagcggtttatggcacagtaaaaaaagcggggaatcccatcgttcttacccgttacatggtatccatccgatttgccgtcatggcccctgagaccgcgtttacggggttttcggttgcggccaggcatcaggtgtcgcctgaagcggaaaaattagagggacagccgtattcaggcaaggatttgttggggcggtcatgaagctcgtagccaaaaagaaaaacgtgggaatcaccgggcggtgttcccacgctttggagggcattctatgtagggtctgtaggcttagggccatgatagggggcaagctgattttgtcaagggcggtttgtgctaactggccaatcgcgcaaccactttcgtcataacgctctgcattctggagcttccttcaataatgaccgagaccaggtagagaaaattgttcttgccaatatttccttcaggccattattgggatttatggtggatcagctatgtggaataaaaaattcttgtaccgtcacaggcaagaaatgcccagcagcataactgacgagaatgttcagtacgctgccttggagtcgagaagcatcttgagttctcgccaatacctattatccaccttctcggcgagtcattctacagggaatccacctgttcgtcgcaacaggttcatgctctccggtagcgcttctaaagccattatgagaaaggcaggctcgcatcagggaatgcccgaacttctggttgtcctgatccaaagtaggcaaggtagccttgataggtgtccatgaagggactgacactaagcaaaggagtgttgaatgtatgatttaaccaacaatgattgggtaagggtgcttcgccgcgatggcactactggccgtataagtctgctgcaggcgctgcgggatgcggacaggctgcatcttgcctacagcaatcccatggaccggttcgcggtcttcaggttcatactcgccttgggctactggtgttttgccaacaccgacagaccgcctgagcccggcaagccgcttccggccccctggatatcctggctagaggaaaacagggaatatttcgagctctatggcaatggcccccggttttatcaggaccctgccgcccggcatgttcgacccgtaactgacctgctgcacgaaatccccaccgggaataatttctctcacttcaagcacagcctggattatgtttccggcctgtgcctgccctgctgcatacagggtttgctgcgtttcaccgtctatgccacctccggactgccgaaactcaaatccagcatcaacggaatgcccccgttctacgcgctaccctggggaaagacactggcggaaacgctatgcctgaactgggagccacgcgacctgatgggaaccccggcctgggttgacaacaccgtggaccccaggaccgatcccgtgccgctgctggtgggcctgaccgcattggccagacgcagccgcctgcatgaacccgtggccggagatgtggcttgtgccggttgcggcgaacggccggggctcttggtccattcctgtgattatcagacggccggagatattgccaatccccattggcaggatcctcacgtctgctacggcggcaaagagaacaagccgctcaaggtggaaaacctgatcgctgaaaaacctctgctgcaggataagaactggcagcgtccgctacgggatgcggacacaaaatcatctcgcaatgaaggcctgagcgtgctctgcataggcgtggccgtgaatcaggccaagatcgacgatgtctgggaaacaacgatcagaattccccacgaagagcccgggaaagacacccacagcgtgcccaactgggcccaggccaaccgtcgcctgatcggggcatatgagcggcacagactgtccagggccgataaagctgtcgcgggcaggcttaaggttccgctcagcgaagctttggtcagcgccatctccccccacctggtccatgctgcggtaaggctgacgggtggattcatcccccgggaaggcgagataccggatcctgtaaaagccctgtaccggcggctgctcacggtgatctcgggggcttatgccccggaagccacggctgctgacgcaagtgccgccagtctggtgcgacacctgcgcccccggctggaacaacctgatgttcaaaacaaagaaacacaggaggaccaaagtgactgacacgcccacagctcaattcgtcaaaaggatctctgagctaaaagcaggcgaccttggccgcctgaggcaactgaaaggctgcgacctgcacgaggacttggacgggttcgacctgttcacgggcctctggtggactctgcgcaggacatcatcaagggtcccccggcgcgagatcgcctggctggtggccaagctctacgcacagttcccgctcgcccaggaagacggtaaaactctgccctctttgctcggccgcatctacggcaccctgcacactaacaaggagagacgcacatttatggcccgaacggacgcgatcctgcgggcaagctccagccagttggaatacccgctcggctgggcgctgcagaccatcgggctgtataactgcgcctccctcgactggataaaacttaccaacgacctttcggcctggcacaatgaactggtgcgccagaaatgggctgaggcctttaatcaagcatcatatgaacacaacaaggagaactaaaatgttgatcgagatccacatgatccagaatcacagcccggccaatctgaaccgggacgatcttggcgcgcccaagacctgttatttcggtggagtgctgcgttcgcgcatctccagccagtgcctcaaacgcagcatcaggaccagcgaagattttcaggctttgctgggcggagttcgcacccgcagactggccgacctgatccagcaggaggccggtgagacagattgccggcaaaaagcccaggagatactcaccaaatgtggcttcaagcatgaggacaacaacagcaaaatgctcgttttcatgtccagggacaaggtaaaggaccttgcccggatcgtccttgatacttccctggagatcacggaagccgcccagcaagttgccgatgtgatcgcccatgcgacctatacccccgacattgccctctgcggcaggatgctggagccagaaggcaaggacaagagtgtgaagtggtcggacaccacggtggaggcagctctgcaggtggcccatgcaatttccacacatgcggcccggccagagatcgactactatgtcgcggctgatgacgtgaagggagcggatgccggtgcgggctacgtggatgaggccatgttcgcctcggcctgtttctacaagtatttttccatcgactgggagcagctggtcgagaacctgaaaggaaacaaagaattggctgcccataccgtcggggcattggtcctggctgccgcgcgcaccaaccccagcggcaaacagaacagcttcgctgcccataacctgcccgacggcatcctggtggagttcaaaagttccccggtcagctatgccaatgccttcgtgcggccggtcaagctggtggcggaatcggacctggtcgaactcagcgtgggacaactggccaactatgtgcaggacatcagcgagggatattttcccggccagatggaaggcaactccttttggttctcacccaacggacgctatcctctgcagccgcagaagggcgggctgcatgccgaacaggtcggccagctggaagaactggtcaggaagaccatccgcaagtgcggttatgattgggaagccatcaaacaactgaaaacagaaggctgacatggctgccaataccttgttcttaaggctggaggggccgcttcaggcctggggcagccatgaggccaaattctccgtgcgccgcacctccgaagctcccaccaaatcaggagtattcgggctgctttgcgctgccctgggtgtgggcagggcagaagccgctaaatactggctgccggaactggccaaactgcgcatgggggtccgcgtagaccgccccggtatacgctggtgggattatcatacggtgggtgcggggataaaaatgcgcatctccaatctggaagcgccgacagacctgagcgatgtgggtgaggccagggaagccaggctgcgacaaaaaaacctcaaatatgacgaccggggtatgctgacccggcgcgaatacttggctgatgccagctttctggtggccttgcagggtgagccaaggatagtggagcagttggccgaagcgttgcgaaaacctgtctgggcgctatatctgggccgtaaatcctgcccgccttcccggccggtgggggaacatccgcccggagaccatgcttcactggaagaagccctggcggccgcgccgatacagaagcgcaaagacggagaacccgatccctcaacgcttcagtgcattctcgactggatacccgcctttgacggagagccagccccggatgaggcagagatccattatgacattcccgtgtccttccagcctccgcggcacctgccccgcttcgtggtcagcagggaactggtcctgagcaatgagttggaggtacatcaggtgctcatcggtaagacctggcatccgccccgcagtcgcgctgattacagtaattcccaatacaaaagggtacgcgccgaacgtttggtgatggatgtgggactctgcatggtctgcaaggccccggccaccaccgtccagcatgtgaattaccgccgggcgggaggtaacgaggagcctgaggacctgcgagccctctgccgcctctgccatgatgcctgcaccatgctggaatacggcagcggcatgaccatggaccgcatcgacccctgcgaccctgactggcgggagcgcattctggccaaacgtgaggagatcatcaaattccgctcgctggaacagcgcaggcgcaagctcgatcccaaggaggagaacggatgatctacctatcccaactactcatcgatacaggcggaaatcccgaccgtccgaggccgggacgcctgtggctcaacaacgtgtacaacatccaccgcaggctctccatggcctttcccatgcgtcagcgcagagatggagatcctaaattcctgcagcctttcgatcctgcagatttggaacaacgccagttcctcttccgggtggacaacaacaccgacggagaggagcaaagggcgatgatattggtgcagtcacaccttaggccggattgggactgggccttccaaaacgccacgggttttctggccgctccgccccaggttaaggaatacgatccgagattctccacaggacagcggctccgctaccgcatcctcatcaatgccagcgtcaaacgcaaaattgacgaggtcagggagagccccgaggggaaagaaaaatccggacaggtcctgcacaaacgggttgcccttacctgggagaccgattccaaccctggcgacgctgtagcccaatggttcgccgccaaggccgacaggctgggcttcacgccccttaacacggagctggtgaacctgggttgggtgtatggctccaagccagagccccagggagatgcgcctcggcgtgagaacaaataccgtcccttgagataccgctccgccttgctggaaggatatttgaaagtggatgatgtcgtgctgttccagtctgcgttggccaaagggatcggcagcgctaaaagcatgggcttcggcctgctctccgtggttccgttaagcgatgcgtaataaagacctgcataccattcccaagatgcgggaccgcgtcagctatctctatgtggaacacgccaaggtggacaaagaggagcaggccatcgcctttcacgatgccatgggctccactccggttccttgcgctggtcttgccttgctgatgctggggcctggcgtttccattacgcacgcggccatcctggtgctggccgattgtggctgcttggtcgcttgggtgggggaacagggggtccgcttttacgcagccgggacggggaccacccgcagttccgccaatctgatgcgtcaggcagccgcctgggcagatcgggaagcgcatctgaggatagtgcgccggatgtatgaactgaggttcaaggataaattggacccatccctcactcttgagcagataagaggaaaggagggggcgagggtgcgggacacctatttcaggttgtccaaagagttcaacgtgcccatggaaaccagaaattacgacaggaacaactggagtaaaaccgaccccatcaaccgggctctttccgtggctaattcctgcctctatggcatctgccacgccgcgatagtggccgccggttattctcccgccctgggtttcgtccatactggcaaacagctatcctttgtttatgacattgccgatctctacaagatggaaacctccgtacccgcggccttcctggctactgccgccgggatcgaaaacctggaccgccggacacgcatggcctgccgggaccagttctatcaatttggcctgctgaagaagatcgtggctgatatccactccctgttcggtatcctggaaacaccggaagatgaaccagaccatgcggatgtcgacccagccgcaccgggcgggctttggaacccggatgagagcgccagcccaggcggcttgtcctggggcctggacgatccaggaggccatgatgatggtcctggtgcttgaaaaagtaccctcttccctgaggggagaaatcactcattggcttctcgaagtaaaagcaggtgtctttgtcggccaagtatcggccatggtgagagaaaagctgtgggacaaggtcagatccggctgtgcgggcggtacctgcctcatgatcttcagcaaacattgcgaacaaggcttcggcattgagttctggggtgcggcggaaaggatcgtgaccgagtgggaaggactaaaacttatgaccaaacatccgtgaaccatacctaaggcagtgtggttagcctgaaaccctttatttactaagggtattccccacatgcgtgggggtgaaccgcctgatgtcccgcctccgctcaaagctcgtgagtattccccacatgcgtgggggtgaaccggtggtcaaccccaaaaccgggaatctgaaaaagtattccccacatgcgtgggggtgaaccgacagattcacgagccaggcgcagatgatctgggtattccccacatgcgtgggggtgaaccgtaagcacaaagacggaggaaaaaagataatgagtattccccacatgcgtgggggtgaaccgttcgtattgatatagttctggctgccgtctgtgtattccccacatgcgtgggggtgaaccgtttgaggccgccgccgccagatattggtggttgtattccccacatgcgtgggggtgaaccggacacgatgtatgtgcggatccattggattgagtattccccacatgcgtgggggtgaaccgaacgcgaaggtgccgtgggacctggacgcaatgtattccccacatgcgtgggggtgaaccgtcccgcaccccgatcaggcagatcccgatgctgtattccccacatgcgtgggggtgaaccgccttgacatcggcgtccacttggtcttgccttgtattccccacatgcgtgggggtgaaccgaatgggacgtgatgtccaaatacgccacgaccgtattccccacatgcgtgggggtgaaccggccctcgtccaggtcaatccctgcaccgtgatgtattccccacatgcgtgggggtgaaccgtccttcatgacgggatcggagccccacttggcgtattccccacatgcgtgggggtgaaccgttttggaagaacgaacagcaatggaaactggagtattccccacatgcgtgggggtgaaccgagtatatcatctacccgaaggcggcatgatacgtattccccacatgcgtgggggtgaaccgcgttgatcgcggccatgacttccggttccacagtattccccacatgcgtgggggtgaaccgaacttcacggcggccaactacgccacgctgaggtattccccacatgcgtgggggtgaaccgctcaagttctaattgatcgccttccgtgtcaagtattccccacatgcgtgggggtgaaccggcgcgcgcattgaaaacagcccggcagatcacgtattccccacatgcgtgggggtgaaccggtctgcctcgccaccatctgggagcgcatcaagtattccccacatgcgtgggggtgaaccggccgcttcgatgccctcatgggacagtatgccgtattccccacatgcgtgggggtgaaccgtcatcatccgctacgacttcaccgacctccgcgtattccccacatgcgtgggggtgaatgtttattagaatcttgcgaaaccttgatctccagtcacatagatataggcataaatccctgtctggtcaaatactcgtaggtctcgtcaagttctggcagttgtggcatgaaaaccaccgtgcaatcacgtcctcgcgtgagcaaaacccgataggcatttatcctgagctgttccgcgtcttttatgcggctgctgttctgatatctcgaggctttcgcatttgaccattttccgtctttaaccataaagtctgtgccccaggccagcagaacggcatccagctcaagcccctgagcgccgaattcagtgacaacgtctctcatcagccggcatgatttctgcctggggtcatcttcggcatcagagtaccaagggccgaaatcgacatttttggtagactgccagtcgttgagaatgccaaacctttttaggtcacgatcacgcgaagatgccacaatgccgtatctggcgtcagggttatccctatatcggtcctgaaggtatttcctggcgaaggaaatgtcccgggtgatcctgagatggtagccctgttgttccagttttatggcaatggatttcaggtcatccagcaaagaggatctattatctatgagttggctcacgaaattatggatatcttctgccaaatggaaacgtatttctttgtccagattgaggtcttcggattctacatagggcaacttggtgctcagcatttcctcacggacctgggcaggaccatgaagaatccactcattagaccgcttcgatttttctatggctttgctccattggctcaggccggcttcttcgccgatatggatctcctggccgctgccgatgaggccgatgaccacacaccagcgcggaaccctttctgcgaagtctatgaacagatcaggctccgatttaccataaacaaaccccgggatatccttgtgtttggcggcaacctgttcggcgtcgaatgccctttgagcctcatcatagatcagcacatgttctgggggtatgtttgctctggtggtggagtaagttctgacgtagttgagcacatcacggacaaaagccttgcctccgccgtttgctccgcgcaattcatactgcagcacccgcaccagtggaccgttgcccgacagaaacactgcgggggcactgggcttgccattgcccctgtcgaccaccaggtcatcgagaaaatgggcgtgggctattctcagcccaaccagggtttttcccgcgcctgggacgccagtgataagaatcagccgtcggctttgagtctcataagcctcatggatgatccggcatatctcgtcaacggcggggtctgtggccgccctggctctttttatggtcctcaatgcgccggtgtgaaacaattctcgggcggcttggatcagggtgggaaggggacggtaggcttcttccgataaaaacctgtcttcgtctacaggctctgtgggtgatgccttgtcgagttcgtccaccaccttgtttagataatcgggccccaccactctgaccccgaagatatagcccatgtcgcctctggccagcatgggaaccaataaagggatgaccggccgggtttcgcagtccctgtgatagcacttcaagtcacgcacataggctgccacctgatcgagatcggcctggttgggcgagtatttgcccttgagctccagtaccacaatattgtgcctcacaaggaatattacatcggtgcgtctggattccaggggtaagcgaaactccattatcgaggagtagtctgacgcgctggggtccgcggccatgatctcggctgcttccctttggatgacggggatcgactggttccaggcattcacctgagcttgctcagcatccccgacaaattcctgcaagcactctctgatgtcttttttagacgttgtgatgaaagcggggaactttgaggaccaacctgcggttttactcacacagcccccctggctcttataatcgaccaattaagcatattgcctccggatcaatgcaggagggatttgatgtggttggctgtgtcggggtcaacgcaatacacatagcagcctctgatgcccctggtcatgaggaccttgtagatgttgcgcacataggcatgaaaattggcggggtctcccctgagcaccggatcatgggtctttgagatgtcaaactccaaggccccggttatcttgttatagaccatgtcggggccgatgatgacaccaacatagtcaaactcgaagccctggggatcagtattgcctgatggcctctatcaccagttccggcatgtcacattcgattgctgccgatagtaattccgctttccgcggtaatcttaatccgcaggatttcaataatgtgagctctcttacccggaaatgggccatgtcacgcacttcgcgggcgacctcttcttcagtatagtacaaccaactggtatcgttaggatagaagtattcaatgtcctgcataaagccttgactgaactcctcggcgtatcggttgacatcgaaaccttgggctatcaagcgttcgcaggttcggcggtcaccaccggaaagcgcggaccagaacaggtcaagttcactcaggtcaggatcatagacaaccgcaccatccgcagggaaaaactcgctcagatcgggaatgggttggggaagcaattctactccttggccatggaacacgtctccggcaacatcgtaccagacctgcctgcctgcgcccaagggggaacccagcagtgaactggccacgataaaccgggcggggtctccaaaaatttctatatcccaccaagcatcttccgggatgtcttctacatgttgccaatggctctcaacgatcttcagctccgggaaaacattgttgcggatgacttggactgcggttgccgcgagatcatcggtatccacgtccacaaagtgcagacccccgccgatttcggcaacttctgcggctgagaccgagaggtaaaaaccatgctttctttctaggggctccatggaatgcacattggctatcatcgattcgtccggcctggcttcgatccacttactgccatcgaagtacgagagacccaccccgccggtccacacgactccggttcggtcgatcgccacggcatttggcacaccaatcagtttcaaatcttcagggctgtagtgtgtccagcttcctccggaataacattcaagcccgctggccagggcagcccacaagcgtccctggtggtctatcgccagatcattcacggagttgccttcaaagtggccgggatatgattcaaatagggggatgtggaggacctcgaccaggctgtcaccggtcaaatgggctatccgacctccgtccagccccagccacaggttcccggtggtagtgtcgaattccagagcctggaccgcagattcagtctcaactgatgtccaagtatcgtcttgcaggcaggacacccccacgtctgtccctacccacagggtacctgtgtcggtgagatccaaacagcttatttcattgcttaacaaccctgagttgtctttcgtgaaaatcgtccaaaccccatcgttccatctggtcaagccctggtccgtgcctgcccagagcagttcctccccgtctgaggccaggcaggacacataatccgatggcaaggctgaattggcggaggtgaatatctccggtttcgccctatccgcgtagttctgcgttctggccaggccaccataaacagctgaccaaagatatgtacccgttaacaaggtggcgaaagtgtcgaaatcgttataatgatgagcgatcactgtctgggcttggcctgaggtaacgcagatcagcaaaagcacaaaaacgacaaaatgtttcatcgatcctccttcatctgatcaagctaatgcttgccatacaaatcacaatgtgaatgattcctgtcaatacttatttcgtgtctgctgtttaacacccactgccgataccactatcgaagtttgcccaagcgacggcgtcaacaggtttcgtccctgcaaggctattaattgatcgattcttggttgttggaacttggcctttggcaatgcgtggaactgcggaatgagatgaatcgcatgaccggcatcagtcgatactacggatgtaactccgatgctgcggttggtcatggcttgtttccagtaaaaaaagcatgattggaatcatgcgctacgctgatgtttcctgtctagataacgttcgttatattgccaattgatctgggattcactcaactgtgccatatggaggatcggagtccggaccgatgatcatccctccgccaaagccaatggggttgaagccagcctggtggtgtgtcgcaggtttaaaaaaagcaggcaaaaggagcctgaattctacctgatctgtgacttcgccgatcccggcctgtcggaactggaaatcacccaacgggcagtctgcgcttaccacaaacgcttgaagatcgaagaagtgcaccggcagatgaaacaagacctgcagtgggagaaaacgcgcctggccagctacgtaaaactgaagaacctcaacatgttgatgaccatctcgctatacttcgtctattcatgcaaagacatgatctacaagatcgcggaggcttttcccaagctcatctgcttccaaaaaaaggactggggcaagttgcaccagttcgtctactacaggctctgccaggtaatcaggatctgcctgaaacgtgtcacccactataacaagtctccatatagagcagatctgaccgaaccatggcagcagtgtcattaaaaaccatgccttgttcctctcaagttttttctacccaccataattgaacttgagccaaaaaaacacttgccaaaattttaccgtctgatttgatagttttgtgagtgtcacagcctccgcacccggacgtgaagcagattagccaagtgaagatggaaagctgattaggccgcatttttgtagtttcgccaagcctggtgggagggggatcccaaaaagcacaaaggagattgcgtgtacgttctgaaggaagccttggcccccgcctgcaagaacagccggcccggagggttgagcttaggttacggtcattccttcggcggaccagccagtagccgggaacaggcaaaggcatgaagaccgcgaaatcacagggcggcacctcagggaaaatgtcagccaggagtagggttgatgggcgttaagatcccttacctaaaactgggtgtgtccatagatgtgggcgtgggcgtgggcagcgattattccttccattccagtttccggggcatctttggtcgggccctgaggcagaccttttgcatccagaaccgcctggactgcgttgactgccccatcagcggctgcctttaccgcagactgttcgaagacgtcggtcacggccacgaaagctaccgcccctacatcatccgccacacagacacccgggaccagagagtggaaatggagctcgtgatctttggccagttggccgaatacggcagttcgatcatgcacctgctcacccggctggaagggcgccaactacggctgcagggcgagaaccatcccgtaagcctggcaggggtacaggacctagacggtaggacgctttataggatgggcgtgcaggagatccgggagccggatatccacactatcagttacagcccccggcggcggaacgagatcggccttaggttcatcacccccctccggctgaagcacgagggcaggctgatgagcggcttcatgctgcagccggtgctgcgcagcgtctaccagcgggtggaatacatctgccgttattttctgcaggaaagtgacccattgccgcctttcgcgccggaatacggggaggtggcggcctccacccactggcaggagatgtaccgcaagagctggaggcagcagcagaagatgagcctgggtggcctgatgggggaagtgaggatcgccgcgccttccgctcaaactgtgggactgctaaaaattggagaattgatccaggccggcaaacagaccaccttcggcctgggcaaatatgagatactttagataaggaggtatgatgatcgacgtgtacgacatggccctggccggcttgctgcatgacatcggcaaggtgatgcagagggcggaggtcgatatcggcaaagccaaatacgaggcgtactgccccagctggaacaatgttcccacccaccagcacgtgatgtggacacggcagtttttcgacggcgtcctgtcccagccggggcgcgactgggaacaggtggccaacctagccgccagccaccataatgccgccgctttcgccaacgtgacggaccccgatttttggctggtccagtgcctgatcaacgcggatcgggtatccgcttcctgggaccggcaacccgatgaggaggccgccgaaaagggggcctacaagaagaaagagcttcacagcgtcctctccgaggtgcatctggggcattcgctggcctctgacagcgtactgccgttgatagaggcggagccaggcgaggctgtgttcccccgggaagcgagccccgacaccctgaagtgcaaggaatacgaagcgatcttcacgggcttcaagggtgaattcggcaaccttctgaacgccctgggctccggcacgatcacgctgccgaacctggttgacgccgtggattcgctgctggaaaaatacttctggagcgtcccctcgaacacccgggaggaaaaacccaccaactccctttattatcacagccgcatcacggcagggatagccagcgtccttcacgcctatttcctggccagaccggaagaacgggagcagcttgagcatctggacaagtccggcaaagacatcctgatgctgatcggcggcgacctcagcgggatccagaaatacctgttcgacctgcatccggagcattcccggaaagccgccaagaccctccgtgcccgctcgttcaagatcaagaccctctgcgacatcgttctgcagaggatctgccgtgaactgggcctgccgcgccagtgcgtcctgatcaacgcgggcggcaagttcatgctcttggcccccaacctgccagaaatggaggcaaagctggagctgatcagacaagaggtcgatgaggagttctaccgccagttcatgggcgcggtgagcctgaacctggattgggcggtgaaagtgcctttcgcggccctgaaaagcgaccggttccccgcaaccctggacagcttcatcgaacgcatggagcaggccaagctccgtaaattttccagttacctgcaggacgggaaaagctggcagagcgggaaattcctgatcgagcaggcggcctatcacagcaacctctgcccccaatgcggaaaacggactgtggaaccggacgccaacggcgagttgcccaattgccaggcctgtgaggatgaggtcaaactaggccagatcctgccccgggccacgcatttcatcatcgggaaggggcagccgcgccacggcttcgccctgaagatgtttgcagaaagctggtacctggaggatttcgatcccaaggccggcgtcaacctgggcgaggacgacttcgccttctgcatccggcaggatgacaggaaaacgcttccctatccctacaagccggtggcctcggtggttcccgtcttcaaagacctcagcgcccaggatgcggggat

SEQ ID NO: 999 - DNA, 108084 bp, Artificial Sequence
  Synthetic Oligonucleotide
  misc_feature (1)..(91721): n is a, c, g, or t
nnnnnnnnnnnnnnnnnnnnnnnnnnnnnnnnnnnnnnnnnnnnnnnnnnnnnnnnnnnnnnnnnnnnnnnnnnnnnnnnnnnnnnnnnnnnnnnnnnnnnnnnnnnnnnnnnnnnnnnnnnnnnnnnnnnnnnnnnnnnnnnnnnnnnnnnnnnnnnnnnnnnnnnnnnnnnnnnnnnnnnnnnnnnnnnnnnnnnnnnnnnnnnnnnnnnnnnnnnnnnnnnnnnnnnnnnnnnnnnnnnnnnnnnnnnnnnnnnnnnnnnnnnnnnnnnnnnnnnnnnnnnnnnnnnnnnnnnnnnnnnnnnnnnnnnnnnnnnnnnnnnnnnnnnnnnnnnnnnnnnnnnnnnnnnnnnnnnnnnnnnnnnnnnnnnnnnnnnnnnnnnnnnnnnnnnnnnnnnnnnnnnnnnnnnnnnnnnnnnnnnnnnnnnnnnnnnnnnnnnnnnnnnnnnnnnnnnnnnnnnnnnnnnnnnnnnnnnnnnnnnnnnnnnnnnnnnnnnnnnnnnnnnnnnnnnnnnnnnnnnnnnnnnnnnnnnnnnnnnnnnnnnnnnnnnnnnnnnnnnnnnnnnnnnnnnnnnnnnnnnnnnnnnnnnnnnnnnnnnnnnnnnnnnnnnnnnnnnnnnnnnnnnnnnnnnnnnnnnnnnnnnnnnnnnnnnnnnnnnnnnnnnnnnnnnnnnnnnnnnnnnnnnnnnnnnnnnnnnnnnnnnnnnnnnnnnnnnnnnnnnnnnnnnnnnnnnnnnnnnnnnnnnnnnnnnnnnnnnnnnnnnnnnnnnnnnnnnnnnnnnnnnnnnnnnnnnnnnnnnnnnnnnnnnnnnnnnnnnnnnnnnnnnnnnnnnnnnnnnnnnnnnnnnnnnnnnnnnnnnnnnnnnnnnnnnnnnnnnnnnnnnnnnnnnnnnnnnnnnnnnnnnnnnnnnnnnnnnnnnnnnnnnnnnnnnnnnnnnnnnnnnnnnnnnnnnnnnnnnnnnnnnnnnnnnnnnnnnnnnnnnnnnnnnnnnnnnnnnnnnnnnnnnnnnnnnnnnnnnnnnnnnnnnnnnnnnnnnnnnnnnnnnnnnnnnnnnnnnnnnnnnnnnnnnnnnnnnnnnnnnnnnnnnnnnnnnnnnnnnnnnnnnnnnnnnnnnnnnnnnnnnnnnnnnnnnnnnnnnnnnnnnnnnnnnnnnnnnnnnnnnnnnnnnnnnnnnnnnnnnnnnnnnnnnnnnnnnnnnnnnnnnnnnnnnnnnnnnnnnnnnnnnnnnnnnnnnnnnnnnnnnnnnnnnnnnnnnnnnnnnnnnnnnnnnnnnnnnnnnnnnnnnnnnnnnnnnnnnnnnnnnnnnnnnnnnnnnnnnnnnnnnnnnnnnnnnnnnnnnnnnnnnnnnnnnnnnnnnnnnnnnnnnnnnnnnnnnnnnnnnnnnnnnnnnnnnnnnnnnnnnnnnnnnnnnnnnnnnnnnnnnnnnnnnnnnnnnnnnnnnnnnnnnnnnnnnnnnnnnnnnnnnnnnnnnnnnnnnnnnnnnnnnnnnnnnnnnnnnnnnnnnnnnnnnnnnnnnnnnnnnnnnnnnnnnnnnnnnnnnnnnnnnnnnnnnnnnnnnnnnnnnnnnnnnnnnnnnnnnnnnnnnnnnnnnnnnnnnnnnnnnnnnnnnnnnnnnnnnnnnnnnnnnnnnnnnnnnnnnnnnnnnnnnnnnnnnnnnnnnnnnnnnnnnnnnnnnnnnnnnnnnnnnnnnnnnnnnnnnnnnnnnnnnnnnnnnnnnnnnnnnnnnnnnnnnnnnnnnnnnnnnnnnnnnnnnnnnnnnnnnnnnnnnnnnnnnnnnnnnnnnnnnnnnnnnnnnnnnnnnnnnnnnnnnnnnnnnnnnnnnnnnnnnnnnnnnnnnnnnnnnnnnnnnnnnnnnnnnnnnnnnnnnnnnnnnnnnnnnnnnnnnnnnnnnnnnnnnnnnnnnnnnnnnnnnnnnnnnnnnnnnnnnnnnnnnnnnnnnnnnnnnnnnnnnnnnnnnnnnnnnnnnnnnnnnnnnnnnnnnnnnnnnnnnnnnnnnnnnnnnnnnnnnnnnnnnnnnnnnnnnnnnnnnnnnnnnnnnnnnnnnnnnnnnnnnnnnnnnnnnnnnnnnnnnnnnnnnnnnnnnnnnnnnnnnnnnnnnnnnnnnnnnnnnnnnnnnnnnnnnnnnnnnnnnnnnnnnnnnnnnnnnnnnnnnnnnnnnnnnnnnnnnnnnnnnnnnnnnnnnnnnnnnnnnnnnnnnnnnnnnnnnnnnnnnnnnnnnnnnnnnnnnnnnnnnnnnnnnnnnnnnnnnnnnnnnnnnnnnnnnnnnnnnnnnnnnnnnnnnnnnnnnnnnnnnnnnnnnnnnnnnnnnnnnnnnnnnnnnnnnnnnnnnnnnnnnnnnnnnnnnnnnnnnnnnnnnnnnnnnnnnnnnnnnnnnnnnnnnnnnnnnnnnnnnnnnnnnnnnnnnnnnnnnnnnnnnnnnnnnnnnnnnnnnnnnnnnnnnnnnnnnnnnnnnnnnnnnnnnnnnnnnnnnnnnnnnnnnnnnnnnnnnnnnnnnnnnnnnnnnnnnnnnnnnnnnnnnnnnnnnnnnnnnnnnnnnnnnnnnnnnnnnnnnnnnnnnnnnnnnnnnnnnnnnnnnnnnnnnnnnnnnnnnnnnnnnnnnnnnnnnnnnnnnnnnnnnnnnnnnnnnnnnnnnnnnnnnnnnnnnnnnnnnnnnnnnnnnnnnnnnnnnnnnnnnnnnnnnnnnnnnnnnnnnnnnnnnnnnnnnnnnnnnnnnnnnnnnnnnnnnnnnnnnnnnnnnnnnnnnnnnnnnnnnnnnnnnnnnnnnnnnnnnnnnnnnnnnnnnnnnnnnnnnnnnnnnnnnnnnnnnnnnnnnnnnnnnnnnnnnnnnnnnnnnnnnnnnnnnnnnnnnnnnnnnnnnnnnnnnnnnnnnnnnnnnnnnnnnnnnnnnnnnnnnnnnnnnnnnnnnnnnnnnnnnnnnnnnnnnnnnnnnnnnnnnnnnnnnnnnnnnnnnnnnnnnnnnnnnnnnnnnnnnnnnnnnnnnnnnnnnnnnnnnnnnnnnnnnnnnnnnnnnnnnnnnnnnnnnnnnnnnnnnnnnnnnnnnnnnnnnnnnnnnnnnnnnnnnnnnnnnnnnnnnnnnnnnnnnnnnnnnnnnnnnnnnnnnnnnnnnnnnnnnnnnnnnnnnnnnnnnnnnnnnnnnnnnnnnnnnnnnnnnnnnnnnnnnnnnnnnnnnnnnnnnnnnnnnnnnnnnnnnnnnnnnnnnnnnnnnnnnnnnnnnnnnnnnnnnnnnnnnnnnnnnnnnnnnnnnnnnnnnnnnnnnnnnnnnnnnnnnnnnnnnnnnnnnnnnnnnnnnnnnnnnnnnnnnnnnnnnnnnnnnnnnnnnnnnnnnnnnnnnnnnnnnnnnnnnnnnnnnnnnnnnnnnnnnnnnnnnnnnnnnnnnnnnnnnnnnnnnnnnnnnnnnnnnnnnnnnnnnnnnnnnnnnnnnnnnnnnnnnnnnnnnnnnnnnnnnnnnnnnnnnnnnnnnnnnnnnnnnnnnnnnnnnnnnnnnnnnnnnnnnnnnnnnnnnnnnnnnnnnnnnnnnnnnnnnnnnnnnnnnnnnnnnnnnnnnnnnnnnnnnnnnnnnnnnnnnnnnnnnnnnnnnnnnnnnnnnnnnnnnnnnnnnnnnnnnnnnnnnnnnnnnnnnnnnnnnnnnnnnnnnnnnnnnnnnnnnnnnnnnnnnnnnnnnnnnnnnnnnnnnnnnnnnnnnnnnnnnnnnnnnnnnnnnnnnnnnnnnnnnnnnnnnnnnnnnnnnnnnnnnnnnnnnnnnnnnnnnnnnnnnnnnnnnnnnnnnnnnnnnnnnnnnnnnnnnnnnnnnnnnnnnnnnnnnnnnnnnnnnnnnnnnnnnnnnnnnnnnnnnnnnnnnnnnnnnnnnnnnnnnnnnnnnnnnnnnnnnnnnnnnnnnnnnnnnnnnnnnnnnnnnnnnnnnnnnnnnnnnnnnnnnnnnnnnnnnnnnnnnnnnnnnnnnnnnnnnnnnnnnnnnnnnnnnnnnnnnnnnnnnnnnnnnnnnnnnnnnnnnnnnnnnnnnnnnnnnnnnnnnnnnnnnnnnnnnnnnnnnnnnnnnnnnnnnnnnnnnnnnnnnnnnnnnnnnnnnnnnnnnnnnnnnnnnnnnnnnnnnnnnnnnnnnnnnnnnnnnnnnnnnnnnnnnnnnnnnnnnnnnnnnnnnnnnnnnnnnnnnnnnnnnnnnnnnnnnnnnnnnnnnnnnnnnnnnnnnnnnnnnnnnnnnnnnnnnnnnnnnnnnnnnnnnnnnnnnnnnnnnnnnnnnnnnnnnnnnnnnnnnnnnnnnnnnnnnnnnnnnnnnnnnnnnnnnnnnnnnnnnnnnnnnnnnnnnnnnnnnnnnnnnnnnnnnnnnnnnnnnnnnnnnnnnnnnnnnnnnnnnnnnnnnnnnnnnnnnnnnnnnnnnnnnnnnnnnnnnnnnnnnnnnnnnnnnnnnnnnnnnnnnnnnnnnnnnnnnnnnnnnnnnnnnnnnnnnnnnnnnnnnnnnnnnnnnnnnnnnnnnnnnnnnnnnnnnnnnnnnnnnnnnnnnnnnnnnnnnnnnnnnnnnnnnnnnnnnnnnnnnnnnnnnnnnnnnnnnnnnnnnnnnnnnnnnnnnnnnnnnnnnnnnnnnnnnnnnnnnnnnnnnnnnnnnnnnnnnnnnnnnnnnnnnnnnnnnnnnnnnnnnnnnnnnnnnnnnnnnnnnnnnnnnnnnnnnnnnnnnnnnnnnnnnnnnnnnnnnnnnnnnnnnnnnnnnnnnnnnnnnnnnnnnnnnnnnnnnnnnnnnnnnnnnnnnnnnnnnnnnnnnnnnnnnnnnnnnnnnnnnnnnnnnnnnnnnnnnnnnnnnnnnnnnnnnnnnnnnnnnnnnnnnnnnnnnnnnnnnnnnnnnnnnnnnnnnnnnnnnnnnnnnnnnnnnnnnnnnnnnnnnnnnnnnnnnnnnnnnnnnnnnnnnnnnnnnnnnnnnnnnnnnnnnnnnnnnnnnnnnnnnnnnnnnnnnnnnnnnnnnnnnnnnnnnnnnnnnnnnnnnnnnnnnnnnnnnnnnnnnnnnnnnnnnnnnnnnnnnnnnnnnnnnnnnnnnnnnnnnnnnnnnnnnnnnnnnnnnnnnnnnnnnnnnnnnnnnnnnnnnnnnnnnnnnnnnnnnnnnnnnnnnnnnnnnnnnnnnnnnnnnnnnnnnnnnnnnnnnnnnnnnnnnnnnnnnnnnnnnnnnnnnnnnnnnnnnnnnnnnnnnnnnnnnnnnnnnnnnnnnnnnnnnnnnnnnnnnnnnnnnnnnnnnnnnnnnnnnnnnnnnnnnnnnnnnnnnnnnnnnnnnnnnnnnnnnnnnnnnnnnnnnnnnnnnnnnnnnnnnnnnnnnnnnnnnnnnnnnnnnnnnnnnnnnnnnnnnnnnnnnnnnnnnnnnnnnnnnnnnnnnnnnnnnnnnnnnnnnnnnnnnnnnnnnnnnnnnnnnnnnnnnnnnnnnnnnnnnnnnnnnnnnnnnnnnnnnnnnnnnnnnnnnnnnnnnnnnnnnnnnnnnnnnnnnnnnnnnnnnnnnnnnnnnnnnnnnnnnnnnnnnnnnnnnnnnnnnnnnnnnnnnnnnnnnnnnnnnnnnnnnnnnnnnnnnnnnnnnnnnnnnnnnnnnnnnnnnnnnnnnnnnnnnnnnnnnnnnnnnnnnnnnnnnnnnnnnnnnnnnnnnnnnnnnnnnnnnnnnnnnnnnnnnnnnnnnnnnnnnnnnnnnnnnnnnnnnnnnnnnnnnnnnnnnnnnnnnnnnnnnnnnnnnnnnnnnnnnnnnnnnnnnnnnnnnnnnnnnnnnnnnnnnnnnnnnnnnnnnnnnnnnnnnnnnnnnnnnnnnnnnnnnnnnnnnnnnnnnnnnnnnnnnnnnnnnnnnnnnnnnnnnnnnnnnnnnnnnnnnnnnnnnnnnnnnnnnnnnnnnnnnnnnnnnnnnnnnnnnnnnnnnnnnnnnnnnnnnnnnnnnnnnnnnnnnnnnnnnnnnnnnnnnnnnnnnnnnnnnnnnnnnnnnnnnnnnnnnnnnnnnnnnnnnnnnnnnnnnnnnnnnnnnnnnnnnnnnnnnnnnnnnnnnnnnnnnnnnnnnnnnnnnnnnnnnnnnnnnnnnnnnnnnnnnnnnnnnnnnnnnnnnnnnnnnnnnnnnnnnnnnnnnnnnnnnnnnnnnnnnnnnnnnnnnnnnnnnnnnnnnnnnnnnnnnnnnnnnnnnnnnnnnnnnnnnnnnnnnnnnnnnnnnnnnnnnnnnnnnnnnnnnnnnnnnnnnnnnnnnnnnnnnnnnnnnnnnnnnnnnnnnnnnnnnnnnnnnnnnnnnnnnnnnnnnnnnnnnnnnnnnnnnnnnnnnnnnnnnnnnnnnnnnnnnnnnnnnnnnnnnnnnnnnnnnnnnnnnnnnnnnnnnnnnnnnnnnnnnnnnnnnnnnnnnnnnnnnnnnnnnnnnnnnnnnnnnnnnnnnnnnnnnnnnnnnnnnnnnnnnnnnnnnnnnnnnnnnnnnnnnnnnnnnnnnnnnnnnnnnnnnnnnnnnnnnnnnnnnnnnnnnnnnnnnnnnnnnnnnnnnnnnnnnnnnnnnnnnnnnnnnnnnnnnnnnnnnnnnnnnnnnnnnnnnnnnnnnnnnnnnnnnnnnnnnnnnnnnnnnnnnnnnnnnnnnnnnnnnnnnnnnnnnnnnnnnnnnnnnnnnnnnnnnnnnnnnnnnnnnnnnnnnnnnnnnnnnnnnnnnnnnnnnnnnnnnnnnnnnnnnnnnnnnnnnnnnnnnnnnnnnnnnnnnnnnnnnnnnnnnnnnnnnnnnnnnnnnnnnnnnnnnnnnnnnnnnnnnnnnnnnnnnnnnnnnnnnnnnnnnnnnnnnnnnnnnnnnnnnnnnnnnnnnnnnnnnnnnnnnnnnnnnnnnnnnnnnnnnnnnnnnnnnnnnnnnnnnnnnnnnnnnnnnnnnnnnnnnnnnnnnnnnnnnnnnnnnnnnnnnnnnnnnnnnnnnnnnnnnnnnnnnnnnnnnnnnnnnnnnnnnnnnnnnnnnnnnnnnnnnnnnnnnnnnnnnnnnnnnnnnnnnnnnnnnnnnnnnnnnnnnnnnnnnnnnnnnnnnnnnnnnnnnnnnnnnnnnnnnnnnnnnnnnnnnnnnnnnnnnnnnnnnnnnnnnnnnnnnnnnnnnnnnnnnnnnnnnnnnnnnnnnnnnnnnnnnnnnnnnnnnnnnnnnnnnnnnnnnnnnnnnnnnnnnnnnnnnnnnnnnnnnnnnnnnnnnnnnnnnnnnnnnnnnnnnnnnnnnnnnnnnnnnnnnnnnnnnnnnnnnnnnnnnnnnnnnnnnnnnnnnnnnnnnnnnnnnnnnnnnnnnnnnnnnnnnnnnnnnnnnnnnnnnnnnnnnnnnnnnnnnnnnnnnnnnnnnnnnnnnnnnnnnnnnnnnnnnnnnnnnnnnnnnnnnnnnnnnnnnnnnnnnnnnnnnnnnnnnnnnnnnnnnnnnnnnnnnnnnnnnnnnnnnnnnnnnnnnnnnnnnnnnnnnnnnnnnnnnnnnnnnnnnnnnnnnnnnnnnnnnnnnnnnnnnnnnnnnnnnnnnnnnnnnnnnnnnnnnnnnnnnnnnnnnnnnnnnnnnnnnnnnnnnnnnnnnnnnnnnnnnnnnnnnnnnnnnnnnnnnnnnnnnnnnnnnnnnnnnnnnnnnnnnnnnnnnnnnnnnnnnnnnnnnnnnnnnnnnnnnnnnnnnnnnnnnnnnnnnnnnnnnnnnnnnnnnnnnnnnnnnnnnnnnnnnnnnnnnnnnnnnnnnnnnnnnnnnnnnnnnnnnnnnnnnnnnnnnnnnnnnnnnnnnnnnnnnnnnnnnnnnnnnnnnnnnnnnnnnnnnnnnnnnnnnnnnnnnnnnnnnnnnnnnnnnnnnnnnnnnnnnnnnnnnnnnnnnnnnnnnnnnnnnnnnnnnnnnnnnnnnnnnnnnnnnnnnnnnnnnnnnnnnnnnnnnnnnnnnnnnnnnnnnnnnnnnnnnnnnnnnnnnnnnnnnnnnnnnnnnnnnnnnnnnnnnnnnnnnnnnnnnnnnnnnnnnnnnnnnnnnnnnnnnnnnnnnnnnnnnnnnnnnnnnnnnnnnnnnnnnnnnnnnnnnnnnnnnnnnnnnnnnnnnnnnnnnnnnnnnnnnnnnnnnnnnnnnnnnnnnnnnnnnnnnnnnnnnnnnnnnnnnnnnnnnnnnnnnnnnnnnnnnnnnnnnnnnnnnnnnnnnnnnnnnnnnnnnnnnnnnnnnnnnnnnnnnnnnnnnnnnnnnnnnnnnnnnnnnnnnnnnnnnnnnnnnnnnnnnnnnnnnnnnnnnnnnnnnnnnnnnnnnnnnnnnnnnnnnnnnnnnnnnnnnnnnnnnnnnnnnnnnnnnnnnnnnnnnnnnnnnnnnnnnnnnnnnnnnnnnnnnnnnnnnnnnnnnnnnnnnnnnnnnnnnnnnnnnnnnnnnnnnnnnnnnnnnnnnnnnnnnnnnnnnnnnnnnnnnnnnnnnnnnnnnnnnnnnnnnnnnnnnnnnnnnnnnnnnnnnnnnnnnnnnnnnnnnnnnnnnnnnnnnnnnnnnnnnnnnnnnnnnnnnnnnnnnnnnnnnnnnnnnnnnnnnnnnnnnnnnnnnnnnnnnnnnnnnnnnnnnnnnnnnnnnnnnnnnnnnnnnnnnnnnnnnnnnnnnnnnnnnnnnnnnnnnnnnnnnnnnnnnnnnnnnnnnnnnnnnnnnnnnnnnnnnnnnnnnnnnnnnnnnnnnnnnnnnnnnnnnnnnnnnnnnnnnnnnnnnnnnnnnnnnnnnnnnnnnnnnnnnnnnnnnnnnnnnnnnnnnnnnnnnnnnnnnnnnnnnnnnnnnnnnnnnnnnnnnnnnnnnnnnnnnnnnnnnnnnnnnnnnnnnnnnnnnnnnnnnnnnnnnnnnnnnnnnnnnnnnnnnnnnnnnnnnnnnnnnnnnnnnnnnnnnnnnnnnnnnnnnnnnnnnnnnnnnnnnnnnnnnnnnnnnnnnnnnnnnnnnnnnnnnnnnnnnnnnnnnnnnnnnnnnnnnnnnnnnnnnnnnnnnnnnnnnnnnnnnnnnnnnnnnnnnnnnnnnnnnnnnnnnnnnnnnnnnnnnnnnnnnnnnnnnnnnnnnnnnnnnnnnnnnnnnnnnnnnnnnnnnnnnnnnnnnnnnnnnnnnnnnnnnnnnnnnnnnnnnnnnnnnnnnnnnnnnnnnnnnnnnnnnnnnnnnnnnnnnnnnnnnnnnnnnnnnnnnnnnnnnnnnnnnnnnnnnnnnnnnnnnnnnnnnnnnnnnnnnnnnnnnnnnnnnnnnnnnnnnnnnnnnnnnnnnnnnnnnnnnnnnnnnnnnnnnnnnnnnnnnnnnnnnnnnnnnnnnnnnnnnnnnnnnnnnnnnnnnnnnnnnnnnnnnnnnnnnnnnnnnnnnnnnnnnnnnnnnnnnnnnnnnnnnnnnnnnnnnnnnnnnnnnnnnnnnnnnnnnnnnnnnnnnnnnnnnnnnnnnnnnnnnnnnnnnnnnnnnnnnnnnnnnnnnnnnnnnnnnnnnnnnnnnnnnnnnnnnnnnnnnnnnnnnnnnnnnnnnnnnnnnnnnnnnnnnnnnnnnnnnnnnnnnnnnnnnnnnnnnnnnnnnnnnnnnnnnnnnnnnnnnnnnnnnnnnnnnnnnnnnnnnnnnnnnnnnnnnnnnnnnnnnnnnnnnnnnnnnnnnnnnnnnnnnnnnnnnnnnnnnnnnnnnnnnnnnnnnnnnnnnnnnnnnnnnnnnnnnnnnnnnnnnnnnnnnnnnnnnnnnnnnnnnnnnnnnnnnnnnnnnnnnnnnnnnnnnnnnnnnnnnnnnnnnnnnnnnnnnnnnnnnnnnnnnnnnnnnnnnnnnnnnnnnnnnnnnnnnnnnnnnnnnnnnnnnnnnnnnnnnnnnnnnnnnnnnnnnnnnnnnnnnnnnnnnnnnnnnnnnnnnnnnnnnnnnnnnnnnnnnnnnnnnnnnnnnnnnnnnnnnnnnnnnnnnnnnnnnnnnnnnnnnnnnnnnnnnnnnnnnnnnnnnnnnnnnnnnnnnnnnnnnnnnnnnnnnnnnnnnnnnnnnnnnnnnnnnnnnnnnnnnnnnnnnnnnnnnnnnnnnnnnnnnnnnnnnnnnnnnnnnnnnnnnnnnnnnnnnnnnnnnnnnnnnnnnnnnnnnnnnnnnnnnnnnnnnnnnnnnnnnnnnnnnnnnnnnnnnnnnnnnnnnnnnnnnnnnnnnnnnnnnnnnnnnnnnnnnnnnnnnnnnnnnnnnnnnnnnnnnnnnnnnnnnnnnnnnnnnnnnnnnnnnnnnnnnnnnnnnnnnnnnnnnnnnnnnnnnnnnnnnnnnnnnnnnnnnnnnnnnnnnnnnnnnnnnnnnnnnnnnnnnnnnnnnnnnnnnnnnnnnnnnnnnnnnnnnnnnnnnnnnnnnnnnnnnnnnnnnnnnnnnnnnnnnnnnnnnnnnnnnnnnnnnnnnnnnnnnnnnnnnnnnnnnnnnnnnnnnnnnnnnnnnnnnnnnnnnnnnnnnnnnnnnnnnnnnnnnnnnnnnnnnnnnnnnnnnnnnnnnnnnnnnnnnnnnnnnnnnnnnnnnnnnnnnnnnnnnnnnnnnnnnnnnnnnnnnnnnnnnnnnnnnnnnnnnnnnnnnnnnnnnnnnnnnnnnnnnnnnnnnnnnnnnnnnnnnnnnnnnnnnnnnnnnnnnnnnnnnnnnnnnnnnnnnnnnnnnnnnnnnnnnnnnnnnnnnnnnnnnnnnnnnnnnnnnnnnnnnnnnnnnnnnnnnnnnnnnnnnnnnnnnnnnnnnnnnnnnnnnnnnnnnnnnnnnnnnnnnnnnnnnnnnnnnnnnnnnnnnnnnnnnnnnnnnnnnnnnnnnnnnnnnnnnnnnnnnnnnnnnnnnnnnnnnnnnnnnnnnnnnnnnnnnnnnnnnnnnnnnnnnnnnnnnnnnnnnnnnnnnnnnnnnnnnnnnnnnnnnnnnnnnnnnnnnnnnnnnnnnnnnnnnnnnnnnnnnnnnnnnnnnnnnnnnnnnnnnnnnnnnnnnnnnnnnnnnnnnnnnnnnnnnnnnnnnnnnnnnnnnnnnnnnnnnnnnnnnnnnnnnnnnnnnnnnnnnnnnnnnnnnnnnnnnnnnnnnnnnnnnnnnnnnnnnnnnnnnnnnnnnnnnnnnnnnnnnnnnnnnnnnnnnnnnnnnnnnnnnnnnnnnnnnnnnnnnnnnnnnnnnnnnnnnnnnnnnnnnnnnnnnnnnnnnnnnnnnnnnnnnnnnnnnnnnnnnnnnnnnnnnnnnnnnnnnnnnnnnnnnnnnnnnnnnnnnnnnnnnnnnnnnnnnnnnnnnnnnnnnnnnnnnnnnnnnnnnnnnnnnnnnnnnnnnnnnnnnnnnnnnnnnnnnnnnnnnnnnnnnnnnnnnnnnnnnnnnnnnnnnnnnnnnnnnnnnnnnnnnnnnnnnnnnnnnnnnnnnnnnnnnnnnnnnnnnnnnnnnnnnnnnnnnnnnnnnnnnnnnnnnnnnnnnnnnnnnnnnnnnnnnnnnnnnnnnnnnnnnnnnnnnnnnnnnnnnnnnnnnnnnnnnnnnnnnnnnnnnnnnnnnnnnnnnnnnnnnnnnnnnnnnnnnnnnnnnnnnnnnnnnnnnnnnnnnnnnnnnnnnnnnnnnnnnnnnnnnnnnnnnnnnnnnnnnnnnnnnnnnnnnnnnnnnnnnnnnnnnnnnnnnnnnnnnnnnnnnnnnnnnnnnnnnnnnnnnnnnnnnnnnnnnnnnnnnnnnnnnnnnnnnnnnnnnnnnnnnnnnnnnnnnnnnnnnnnnnnnnnnnnnnnnnnnnnnnnnnnnnnnnnnnnnnnnnnnnnnnnnnnnnnnnnnnnnnnnnnnnnnnnnnnnnnnnnnnnnnnnnnnnnnnnnnnnnnnnnnnnnnnnnnnnnnnnnnnnnnnnnnnnnnnnnnnnnnnnnnnnnnnnnnnnnnnnnnnnnnnnnnnnnnnnnnnnnnnnnnnnnnnnnnnnnnnnnnnnnnnnnnnnnnnnnnnnnnnnnnnnnnnnnnnnnnnnnnnnnnnnnnnnnnnnnnnnnnnnnnnnnnnnnnnnnnnnnnnnnnnnnnnnnnnnnnnnnnnnnnnnnnnnnnnnnnnnnnnnnnnnnnnnnnnnnnnnnnnnnnnnnnnnnnnnnnnnnnnnnnnnnnnnnnnnnnnnnnnnnnnnnnnnnnnnnnnnnnnnnnnnnnnnnnnnnnnnnnnnnnnnnnnnnnnnnnnnnnnnnnnnnnnnnnnnnnnnnnnnnnnnnnnnnnnnnnnnnnnnnnnnnnnnnnnnnnnnnnnnnnnnnnnnnnnnnnnnnnnnnnnnnnnnnnnnnnnnnnnnnnnnnnnnnnnnnnnnnnnnnnnnnnnnnnnnnnnnnnnnnnnnnnnnnnnnnnnnnnnnnnnnnnnnnnnnnnnnnnnnnnnnnnnnnnnnnnnnnnnnnnnnnnnnnnnnnnnnnnnnnnnnnnnnnnnnnnnnnnnnnnnnnnnnnnnnnnnnnnnnnnnnnnnnnnnnnnnnnnnnnnnnnnnnnnnnnnnnnnnnnnnnnnnnnnnnnnnnnnnnnnnnnnnnnnnnnnnnnnnnnnnnnnnnnnnnnnnnnnnnnnnnnnnnnnnnnnnnnnnnnnnnnnnnnnnnnnnnnnnnnnnnnnnnnnnnnnnnnnnnnnnnnnnnnnnnnnnnnnnnnnnnnnnnnnnnnnnnnnnnnnnnnnnnnnnnnnnnnnnnnnnnnnnnnnnnnnnnnnnnnnnnnnnnnnnnnnnnnnnnnnnnnnnnnnnnnnnnnnnnnnnnnnnnnnnnnnnnnnnnnnnnnnnnnnnnnnnnnnnnnnnnnnnnnnnnnnnnnnnnnnnnnnnnnnnnnnnnnnnnnnnnnnnnnnnnnnnnnnnnnnnnnnnnnnnnnnnnnnnnnnnnnnnnnnnnnnnnnnnnnnnnnnnnnnnnnnnnnnnnnnnnnnnnnnnnnnnnnnnnnnnnnnnnnnnnnnnnnnnnnnnnnnnnnnnnnnnnnnnnnnnnnnnnnnnnnnnnnnnnnnnnnnnnnnnnnnnnnnnnnnnnnnnnnnnnnnnnnnnnnnnnnnnnnnnnnnnnnnnnnnnnnnnnnnnnnnnnnnnnnnnnnnnnnnnnnnnnnnnnnnnnnnnnnnnnnnnnnnnnnnnnnnnnnnnnnnnnnnnnnnnnnnnnnnnnnnnnnnnnnnnnnnnnnnnnnnnnnnnnnnnnnnnnnnnnnnnnnnnnnnnnnnnnnnnnnnnnnnnnnnnnnnnnnnnnnnnnnnnnnnnnnnnnnnnnnnnnnnnnnnnnnnnnnnnnnnnnnnnnnnnnnnnnnnnnnnnnnnnnnnnnnnnnnnnnnnnnnnnnnnnnnnnnnnnnnnnnnnnnnnnnnnnnnnnnnnnnnnnnnnnnnnnnnnnnnnnnnnnnnnnnnnnnnnnnnnnnnnnnnnnnnnnnnnnnnnnnnnnnnnnnnnnnnnnnnnnnnnnnnnnnnnnnnnnnnnnnnnnnnnnnnnnnnnnnnnnnnnnnnnnnnnnnnnnnnnnnnnnnnnnnnnnnnnnnnnnnnnnnnnnnnnnnnnnnnnnnnnnnnnnnnnnnnnnnnnnnnnnnnnnnnnnnnnnnnnnnnnnnnnnnnnnnnnnnnnnnnnnnnnnnnnnnnnnnnnnnnnnnnnnnnnnnnnnnnnnnnnnnnnnnnnnnnnnnnnnnnnnnnnnnnnnnnnnnnnnnnnnnnnnnnnnnnnnnnnnnnnnnnnnnnnnnnnnnnnnnnnnnnnnnnnnnnnnnnnnnnnnnnnnnnnnnnnnnnnnnnnnnnnnnnnnnnnnnnnnnnnnnnnnnnnnnnnnnnnnnnnnnnnnnnnnnnnnnnnnnnnnnnnnnnnnnnnnnnnnnnnnnnnnnnnnnnnnnnnnnnnnnnnnnnnnnnnnnnnnnnnnnnnnnnnnnnnnnnnnnnnnnnnnnnnnnnnnnnnnnnnnnnnnnnnnnnnnnnnnnnnnnnnnnnnnnnnnnnnnnnnnnnnnnnnnnnnnnnnnnnnnnnnnnnnnnnnnnnnnnnnnnnnnnnnnnnnnnnnnnnnnnnnnnnnnnnnnnnnnnnnnnnnnnnnnnnnnnnnnnnnnnnnnnnnnnnnnnnnnnnnnnnnnnnnnnnnnnnnnnnnnnnnnnnnnnnnnnnnnnnnnnnnnnnnnnnnnnnnnnnnnnnnnnnnnnnnnnnnnnnnnnnnnnnnnnnnnnnnnnnnnnnnnnnnnnnnnnnnnnnnnnnnnnnnnnnnnnnnnnnnnnnnnnnnnnnnnnnnnnnnnnnnnnnnnnnnnnnnnnnnnnnnnnnnnnnnnnnnnnnnnnnnnnnnnnnnnnnnnnnnnnnnnnnnnnnnnnnnnnnnnnnnnnnnnnnnnnnnnnnnnnnnnnnnnnnnnnnnnnnnnnnnnnnnnnnnnnnnnnnnnnnnnnnnnnnnnnnnnnnnnnnnnnnnnnnnnnnnnnnnnnnnnnnnnnnnnnnnnnnnnnnnnnnnnnnnnnnnnnnnnnnnnnnnnnnnnnnnnnnnnnnnnnnnnnnnnnnnnnnnnnnnnnnnnnnnnnnnnnnnnnnnnnnnnnnnnnnnnnnnnnnnnnnnnnnnnnnnnnnnnnnnnnnnnnnnnnnnnnnnnnnnnnnnnnnnnnnnnnnnnnnnnnnnnnnnnnnnnnnnnnnnnnnnnnnnnnnnnnnnnnnnnnnnnnnnnnnnnnnnnnnnnnnnnnnnnnnnnnnnnnnnnnnnnnnnnnnnnnnnnnnnnnnnnnnnnnnnnnnnnnnnnnnnnnnnnnnnnnnnnnnnnnnnnnnnnnnnnnnnnnnnnnnnnnnnnnnnnnnnnnnnnnnnnnnnnnnnnnnnnnnnnnnnnnnnnnnnnnnnnnnnnnnnnnnnnnnnnnnnnnnnnnnnnnnnnnnnnnnnnnnnnnnnnnnnnnnnnnnnnnnnnnnnnnnnnnnnnnnnnnnnnnnnnnnnnnnnnnnnnnnnnnnnnnnnnnnnnnnnnnnnnnnnnnnnnnnnnnnnnnnnnnnnnnnnnnnnnnnnnnnnnnnnnnnnnnnnnnnnnnnnnnnnnnnnnnnnnnnnnnnnnnnnnnnnnnnnnnnnnnnnnnnnnnnnnnnnnnnnnnnnnnnnnnnnnnnnnnnnnnnnnnnnnnnnnnnnnnnnnnnnnnnnnnnnnnnnnnnnnnnnnnnnnnnnnnnnnnnnnnnnnnnnnnnnnnnnnnnnnnnnnnnnnnnnnnnnnnnnnnnnnnnnnnnnnnnnnnnnnnnnnnnnnnnnnnnnnnnnnnnnnnnnnnnnnnnnnnnnnnnnnnnnnnnnnnnnnnnnnnnnnnnnnnnnnnnnnnnnnnnnnnnnnnnnnnnnnnnnnnnnnnnnnnnnnnnnnnnnnnnnnnnnnnnnnnnnnnnnnnnnnnnnnnnnnnnnnnnnnnnnnnnnnnnnnnnnnnnnnnnnnnnnnnnnnnnnnnnnnnnnnnnnnnnnnnnnnnnnnnnnnnnnnnnnnnnnnnnnnnnnnnnnnnnnnnnnnnnnnnnnnnnnnnnnnnnnnnnnnnnnnnnnnnnnnnnnnnnnnnnnnnnnnnnnnnnnnnnnnnnnnnnnnnnnnnnnnnnnnnnnnnnnnnnnnnnnnnnnnnnnnnnnnnnnnnnnnnnnnnnnnnnnnnnnnnnnnnnnnnnnnnnnnnnnnnnnnnnnnnnnnnnnnnnnnnnnnnnnnnnnnnnnnnnnnnnnnnnnnnnnnnnnnnnnnnnnnnnnnnnnnnnnnnnnnnnnnnnnnnnnnnnnnnnnnnnnnnnnnnnnnnnnnnnnnnnnnnnnnnnnnnnnnnnnnnnnnnnnnnnnnnnnnnnnnnnnnnnnnnnnnnnnnnnnnnnnnnnnnnnnnnnnnnnnnnnnnnnnnnnnnnnnnnnnnnnnnnnnnnnnnnnnnnnnnnnnnnnnnnnnnnnnnnnnnnnnnnnnnnnnnnnnnnnnnnnnnnnnnnnnnnnnnnnnnnnnnnnnnnnnnnnnnnnnnnnnnnnnnnnnnnnnnnnnnnnnnnnnnnnnnnnnnnnnnnnnnnnnnnnnnnnnnnnnnnnnnnnnnnnnnnnnnnnnnnnnnnnnnnnnnnnnnnnnnnnnnnnnnnnnnnnnnnnnnnnnnnnnnnnnnnnnnnnnnnnnnnnnnnnnnnnnnnnnnnnnnnnnnnnnnnnnnnnnnnnnnnnnnnnnnnnnnnnnnnnnnnnnnnnnnnnnnnnnnnnnnnnnnnnnnnnnnnnnnnnnnnnnnnnnnnnnnnnnnnnnnnnnnnnnnnnnnnnnnnnnnnnnnnnnnnnnnnnnnnnnnnnnnnnnnnnnnnnnnnnnnnnnnnnnnnnnnnnnnnnnnnnnnnnnnnnnnnnnnnnnnnnnnnnnnnnnnnnnnnnnnnnnnnnnnnnnnnnnnnnnnnnnnnnnnnnnnnnnnnnnnnnnnnnnnnnnnnnnnnnnnnnnnnnnnnnnnnnnnnnnnnnnnnnnnnnnnnnnnnnnnnnnnnnnnnnnnnnnnnnnnnnnnnnnnnnnnnnnnnnnnnnnnnnnnnnnnnnnnnnnnnnnnnnnnnnnnnnnnnnnnnnnnnnnnnnnnnnnnnnnnnnnnnnnnnnnnnnnnnnnnnnnnnnnnnnnnnnnnnnnnnnnnnnnnnnnnnnnnnnnnnnnnnnnnnnnnnnnnnnnnnnnnnnnnnnnnnnnnnnnnnnnnnnnnnnnnnnnnnnnnnnnnnnnnnnnnnnnnnnnnnnnnnnnnnnnnnnnnnnnnnnnnnnnnnnnnnnnnnnnnnnnnnnnnnnnnnnnnnnnnnnnnnnnnnnnnnnnnnnnnnnnnnnnnnnnnnnnnnnnnnnnnnnnnnnnnnnnnnnnnnnnnnnnnnnnnnnnnnnnnnnnnnnnnnnnnnnnnnnnnnnnnnnnnnnnnnnnnnnnnnnnnnnnnnnnnnnnnnnnnnnnnnnnnnnnnnnnnnnnnnnnnnnnnnnnnnnnnnnnnnnnnnnnnnnnnnnnnnnnnnnnnnnnnnnnnnnnnnnnnnnnnnnnnnnnnnnnnnnnnnnnnnnnnnnnnnnnnnnnnnnnnnnnnnnnnnnnnnnnnnnnnnnnnnnnnnnnnnnnnnnnnnnnnnnnnnnnnnnnnnnnnnnnnnnnnnnnnnnnnnnnnnnnnnnnnnnnnnnnnnnnnnnnnnnnnnnnnnnnnnnnnnnnnnnnnnnnnnnnnnnnnnnnnnnnnnnnnnnnnnnnnnnnnnnnnnnnnnnnnnnnnnnnnnnnnnnnnnnnnnnnnnnnnnnnnnnnnnnnnnnnnnnnnnnnnnnnnnnnnnnnnnnnnnnnnnnnnnnnnnnnnnnnnnnnnnnnnnnnnnnnnnnnnnnnnnnnnnnnnnnnnnnnnnnnnnnnnnnnnnnnnnnnnnnnnnnnnnnnnnnnnnnnnnnnnnnnnnnnnnnnnnnnnnnnnnnnnnnnnnnnnnnnnnnnnnnnnnnnnnnnnnnnnnnnnnnnnnnnnnnnnnnnnnnnnnnnnnnnnnnnnnnnnnnnnnnnnnnnnnnnnnnnnnnnnnnnnnnnnnnnnnnnnnnnnnnnnnnnnnnnnnnnnnnnnnnnnnnnnnnnnnnnnnnnnnnnnnnnnnnnnnnnnnnnnnnnnnnnnnnnnnnnnnnnnnnnnnnnnnnnnnnnnnnnnnnnnnnnnnnnnnnnnnnnnnnnnnnnnnnnnnnnnnnnnnnnnnnnnnnnnnnnnnnnnnnnnnnnnnnnnnnnnnnnnnnnnnnnnnnnnnnnnnnnnnnnnnnnnnnnnnnnnnnnnnnnnnnnnnnnnnnnnnnnnnnnnnnnnnnnnnnnnnnnnnnnnnnnnnnnnnnnnnnnnnnnnnnnnnnnnnnnnnnnnnnnnnnnnnnnnnnnnnnnnnnnnnnnnnnnnnnnnnnnnnnnnnnnnnnnnnnnnnnnnnnnnnnnnnnnnnnnnnnnnnnnnnnnnnnnnnnnnnnnnnnnnnnnnnnnnnnnnnnnnnnnnnnnnnnnnnnnnnnnnnnnnnnnnnnnnnnnnnnnnnnnnnnnnnnnnnnnnnnnnnnnnnnnnnnnnnnnnnnnnnnnnnnnnnnnnnnnnnnnnnnnnnnnnnnnnnnnnnnnnnnnnnnnnnnnnnnnnnnnnnnnnnnnnnnnnnnnnnnnnnnnnnnnnnnnnnnnnnnnnnnnnnnnnnnnnnnnnnnnnnnnnnnnnnnnnnnnnnnnnnnnnnnnnnnnnnnnnnnnnnnnnnnnnnnnnnnnnnnnnnnnnnnnnnnnnnnnnnnnnnnnnnnnnnnnnnnnnnnnnnnnnnnnnnnnnnnnnnnnnnnnnnnnnnnnnnnnnnnnnnnnnnnnnnnnnnnnnnnnnnnnnnnnnnnnnnnnnnnnnnnnnnnnnnnnnnnnnnnnnnnnnnnnnnnnnnnnnnnnnnnnnnnnnnnnnnnnnnnnnnnnnnnnnnnnnnnnnnnnnnnnnnnnnnnnnnnnnnnnnnnnnnnnnnnnnnnnnnnnnnnnnnnnnnnnnnnnnnnnnnnnnnnnnnnnnnnnnnnnnnnnnnnnnnnnnnnnnnnnnnnnnnnnnnnnnnnnnnnnnnnnnnnnnnnnnnnnnnnnnnnnnnnnnnnnnnnnnnnnnnnnnnnnnnnnnnnnnnnnnnnnnnnnnnnnnnnnnnnnnnnnnnnnnnnnnnnnnnnnnnnnnnnnnnnnnnnnnnnnnnnnnnnnnnnnnnnnnnnnnnnnnnnnnnnnnnnnnnnnnnnnnnnnnnnnnnnnnnnnnnnnnnnnnnnnnnnnnnnnnnnnnnnnnnnnnnnnnnnnnnnnnnnnnnnnnnnnnnnnnnnnnnnnnnnnnnnnnnnnnnnnnnnnnnnnnnnnnnnnnnnnnnnnnnnnnnnnnnnnnnnnnnnnnnnnnnnnnnnnnnnnnnnnnnnnnnnnnnnnnnnnnnnnnnnnnnnnnnnnnnnnnnnnnnnnnnnnnnnnnnnnnnnnnnnnnnnnnnnnnnnnnnnnnnnnnnnnnnnnnnnnnnnnnnnnnnnnnnnnnnnnnnnnnnnnnnnnnnnnnnnnnnnnnnnnnnnnnnnnnnnnnnnnnnnnnnnnnnnnnnnnnnnnnnnnnnnnnnnnnnnnnnnnnnnnnnnnnnnnnnnnnnnnnnnnnnnnnnnnnnnnnnnnnnnnnnnnnnnnnnnnnnnnnnnnnnnnnnnnnnnnnnnnnnnnnnnnnnnnnnnnnnnnnnnnnnnnnnnnnnnnnnnnnnnnnnnnnnnnnnnnnnnnnnnnnnnnnnnnnnnnnnnnnnnnnnnnnnnnnnnnnnnnnnnnnnnnnnnnnnnnnnnnnnnnnnnnnnnnnnnnnnnnnnnnnnnnnnnnnnnnnnnnnnnnnnnnnnnnnnnnnnnnnnnnnnnnnnnnnnnnnnnnnnnnnnnnnnnnnnnnnnnnnnnnnnnnnnnnnnnnnnnnnnnnnnnnnnnnnnnnnnnnnnnnnnnnnnnnnnnnnnnnnnnnnnnnnnnnnnnnnnnnnnnnnnnnnnnnnnnnnnnnnnnnnnnnnnnnnnnnnnnnnnnnnnnnnnnnnnnnnnnnnnnnnnnnnnnnnnnnnnnnnnnnnnnnnnnnnnnnnnnnnnnnnnnnnnnnnnnnnnnnnnnnnnnnnnnnnnnnnnnnnnnnnnnnnnnnnnnnnnnnnnnnnnnnnnnnnnnnnnnnnnnnnnnnnnnnnnnnnnnnnnnnnnnnnnnnnnnnnnnnnnnnnnnnnnnnnnnnnnnnnnnnnnnnnnnnnnnnnnnnnnnnnnnnnnnnnnnnnnnnnnnnnnnnnnnnnnnnnnnnnnnnnnnnnnnnnnnnnnnnnnnnnnnnnnnnnnnnnnnnnnnnnnnnnnnnnnnnnnnnnnnnnnnnnnnnnnnnnnnnnnnnnnnnnnnnnnnnnnnnnnnnnnnnnnnnnnnnnnnnnnnnnnnnnnnnnnnnnnnnnnnnnnnnnnnnnnnnnnnnnnnnnnnnnnnnnnnnnnnnnnnnnnnnnnnnnnnnnnnnnnnnnnnnnnnnnnnnnnnnnnnnnnnnnnnnnnnnnnnnnnnnnnnnnnnnnnnnnnnnnnnnnnnnnnnnnnnnnnnnnnnnnnnnnnnnnnnnnnnnnnnnnnnnnnnnnnnnnnnnnnnnnnnnnnnnnnnnnnnnnnnnnnnnnnnnnnnnnnnnnnnnnnnnnnnnnnnnnnnnnnnnnnnnnnnnnnnnnnnnnnnnnnnnnnnnnnnnnnnnnnnnnnnnnnnnnnnnnnnnnnnnnnnnnnnnnnnnnnnnnnnnnnnnnnnnnnnnnnnnnnnnnnnnnnnnnnnnnnnnnnnnnnnnnnnnnnnnnnnnnnnnnnnnnnnnnnnnnnnnnnnnnnnnnnnnnnnnnnnnnnnnnnnnnnnnnnnnnnnnnnnnnnnnnnnnnnnnnnnnnnnnnnnnnnnnnnnnnnnnnnnnnnnnnnnnnnnnnnnnnnnnnnnnnnnnnnnnnnnnnnnnnnnnnnnnnnnnnnnnnnnnnnnnnnnnnnnnnnnnnnnnnnnnnnnnnnnnnnnnnnnnnnnnnnnnnnnnnnnnnnnnnnnnnnnnnnnnnnnnnnnnnnnnnnnnnnnnnnnnnnnnnnnnnnnnnnnnnnnnnnnnnnnnnnnnnnnnnnnnnnnnnnnnnnnnnnnnnnnnnnnnnnnnnnnnnnnnnnnnnnnnnnnnnnnnnnnnnnnnnnnnnnnnnnnnnnnnnnnnnnnnnnnnnnnnnnnnnnnnnnnnnnnnnnnnnnnnnnnnnnnnnnnnnnnnnnnnnnnnnnnnnnnnnnnnnnnnnnnnnnnnnnnnnnnnnnnnnnnnnnnnnnnnnnnnnnnnnnnnnnnnnnnnnnnnnnnnnnnnnnnnnnnnnnnnnnnnnnnnnnnnnnnnnnnnnnnnnnnnnnnnnnnnnnnnnnnnnnnnnnnnnnnnnnnnnnnnnnnnnnnnnnnnnnnnnnnnnnnnnnnnnnnnnnnnnnnnnnnnnnnnnnnnnnnnnnnnnnnnnnnnnnnnnnnnnnnnnnnnnnnnnnnnnnnnnnnnnnnnnnnnnnnnnnnnnnnnnnnnnnnnnnnnnnnnnnnnnnnnnnnnnnnnnnnnnnnnnnnnnnnnnnnnnnnnnnnnnnnnnnnnnnnnnnnnnnnnnnnnnnnnnnnnnnnnnnnnnnnnnnnnnnnnnnnnnnnnnnnnnnnnnnnnnnnnnnnnnnnnnnnnnnnnnnnnnnnnnnnnnnnnnnnnnnnnnnnnnnnnnnnnnnnnnnnnnnnnnnnnnnnnnnnnnnnnnnnnnnnnnnnnnnnnnnnnnnnnnnnnnnnnnnnnnnnnnnnnnnnnnnnnnnnnnnnnnnnnnnnnnnnnnnnnnnnnnnnnnnnnnnnnnnnnnnnnnnnnnnnnnnnnnnnnnnnnnnnnnnnnnnnnnnnnnnnnnnnnnnnnnnnnnnnnnnnnnnnnnnnnnnnnnnnnnnnnnnnnnnnnnnnnnnnnnnnnnnnnnnnnnnnnnnnnnnnnnnnnnnnnnnnnnnnnnnnnnnnnnnnnnnnnnnnnnnnnnnnnnnnnnnnnnnnnnnnnnnnnnnnnnnnnnnnnnnnnnnnnnnnnnnnnnnnnnnnnnnnnnnnnnnnnnnnnnnnnnnnnnnnnnnnnnnnnnnnnnnnnnnnnnnnnnnnnnnnnnnnnnnnnnnnnnnnnnnnnnnnnnnnnnnnnnnnnnnnnnnnnnnnnnnnnnnnnnnnnnnnnnnnnnnnnnnnnnnnnnnnnnnnnnnnnnnnnnnnnnnnnnnnnnnnnnnnnnnnnnnnnnnnnnnnnnnnnnnnnnnnnnnnnnnnnnnnnnnnnnnnnnnnnnnnnnnnnnnnnnnnnnnnnnnnnnnnnnnnnnnnnnnnnnnnnnnnnnnnnnnnnnnnnnnnnnnnnnnnnnnnnnnnnnnnnnnnnnnnnnnnnnnnnnnnnnnnnnnnnnnnnnnnnnnnnnnnnnnnnnnnnnnnnnnnnnnnnnnnnnnnnnnnnnnnnnnnnnnnnnnnnnnnnnnnnnnnnnnnnnnnnnnnnnnnnnnnnnnnnnnnnnnnnnnnnnnnnnnnnnnnnnnnnnnnnnnnnnnnnnnnnnnnnnnnnnnnnnnnnnnnnnnnnnnnnnnnnnnnnnnnnnnnnnnnnnnnnnnnnnnnnnnnnnnnnnnnnnnnnnnnnnnnnnnnnnnnnnnnnnnnnnnnnnnnnnnnnnnnnnnnnnnnnnnnnnnnnnnnnnnnnnnnnnnnnnnnnnnnnnnnnnnnnnnnnnnnnnnnnnnnnnnnnnnnnnnnnnnnnnnnnnnnnnnnnnnnnnnnnnnnnnnnnnnnnnnnnnnnnnnnnnnnnnnnnnnnnnnnnnnnnnnnnnnnnnnnnnnnnnnnnnnnnnnnnnnnnnnnnnnnnnnnnnnnnnnnnnnnnnnnnnnnnnnnnnnnnnnnnnnnnnnnnnnnnnnnnnnnnnnnnnnnnnnnnnnnnnnnnnnnnnnnnnnnnnnnnnnnnnnnnnnnnnnnnnnnnnnnnnnnnnnnnnnnnnnnnnnnnnnnnnnnnnnnnnnnnnnnnnnnnnnnnnnnnnnnnnnnnnnnnnnnnnnnnnnnnnnnnnnnnnnnnnnnnnnnnnnnnnnnnnnnnnnnnnnnnnnnnnnnnnnnnnnnnnnnnnnnnnnnnnnnnnnnnnnnnnnnnnnnnnnnnnnnnnnnnnnnnnnnnnnnnnnnnnnnnnnnnnnnnnnnnnnnnnnnnnnnnnnnnnnnnnnnnnnnnnnnnnnnnnnnnnnnnnnnnnnnnnnnnnnnnnnnnnnnnnnnnnnnnnnnnnnnnnnnnnnnnnnnnnnnnnnnnnnnnnnnnnnnnnnnnnnnnnnnnnnnnnnnnnnnnnnnnnnnnnnnnnnnnnnnnnnnnnnnnnnnnnnnnnnnnnnnnnnnnnnnnnnnnnnnnnnnnnnnnnnnnnnnnnnnnnnnnnnnnnnnnnnnnnnnnnnnnnnnnnnnnnnnnnnnnnnnnnnnnnnnnnnnnnnnnnnnnnnnnnnnnnnnnnnnnnnnnnnnnnnnnnnnnnnnnnnnnnnnnnnnnnnnnnnnnnnnnnnnnnnnnnnnnnnnnnnnnnnnnnnnnnnnnnnnnnnnnnnnnnnnnnnnnnnnnnnnnnnnnnnnnnnnnnnnnnnnnnnnnnnnnnnnnnnnnnnnnnnnnnnnnnnnnnnnnnnnnnnnnnnnnnnnnnnnnnnnnnnnnnnnnnnnnnnnnnnnnnnnnnnnnnnnnnnnnnnnnnnnnnnnnnnnnnnnnnnnnnnnnnnnnnnnnnnnnnnnnnnnnnnnnnnnnnnnnnnnnnnnnnnnnnnnnnnnnnnnnnnnnnnnnnnnnnnnnnnnnnnnnnnnnnnnnnnnnnnnnnnnnnnnnnnnnnnnnnnnnnnnnnnnnnnnnnnnnnnnnnnnnnnnnnnnnnnnnnnnnnnnnnnnnnnnnnnnnnnnnnnnnnnnnnnnnnnnnnnnnnnnnnnnnnnnnnnnnnnnnnnnnnnnnnnnnnnnnnnnnnnnnnnnnnnnnnnnnnnnnnnnnnnnnnnnnnnnnnnnnnnnnnnnnnnnnnnnnnnnnnnnnnnnnnnnnnnnnnnnnnnnnnnnnnnnnnnnnnnnnnnnnnnnnnnnnnnnnnnnnnnnnnnnnnnnnnnnnnnnnnnnnnnnnnnnnnnnnnnnnnnnnnnnnnnnnnnnnnnnnnnnnnnnnnnnnnnnnnnnnnnnnnnnnnnnnnnnnnnnnnnnnnnnnnnnnnnnnnnnnnnnnnnnnnnnnnnnnnnnnnnnnnnnnnnnnnnnnnnnnnnnnnnnnnnnnnnnnnnnnnnnnnnnnnnnnnnnnnnnnnnnnnnnnnnnnnnnnnnnnnnnnnnnnnnnnnnnnnnnnnnnnnnnnnnnnnnnnnnnnnnnnnnnnnnnnnnnnnnnnnnnnnnnnnnnnnnnnnnnnnnnnnnnnnnnnnnnnnnnnnnnnnnnnnnnnnnnnnnnnnnnnnnnnnnnnnnnnnnnnnnnnnnnnnnnnnnnnnnnnnnnnnnnnnnnnnnnnnnnnnnnnnnnnnnnnnnnnnnnnnnnnnnnnnnnnnnnnnnnnnnnnnnnnnnnnnnnnnnnnnnnnnnnnnnnnnnnnnnnnnnnnnnnnnnnnnnnnnnnnnnnnnnnnnnnnnnnnnnnnnnnnnnnnnnnnnnnnnnnnnnnnnnnnnnnnnnnnnnnnnnnnnnnnnnnnnnnnnnnnnnnnnnnnnnnnnnnnnnnnnnnnnnnnnnnnnnnnnnnnnnnnnnnnnnnnnnnnnnnnnnnnnnnnnnnnnnnnnnnnnnnnnnnnnnnnnnnnnnnnnnnnnnnnnnnnnnnnnnnnnnnnnnnnnnnnnnnnnnnnnnnnnnnnnnnnnnnnnnnnnnnnnnnnnnnnnnnnnnnnnnnnnnnnnnnnnnnnnnnnnnnnnnnnnnnnnnnnnnnnnnnnnnnnnnnnnnnnnnnnnnnnnnnnnnnnnnnnnnnnnnnnnnnnnnnnnnnnnnnnnnnnnnnnnnnnnnnnnnnnnnnnnnnnnnnnnnnnnnnnnnnnnnnnnnnnnnnnnnnnnnnnnnnnnnnnnnnnnnnnnnnnnnnnnnnnnnnnnnnnnnnnnnnnnnnnnnnnnnnnnnnnnnnnnnnnnnnnnnnnnnnnnnnnnnnnnnnnnnnnnnnnnnnnnnnnnnnnnnnnnnnnnnnnnnnnnnnnnnnnnnnnnnnnnnnnnnnnnnnnnnnnnnnnnnnnnnnnnnnnnnnnnnnnnnnnnnnnnnnnnnnnnnnnnnnnnnnnnnnnnnnnnnnnnnnnnnnnnnnnnnnnnnnnnnnnnnnnnnnnnnnnnnnnnnnnnnnnnnnnnnnnnnnnnnnnnnnnnnnnnnnnnnnnnnnnnnnnnnnnnnnnnnnnnnnnnnnnnnnnnnnnnnnnnnnnnnnnnnnnnnnnnnnnnnnnnnnnnnnnnnnnnnnnnnnnnnnnnnnnnnnnnnnnnnnnnnnnnnnnnnnnnnnnnnnnnnnnnnnnnnnnnnnnnnnnnnnnnnnnnnnnnnnnnnnnnnnnnnnnnnnnnnnnnnnnnnnnnnnnnnnnnnnnnnnnnnnnnnnnnnnnnnnnnnnnnnnnnnnnnnnnnnnnnnnnnnnnnnnnnnnnnnnnnnnnnnnnnnnnnnnnnnnnnnnnnnnnnnnnnnnnnnnnnnnnnnnnnnnnnnnnnnnnnnnnnnnnnnnnnnnnnnnnnnnnnnnnnnnnnnnnnnnnnnnnnnnnnnnnnnnnnnnnnnnnnnnnnnnnnnnnnnnnnnnnnnnnnnnnnnnnnnnnnnnnnnnnnnnnnnnnnnnnnnnnnnnnnnnnnnnnnnnnnnnnnnnnnnnnnnnnnnnnnnnnnnnnnnnnnnnnnnnnnnnnnnnnnnnnnnnnnnnnnnnnnnnnnnnnnnnnnnnnnnnnnnnnnnnnnnnnnnnnnnnnnnnnnnnnnnnnnnnnnnnnnnnnnnnnnnnnnnnnnnnnnnnnnnnnnnnnnnnnnnnnnnnnnnnnnnnnnnnnnnnnnnnnnnnnnnnnnnnnnnnnnnnnnnnnnnnnnnnnnnnnnnnnnnnnnnnnnnnnnnnnnnnnnnnnnnnnnnnnnnnnnnnnnnnnnnnnnnnnnnnnnnnnnnnnnnnnnnnnnnnnnnnnnnnnnnnnnnnnnnnnnnnnnnnnnnnnnnnnnnnnnnnnnnnnnnnnnnnnnnnnnnnnnnnnnnnnnnnnnnnnnnnnnnnnnnnnnnnnnnnnnnnnnnnnnnnnnnnnnnnnnnnnnnnnnnnnnnnnnnnnnnnnnnnnnnnnnnnnnnnnnnnnnnnnnnnnnnnnnnnnnnnnnnnnnnnnnnnnnnnnnnnnnnnnnnnnnnnnnnnnnnnnnnnnnnnnnnnnnnnnnnnnnnnnnnnnnnnnnnnnnnnnnnnnnnnnnnnnnnnnnnnnnnnnnnnnnnnnnnnnnnnnnnnnnnnnnnnnnnnnnnnnnnnnnnnnnnnnnnnnnnnnnnnnnnnnnnnnnnnnnnnnnnnnnnnnnnnnnnnnnnnnnnnnnnnnnnnnnnnnnnnnnnnnnnnnnnnnnnnnnnnnnnnnnnnnnnnnnnnnnnnnnnnnnnnnnnnnnnnnnnnnnnnnnnnnnnnnnnnnnnnnnnnnnnnnnnnnnnnnnnnnnnnnnnnnnnnnnnnnnnnnnnnnnnnnnnnnnnnnnnnnnnnnnnnnnnnnnnnnnnnnnnnnnnnnnnnnnnnnnnnnnnnnnnnnnnnnnnnnnnnnnnnnnnnnnnnnnnnnnnnnnnnnnnnnnnnnnnnnnnnnnnnnnnnnnnnnnnnnnnnnnnnnnnnnnnnnnnnnnnnnnnnnnnnnnnnnnnnnnnnnnnnnnnnnnnnnnnnnnnnnnnnnnnnnnnnnnnnnnnnnnnnnnnnnnnnnnnnnnnnnnnnnnnnnnnnnnnnnnnnnnnnnnnnnnnnnnnnnnnnnnnnnnnnnnnnnnnnnnnnnnnnnnnnnnnnnnnnnnnnnnnnnnnnnnnnnnnnnnnnnnnnnnnnnnnnnnnnnnnnnnnnnnnnnnnnnnnnnnnnnnnnnnnnnnnnnnnnnnnnnnnnnnnnnnnnnnnnnnnnnnnnnnnnnnnnnnnnnnnnnnnnnnnnnnnnnnnnnnnnnnnnnnnnnnnnnnnnnnnnnnnnnnnnnnnnnnnnnnnnnnnnnnnnnnnnnnnnnnnnnnnnnnnnnnnnnnnnnnnnnnnnnnnnnnnnnnnnnnnnnnnnnnnnnnnnnnnnnnnnnnnnnnnnnnnnnnnnnnnnnnnnnnnnnnnnnnnnnnnnnnnnnnnnnnnnnnnnnnnnnnnnnnnnnnnnnnnnnnnnnnnnnnnnnnnnnnnnnnnnnnnnnnnnnnnnnnnnnnnnnnnnnnnnnnnnnnnnnnnnnnnnnnnnnnnnnnnnnnnnnnnnnnnnnnnnnnnnnnnnnnnnnnnnnnnnnnnnnnnnnnnnnnnnnnnnnnnnnnnnnnnnnnnnnnnnnnnnnnnnnnnnnnnnnnnnnnnnnnnnnnnnnnnnnnnnnnnnnnnnnnnnnnnnnnnnnnnnnnnnnnnnnnnnnnnnnnnnnnnnnnnnnnnnnnnnnnnnnnnnnnnnnnnnnnnnnnnnnnnnnnnnnnnnnnnnnnnnnnnnnnnnnnnnnnnnnnnnnnnnnnnnnnnnnnnnnnnnnnnnnnnnnnnnnnnnnnnnnnnnnnnnnnnnnnnnnnnnnnnnnnnnnnnnnnnnnnnnnnnnnnnnnnnnnnnnnnnnnnnnnnnnnnnnnnnnnnnnnnnnnnnnnnnnnnnnnnnnnnnnnnnnnnnnnnnnnnnnnnnnnnnnnnnnnnnnnnnnnnnnnnnnnnnnnnnnnnnnnnnnnnnnnnnnnnnnnnnnnnnnnnnnnnnnnnnnnnnnnnnnnnnnnnnnnnnnnnnnnnnnnnnnnnnnnnnnnnnnnnnnnnnnnnnnnnnnnnnnnnnnnnnnnnnnnnnnnnnnnnnnnnnnnnnnnnnnnnnnnnnnnnnnnnnnnnnnnnnnnnnnnnnnnnnnnnnnnnnnnnnnnnnnnnnnnnnnnnnnnnnnnnnnnnnnnnnnnnnnnnnnnnnnnnnnnnnnnnnnnnnnnnnnnnnnnnnnnnnnnnnnnnnnnnnnnnnnnnnnnnnnnnnnnnnnnnnnnnnnnnnnnnnnnnnnnnnnnnnnnnnnnnnnnnnnnnnnnnnnnnnnnnnnnnnnnnnnnnnnnnnnnnnnnnnnnnnnnnnnnnnnnnnnnnnnnnnnnnnnnnnnnnnnnnnnnnnnnnnnnnnnnnnnnnnnnnnnnnnnnnnnnnnnnnnnnnnnnnnnnnnnnnnnnnnnnnnnnnnnnnnnnnnnnnnnnnnnnnnnnnnnnnnnnnnnnnnnnnnnnnnnnnnnnnnnnnnnnnnnnnnnnnnnnnnnnnnnnnnnnnnnnnnnnnnnnnnnnnnnnnnnnnnnnnnnnnnnnnnnnnnnnnnnnnnnnnnnnnnnnnnnnnnnnnnnnnnnnnnnnnnnnnnnnnnnnnnnnnnnnnnnnnnnnnnnnnnnnnnnnnnnnnnnnnnnnnnnnnnnnnnnnnnnnnnnnnnnnnnnnnnnnnnnnnnnnnnnnnnnnnnnnnnnnnnnnnnnnnnnnnnnnnnnnnnnnnnnnnnnnnnnnnnnnnnnnnnnnnnnnnnnnnnnnnnnnnnnnnnnnnnnnnnnnnnnnnnnnnnnnnnnnnnnnnnnnnnnnnnnnnnnnnnnnnnnnnnnnnnnnnnnnnnnnnnnnnnnnnnnnnnnnnnnnnnnnnnnnnnnnnnnnnnnnnnnnnnnnnnnnnnnnnnnnnnnnnnnnnnnnnnnnnnnnnnnnnnnnnnnnnnnnnnnnnnnnnnnnnnnnnnnnnnnnnnnnnnnnnnnnnnnnnnnnnnnnnnnnnnnnnnnnnnnnnnnnnnnnnnnnnnnnnnnnnnnnnnnnnnnnnnnnnnnnnnnnnnnnnnnnnnnnnnnnnnnnnnnnnnnnnnnnnnnnnnnnnnnnnnnnnnnnnnnnnnnnnnnnnnnnnnnnnnnnnnnnnnnnnnnnnnnnnnnnnnnnnnnnnnnnnnnnnnnnnnnnnnnnnnnnnnnnnnnnnnnnnnnnnnnnnnnnnnnnnnnnnnnnnnnnnnnnnnnnnnnnnnnnnnnnnnnnnnnnnnnnnnnnnnnnnnnnnnnnnnnnnnnnnnnnnnnnnnnnnnnnnnnnnnnnnnnnnnnnnnnnnnnnnnnnnnnnnnnnnnnnnnnnnnnnnnnnnnnnnnnnnnnnnnnnnnnnnnnnnnnnnnnnnnnnnnnnnnnnnnnnnnnnnnnnnnnnnnnnnnnnnnnnnnnnnnnnnnnnnnnnnnnnnnnnnnnnnnnnnnnnnnnnnnnnnnnnnnnnnnnnnnnnnnnnnnnnnnnnnnnnnnnnnnnnnnnnnnnnnnnnnnnnnnnnnnnnnnnnnnnnnnnnnnnnnnnnnnnnnnnnnnnnnnnnnnnnnnnnnnnnnnnnnnnnnnnnnnnnnnnnnnnnnnnnnnnnnnnnnnnnnnnnnnnnnnnnnnnnnnnnnnnnnnnnnnnnnnnnnnnnnnnnnnnnnnnnnnnnnnnnnnnnnnnnnnnnnnnnnnnnnnnnnnnnnnnnnnnnnnnnnnnnnnnnnnnnnnnnnnnnnnnnnnnnnnnnnnnnnnnnnnnnnnnnnnnnnnnnnnnnnnnnnnnnnnnnnnnnnnnnnnnnnnnnnnnnnnnnnnnnnnnnnnnnnnnnnnnnnnnnnnnnnnnnnnnnnnnnnnnnnnnnnnnnnnnnnnnnnnnnnnnnnnnnnnnnnnnnnnnnnnnnnnnnnnnnnnnnnnnnnnnnnnnnnnnnnnnnnnnnnnnnnnnnnnnnnnnnnnnnnnnnnnnnnnnnnnnnnnnnnnnnnnnnnnnnnnnnnnnnnnnnnnnnnnnnnnnnnnnnnnnnnnnnnnnnnnnnnnnnnnnnnnnnnnnnnnnnnnnnnnnnnnnnnnnnnnnnnnnnnnnnnnnnnnnnnnnnnnnnnnnnnnnnnnnnnnnnnnnnnnnnnnnnnnnnnnnnnnnnnnnnnnnnnnnnnnnnnnnnnnnnnnnnnnnnnnnnnnnnnnnnnnnnnnnnnnnnnnnnnnnnnnnnnnnnnnnnnnnnnnnnnnnnnnnnnnnnnnnnnnnnnnnnnnnnnnnnnnnnnnnnnnnnnnnnnnnnnnnnnnnnnnnnnnnnnnnnnnnnnnnnnnnnnnnnnnnnnnnnnnnnnnnnnnnnnnnnnnnnnnnnnnnnnnnnnnnnnnnnnnnnnnnnnnnnnnnnnnnnnnnnnnnnnnnnnnnnnnnnnnnnnnnnnnnnnnnnnnnnnnnnnnnnnnnnnnnnnnnnnnnnnnnnnnnnnnnnnnnnnnnnnnnnnnnnnnnnnnnnnnnnnnnnnnnnnnnnnnnnnnnnnnnnnnnnnnnnnnnnnnnnnnnnnnnnnnnnnnnnnnnnnnnnnnnnnnnnnnnnnnnnnnnnnnnnnnnnnnnnnnnnnnnnnnnnnnnnnnnnnnnnnnnnnnnnnnnnnnnnnnnnnnnnnnnnnnnnnnnnnnnnnnnnnnnnnnnnnnnnnnnnnnnnnnnnnnnnnnnnnnnnnnnnnnnnnnnnnnnnnnnnnnnnnnnnnnnnnnnnnnnnnnnnnnnnnnnnnnnnnnnnnnnnnnnnnnnnnnnnnnnnnnnnnnnnnnnnnnnnnnnnnnnnnnnnnnnnnnnnnnnnnnnnnnnnnnnnnnnnnnnnnnnnnnnnnnnnnnnnnnnnnnnnnnnnnnnnnnnnnnnnnnnnnnnnnnnnnnnnnnnnnnnnnnnnnnnnnnnnnnnnnnnnnnnnnnnnnnnnnnnnnnnnnnnnnnnnnnnnnnnnnnnnnnnnnnnnnnnnnnnnnnnnnnnnnnnnnnnnnnnnnnnnnnnnnnnnnnnnnnnnnnnnnnnnnnnnnnnnnnnnnnnnnnnnnnnnnnnnnnnnnnnnnnnnnnnnnnnnnnnnnnnnnnnnnnnnnnnnnnnnnnnnnnnnnnnnnnnnnnnnnnnnnnnnnnnnnnnnnnnnnnnnnnnnnnnnnnnnnnnnnnnnnnnnnnnnnnnnnnnnnnnnnnnnnnnnnnnnnnnnnnnnnnnnnnnnnnnnnnnnnnnnnnnnnnnnnnnnnnnnnnnnnnnnnnnnnnnnnnnnnnnnnnnnnnnnnnnnnnnnnnnnnnnnnnnnnnnnnnnnnnnnnnnnnnnnnnnnnnnnnnnnnnnnnnnnnnnnnnnnnnnnnnnnnnnnnnnnnnnnnnnnnnnnnnnnnnnnnnnnnnnnnnnnnnnnnnnnnnnnnnnnnnnnnnnnnnnnnnnnnnnnnnnnnnnnnnnnnnnnnnnnnnnnnnnnnnnnnnnnnnnnnnnnnnnnnnnnnnnnnnnnnnnnnnnnnnnnnnnnnnnnnnnnnnnnnnnnnnnnnnnnnnnnnnnnnnnnnnnnnnnnnnnnnnnnnnnnnnnnnnnnnnnnnnnnnnnnnnnnnnnnnnnnnnnnnnnnnnnnnnnnnnnnnnnnnnnnnnnnnnnnnnnnnnnnnnnnnnnnnnnnnnnnnnnnnnnnnnnnnnnnnnnnnnnnnnnnnnnnnnnnnnnnnnnnnnnnnnnnnnnnnnnnnnnnnnnnnnnnnnnnnnnnnnnnnnnnnnnnnnnnnnnnnnnnnnnnnnnnnnnnnnnnnnnnnnnnnnnnnnnnnnnnnnnnnnnnnnnnnnnnnnnnnnnnnnnnnnnnnnnnnnnnnnnnnnnnnnnnnnnnnnnnnnnnnnnnnnnnnnnnnnnnnnnnnnnnnnnnnnnnnnnnnnnnnnnnnnnnnnnnnnnnnnnnnnnnnnnnnnnnnnnnnnnnnnnnnnnnnnnnnnnnnnnnnnnnnnnnnnnnnnnnnnnnnnnnnnnnnnnnnnnnnnnnnnnnnnnnnnnnnnnnnnnnnnnnnnnnnnnnnnnnnnnnnnnnnnnnnnnnnnnnnnnnnnnnnnnnnnnnnnnnnnnnnnnnnnnnnnnnnnnnnnnnnnnnnnnnnnnnnnnnnnnnnnnnnnnnnnnnnnnnnnnnnnnnnnnnnnnnnnnnnnnnnnnnnnnnnnnnnnnnnnnnnnnnnnnnnnnnnnnnnnnnnnnnnnnnnnnnnnnnnnnnnnnnnnnnnnnnnnnnnnnnnnnnnnnnnnnnnnnnnnnnnnnnnnnnnnnnnnnnnnnnnnnnnnnnnnnnnnnnnnnnnnnnnnnnnnnnnnnnnnnnnnnnnnnnnnnnnnnnnnnnnnnnnnnnnnnnnnnnnnnnnnnnnnnnnnnnnnnnnnnnnnnnnnnnnnnnnnnnnnnnnnnnnnnnnnnnnnnnnnnnnnnnnnnnnnnnnnnnnnnnnnnnnnnnnnnnnnnnnnnnnnnnnnnnnnnnnnnnnnnnnnnnnnnnnnnnnnnnnnnnnnnnnnnnnnnnnnnnnnnnnnnnnnnnnnnnnnnnnnnnnnnnnnnnnnnnnnnnnnnnnnnnnnnnnnnnnnnnnnnnnnnnnnnnnnnnnnnnnnnnnnnnnnnnnnnnnnnnnnnnnnnnnnnnnnnnnnnnnnnnnnnnnnnnnnnnnnnnnnnnnnnnnnnnnnnnnnnnnnnnnnnnnnnnnnnnnnnnnnnnnnnnnnnnnnnnnnnnnnnnnnnnnnnnnnnnnnnnnnnnnnnnnnnnnnnnnnnnnnnnnnnnnnnnnnnnnnnnnnnnnnnnnnnnnnnnnnnnnnnnnnnnnnnnnnnnnnnnnnnnnnnnnnnnnnnnnnnnnnnnnnnnnnnnnnnnnnnnnnnnnnnnnnnnnnnnnnnnnnnnnnnnnnnnnnnnnnnnnnnnnnnnnnnnnnnnnnnnnnnnnnnnnnnnnnnnnnnnnnnnnnnnnnnnnnnnnnnnnnnnnnnnnnnnnnnnnnnnnnnnnnnnnnnnnnnnnnnnnnnnnnnnnnnnnnnnnnnnnnnnnnnnnnnnnnnnnnnnnnnnnnnnnnnnnnnnnnnnnnnnnnnnnnnnnnnnnnnnnnnnnnnnnnnnnnnnnnnnnnnnnnnnnnnnnnnnnnnnnnnnnnnnnnnnnnnnnnnnnnnnnnnnnnnnnnnnnnnnnnnnnnnnnnnnnnnnnnnnnnnnnnnnnnnnnnnnnnnnnnnnnnnnnnnnnnnnnnnnnnnnnnnnnnnnnnnnnnnnnnnnnnnnnnnnnnnnnnnnnnnnnnnnnnnnnnnnnnnnnnnnnnnnnnnnnnnnnnnnnnnnnnnnnnnnnnnnnnnnnnnnnnnnnnnnnnnnnnnnnnnnnnnnnnnnnnnnnnnnnnnnnnnnnnnnnnnnnnnnnnnnnnnnnnnnnnnnnnnnnnnnnnnnnnnnnnnnnnnnnnnnnnnnnnnnnnnnnnnnnnnnnnnnnnnnnnnnnnnnnnnnnnnnnnnnnnnnnnnnnnnnnnnnnnnnnnnnnnnnnnnnnnnnnnnnnnnnnnnnnnnnnnnnnnnnnnnnnnnnnnnnnnnnnnnnnnnnnnnnnnnnnnnnnnnnnnnnnnnnnnnnnnnnnnnnnnnnnnnnnnnnnnnnnnnnnnnnnnnnnnnnnnnnnnnnnnnnnnnnnnnnnnnnnnnnnnnnnnnnnnnnnnnnnnnnnnnnnnnnnnnnnnnnnnnnnnnnnnnnnnnnnnnnnnnnnnnnnnnnnnnnnnnnnnnnnnnnnnnnnnnnnnnnnnnnnnnnnnnnnnnnnnnnnnnnnnnnnnnnnnnnnnnnnnnnnnnnnnnnnnnnnnnnnnnnnnnnnnnnnnnnnnnnnnnnnnnnnnnnnnnnnnnnnnnnnnnnnnnnnnnnnnnnnnnnnnnnnnnnnnnnnnnnnnnnnnnnnnnnnnnnnnnnnnnnnnnnnnnnnnnnnnnnnnnnnnnnnnnnnnnnnnnnnnnnnnnnnnnnnnnnnnnnnnnnnnnnnnnnnnnnnnnnnnnnnnnnnnnnnnnnnnnnnnnnnnnnnnnnnnnnnnnnnnnnnnnnnnnnnnnnnnnnnnnnnnnnnnnnnnnnnnnnnnnnnnnnnnnnnnnnnnnnnnnnnnnnnnnnnnnnnnnnnnnnnnnnnnnnnnnnnnnnnnnnnnnnnnnnnnnnnnnnnnnnnnnnnnnnnnnnnnnnnnnnnnnnnnnnnnnnnnnnnnnnnnnnnnnnnnnnnnnnnnnnnnnnnnnnnnnnnnnnnnnnnnnnnnnnnnnnnnnnnnnnnnnnnnnnnnnnnnnnnnnnnnnnnnnnnnnnnnnnnnnnnnnnnnnnnnnnnnnnnnnnnnnnnnnnnnnnnnnnnnnnnnnnnnnnnnnnnnnnnnnnnnnnnnnnnnnnnnnnnnnnnnnnnnnnnnnnnnnnnnnnnnnnnnnnnnnnnnnnnnnnnnnnnnnnnnnnnnnnnnnnnnnnnnnnnnnnnnnnnnnnnnnnnnnnnnnnnnnnnnnnnnnnnnnnnnnnnnnnnnnnnnnnnnnnnnnnnnnnnnnnnnnnnnnnnnnnnnnnnnnnnnnnnnnnnnnnnnnnnnnnnnnnnnnnnnnnnnnnnnnnnnnnnnnnnnnnnnnnnnnnnnnnnnnnnnnnnnnnnnnnnnnnnnnnnnnnnnnnnnnnnnnnnnnnnnnnnnnnnnnnnnnnnnnnnnnnnnnnnnnnnnnnnnnnnnnnnnnnnnnnnnnnnnnnnnnnnnnnnnnnnnnnnnnnnnnnnnnnnnnnnnnnnnnnnnnnnnnnnnnnnnnnnnnnnnnnnnnnnnnnnnnnnnnnnnnnnnnnnnnnnnnnnnnnnnnnnnnnnnnnnnnnnnnnnnnnnnnnnnnnnnnnnnnnnnnnnnnnnnnnnnnnnnnnnnnnnnnnnnnnnnnnnnnnnnnnnnnnnnnnnnnnnnnnnnnnnnnnnnnnnnnnnnnnnnnnnnnnnnnnnnnnnnnnnnnnnnnnnnnnnnnnnnnnnnnnnnnnnnnnnnnnnnnnnnnnnnnnnnnnnnnnnnnnnnnnnnnnnnnnnnnnnnnnnnnnnnnnnnnnnnnnnnnnnnnnnnnnnnnnnnnnnnnnnnnnnnnnnnnnnnnnnnnnnnnnnnnnnnnnnnnnnnnnnnnnnnnnnnnnnnnnnnnnnnnnnnnnnnnnnnnnnnnnnnnnnnnnnnnnnnnnnnnnnnnnnnnnnnnnnnnnnnnnnnnnnnnnnnnnnnnnnnnnnnnnnnnnnnnnnnnnnnnnnnnnnnnnnnnnnnnnnnnnnnnnnnnnnnnnnnnnnnnnnnnnnnnnnnnnnnnnnnnnnnnnnnnnnnnnnnnnnnnnnnnnnnnnnnnnnnnnnnnnnnnnnnnnnnnnnnnnnnnnnnnnnnnnnnnnnnnnnnnnnnnnnnnnnnnnnnnnnnnnnnnnnnnnnnnnnnnnnnnnnnnnnnnnnnnnnnnnnnnnnnnnnnnnnnnnnnnnnnnnnnnnnnnnnnnnnnnnnnnnnnnnnnnnnnnnnnnnnnnnnnnnnnnnnnnnnnnnnnnnnnnnnnnnnnnnnnnnnnnnnnnnnnnnnnnnnnnnnnnnnnnnnnnnnnnnnnnnnnnnnnnnnnnnnnnnnnnnnnnnnnnnnnnnnnnnnnnnnnnnnnnnnnnnnnnnnnnnnnnnnnnnnnnnnnnnnnnnnnnnnnnnnnnnnnnnnnnnnnnnnnnnnnnnnnnnnnnnnnnnnnnnnnnnnnnnnnnnnnnnnnnnnnnnnnnnnnnnnnnnnnnnnnnnnnnnnnnnnnnnnnnnnnnnnnnnnnnnnnnnnnnnnnnnnnnnnnnnnnnnnnnnnnnnnnnnnnnnnnnnnnnnnnnnnnnnnnnnnnnnnnnnnnnnnnnnnnnnnnnnnnnnnnnnnnnnnnnnnnnnnnnnnnnnnnnnnnnnnnnnnnnnnnnnnnnnnnnnnnnnnnnnnnnnnnnnnnnnnnnnnnnnnnnnnnnnnnnnnnnnnnnnnnnnnnnnnnnnnnnnnnnnnnnnnnnnnnnnnnnnnnnnnnnnnnnnnnnnnnnnnnnnnnnnnnnnnnnnnnnnnnnnnnnnnnnnnnnnnnnnnnnnnnnnnnnnnnnnnnnnnnnnnnnnnnnnnnnnnnnnnnnnnnnnnnnnnnnnnnnnnnnnnnnnnnnnnnnnnnnnnnnnnnnnnnnnnnnnnnnnnnnnnnnnnnnnnnnnnnnnnnnnnnnnnnnnnnnnnnnnnnnnnnnnnnnnnnnnnnnnnnnnnnnnnnnnnnnnnnnnnnnnnnnnnnnnnnnnnnnnnnnnnnnnnnnnnnnnnnnnnnnnnnnnnnnnnnnnnnnnnnnnnnnnnnnnnnnnnnnnnnnnnnnnnnnnnnnnnnnnnnnnnnnnnnnnnnnnnnnnnnnnnnnnnnnnnnnnnnnnnnnnnnnnnnnnnnnnnnnnnnnnnnnnnnnnnnnnnnnnnnnnnnnnnnnnnnnnnnnnnnnnnnnnnnnnnnnnnnnnnnnnnnnnnnnnnnnnnnnnnnnnnnnnnnnnnnnnnnnnnnnnnnnnnnnnnnnnnnnnnnnnnnnnnnnnnnnnnnnnnnnnnnnnnnnnnnnnnnnnnnnnnnnnnnnnnnnnnnnnnnnnnnnnnnnnnnnnnnnnnnnnnnnnnnnnnnnnnnnnnnnnnnnnnnnnnnnnnnnnnnnnnnnnnnnnnnnnnnnnnnnnnnnnnnnnnnnnnnnnnnnnnnnnnnnnnnnnnnnnnnnnnnnnnnnnnnnnnnnnnnnnnnnnnnnnnnnnnnnnnnnnnnnnnnnnnnnnnnnnnnnnnnnnnnnnnnnnnnnnnnnnnnnnnnnnnnnnnnnnnnnnnnnnnnnnnnnnnnnnnnnnnnnnnnnnnnnnnnnnnnnnnnnnnnnnnnnnnnnnnnnnnnnnnnnnnnnnnnnnnnnnnnnnnnnnnnnnnnnnnnnnnnnnnnnnnnnnnnnnnnnnnnnnnnnnnnnnnnnnnnnnnnnnnnnnnnnnnnnnnnnnnnnnnnnnnnnnnnnnnnnnnnnnnnnnnnnnnnnnnnnnnnnnnnnnnnnnnnnnnnnnnnnnnnnnnnnnnnnnnnnnnnnnnnnnnnnnnnnnnnnnnnnnnnnnnnnnnnnnnnnnnnnnnnnnnnnnnnnnnnnnnnnnnnnnnnnnnnnnnnnnnnnnnnnnnnnnnnnnnnnnnnnnnnnnnnnnnnnnnnnnnnnnnnnnnnnnnnnnnnnnnnnnnnnnnnnnnnnnnnnnnnnnnnnnnnnnnnnnnnnnnnnnnnnnnnnnnnnnnnnnnnnnnnnnnnnnnnnnnnnnnnnnnnnnnnnnnnnnnnnnnnnnnnnnnnnnnnnnnnnnnnnnnnnnnnnnnnnnnnnnnnnnnnnnnnnnnnnnnnnnnnnnnnnnnnnnnnnnnnnnnnnnnnnnnnnnnnnnnnnnnnnnnnnnnnnnnnnnnnnnnnnnnnnnnnnnnnnnnnnnnnnnnnnnnnnnnnnnnnnnnnnnnnnnnnnnnnnnnnnnnnnnnnnnnnnnnnnnnnnnnnnnnnnnnnnnnnnnnnnnnnnnnnnnnnnnnnnnnnnnnnnnnnnnnnnnnnnnnnnnnnnnnnnnnnnnnnnnnnnnnnnnnnnnnnnnnnnnnnnnnnnnnnnnnnnnnnnnnnnnnnnnnnnnnnnnnnnnnnnnnnnnnnnnnnnnnnnnnnnnnnnnnnnnnnnnnnnnnnnnnnnnnnnnnnnnnnnnnnnnnnnnnnnnnnnnnnnnnnnnnnnnnnnnnnnnnnnnnnnnnnnnnnnnnnnnnnnnnnnnnnnnnnnnnnnnnnnnnnnnnnnnnnnnnnnnnnnnnnnnnnnnnnnnnnnnnnnnnnnnnnnnnnnnnnnnnnnnnnnnnnnnnnnnnnnnnnnnnnnnnnnnnnnnnnnnnnnnnnnnnnnnnnnnnnnnnnnnnnnnnnnnnnnnnnnnnnnnnnnnnnnnnnnnnnnnnnnnnnnnnnnnnnnnnnnnnnnnnnnnnnnnnnnnnnnnnnnnnnnnnnnnnnnnnnnnnnnnnnnnnnnnnnnnnnnnnnnnnnnnnnnnnnnnnnnnnnnnnnnnnnnnnnnnnnnnnnnnnnnnnnnnnnnnnnnnnnnnnnnnnnnnnnnnnnnnnnnnnnnnnnnnnnnnnnnnnnnnnnnnnnnnnnnnnnnnnnnnnnnnnnnnnnnnnnnnnnnnnnnnnnnnnnnnnnnnnnnnnnnnnnnnnnnnnnnnnnnnnnnnnnnnnnnnnnnnnnnnnnnnnnnnnnnnnnnnnnnnnnnnnnnnnnnnnnnnnnnnnnnnnnnnnnnnnnnnnnnnnnnnnnnnnnnnnnnnnnnnnnnnnnnnnnnnnnnnnnnnnnnnnnnnnnnnnnnnnnnnnnnnnnnnnnnnnnnnnnnnnnnnnnnnnnnnnnnnnnnnnnnnnnnnnnnnnnnnnnnnnnnnnnnnnnnnnnnnnnnnnnnnnnnnnnnnnnnnnnnnnnnnnnnnnnnnnnnnnnnnnnnnnnnnnnnnnnnnnnnnnnnnnnnnnnnnnnnnnnnnnnnnnnnnnnnnnnnnnnnnnnnnnnnnnnnnnnnnnnnnnnnnnnnnnnnnnnnnnnnnnnnnnnnnnnnnnnnnnnnnnnnnnnnnnnnnnnnnnnnnnnnnnnnnnnnnnnnnnnnnnnnnnnnnnnnnnnnnnnnnnnnnnnnnnnnnnnnnnnnnnnnnnnnnnnnnnnnnnnnnnnnnnnnnnnnnnnnnnnnnnnnnnnnnnnnnnnnnnnnnnnnnnnnnnnnnnnnnnnnnnnnnnnnnnnnnnnnnnnnnnnnnnnnnnnnnnnnnnnnnnnnnnnnnnnnnnnnnnnnnnnnnnnnnnnnnnnnnnnnnnnnnnnnnnnnnnnnnnnnnnnnnnnnnnnnnnnnnnnnnnnnnnnnnnnnnnnnnnnnnnnnnnnnnnnnnnnnnnnnnnnnnnnnnnnnnnnnnnnnnnnnnnnnnnnnnnnnnnnnnnnnnnnnnnnnnnnnnnnnnnnnnnnnnnnnnnnnnnnnnnnnnnnnnnnnnnnnnnnnnnnnnnnnnnnnnnnnnnnnnnnnnnnnnnnnnnnnnnnnnnnnnnnnnnnnnnnnnnnnnnnnnnnnnnnnnnnnnnnnnnnnnnnnnnnnnnnnnnnnnnnnnnnnnnnnnnnnnnnnnnnnnnnnnnnnnnnnnnnnnnnnnnnnnnnnnnnnnnnnnnnnnnnnnnnnnnnnnnnnnnnnnnnnnnnnnnnnnnnnnnnnnnnnnnnnnnnnnnnnnnnnnnnnnnnnnnnnnnnnnnnnnnnnnnnnnnnnnnnnnnnnnnnnnnnnnnnnnnnnnnnnnnnnnnnnnnnnnnnnnnnnnnnnnnnnnnnnnnnnnnnnnnnnnnnnnnnnnnnnnnnnnnnnnnnnnnnnnnnnnnnnnnnnnnnnnnnnnnnnnnnnnnnnnnnnnnnnnnnnnnnnnnnnnnnnnnnnnnnnnnnnnnnnnnnnnnnnnnnnnnnnnnnnnnnnnnnnnnnnnnnnnnnnnnnnnnnnnnnnnnnnnnnnnnnnnnnnnnnnnnnnnnnnnnnnnnnnnnnnnnnnnnnnnnnnnnnnnnnnnnnnnnnnnnnnnnnnnnnnnnnnnnnnnnnnnnnnnnnnnnnnnnnnnnnnnnnnnnnnnnnnnnnnnnnnnnnnnnnnnnnnnnnnnnnnnnnnnnnnnnnnnnnnnnnnnnnnnnnnnnnnnnnnnnnnnnnnnnnnnnnnnnnnnnnnnnnnnnnnnnnnnnnnnnnnnnnnnnnnnnnnnnnnnnnnnnnnnnnnnnnnnnnnnnnnnnnnnnnnnnnnnnnnnnnnnnnnnnnnnnnnnnnnnnnnnnnnnnnnnnnnnnnnnnnnnnnnnnnnnnnnnnnnnnnnnnnnnnnnnnnnnnnnnnnnnnnnnnnnnnnnnnnnnnnnnnnnnnnnnnnnnnnnnnnnnnnnnnnnnnnnnnnnnnnnnnnnnnnnnnnnnnnnnnnnnnnnnnnnnnnnnnnnnnnnnnnnnnnnnnnnnnnnnnnnnnnnnnnnnnnnnnnnnnnnnnnnnnnnnnnnnnnnnnnnnnnnnnnnnnnnnnnnnnnnnnnnnnnnnnnnnnnnnnnnnnnnnnnnnnnnnnnnnnnnnnnnnnnnnnnnnnnnnnnnnnnnnnnnnnnnnnnnnnnnnnnnnnnnnnnnnnnnnnnnnnnnnnnnnnnnnnnnnnnnnnnnnnnnnnnnnnnnnnnnnnnnnnnnnnnnnnnnnnnnnnnnnnnnnnnnnnnnnnnnnnnnnnnnnnnnnnnnnnnnnnnnnnnnnnnnnnnnnnnnnnnnnnnnnnnnnnnnnnnnnnnnnnnnnnnnnnnnnnnnnnnnnnnnnnnnnnnnnnnnnnnnnnnnnnnnnnnnnnnnnnnnnnnnnnnnnnnnnnnnnnnnnnnnnnnnnnnnnnnnnnnnnnnnnnnnnnnnnnnnnnnnnnnnnnnnnnnnnnnnnnnnnnnnnnnnnnnnnnnnnnnnnnnnnnnnnnnnnnnnnnnnnnnnnnnnnnnnnnnnnnnnnnnnnnnnnnnnnnnnnnnnnnnnnnnnnnnnnnnnnnnnnnnnnnnnnnnnnnnnnnnnnnnnnnnnnnnnnnnnnnnnnnnnnnnnnnnnnnnnnnnnnnnnnnnnnnnnnnnnnnnnnnnnnnnnnnnnnnnnnnnnnnnnnnnnnnnnnnnnnnnnnnnnnnnnnnnnnnnnnnnnnnnnnnnnnnnnnnnnnnnnnnnnnnnnnnnnnnnnnnnnnnnnnnnnnnnnnnnnnnnnnnnnnnnnnnnnnnnnnnnnnnnnnnnnnnnnnnnnnnnnnnnnnnnnnnnnnnnnnnnnnnnnnnnnnnnnnnnnnnnnnnnnnnnnnnnnnnnnnnnnnnnnnnnnnnnnnnnnnnnnnnnnnnnnnnnnnnnnnnnnnnnnnnnnnnnnnnnnnnnnnnnnnnnnnnnnnnnnnnnnnnnnnnnnnnnnnnnnnnnnnnnnnnnnnnnnnnnnnnnnnnnnnnnnnnnnnnnnnnnnnnnnnnnnnnnnnnnnnnnnnnnnnnnnnnnnnnnnnnnnnnnnnnnnnnnnnnnnnnnnnnnnnnnnnnnnnnnnnnnnnnnnnnnnnnnnnnnnnnnnnnnnnnnnnnnnnnnnnnnnnnnnnnnnnnnnnnnnnnnnnnnnnnnnnnnnnnnnnnnnnnnnnnnnnnnnnnnnnnnnnnnnnnnnnnnnnnnnnnnnnnnnnnnnnnnnnnnnnnnnnnnnnnnnnnnnnnnnnnnnnnnnnnnnnnnnnnnnnnnnnnnnnnnnnnnnnnnnnnnnnnnnnnnnnnnnnnnnnnnnnnnnnnnnnnnnnnnnnnnnnnnnnnnnnnnnnnnnnnnnnnnnnnnnnnnnnnnnnnnnnnnnnnnnnnnnnnnnnnnnnnnnnnnnnnnnnnnnnnnnnnnnnnnnnnnnnnnnnnnnnnnnnnnnnnnnnnnnnnnnnnnnnnnnnnnnnnnnnnnnnnnnnnnnnnnnnnnnnnnnnnnnnnnnnnnnnnnnnnnnnnnnnnnnnnnnnnnnnnnnnnnnnnnnnnnnnnnnnnnnnnnnnnnnnnnnnnnnnnnnnnnnnnnnnnnnnnnnnnnnnnnnnnnnnnnnnnnnnnnnnnnnnnnnnnnnnnnnnnnnnnnnnnnnnnnnnnnnnnnnnnnnnnnnnnnnnnnnnnnnnnnnnnnnnnnnnnnnnnnnnnnnnnnnnnnnnnnnnnnnnnnnnnnnnnnnnnnnnnnnnnnnnnnnnnnnnnnnnnnnnnnnnnnnnnnnnnnnnnnnnnnnnnnnnnnnnnnnnnnnnnnnnnnnnnnnnnnnnnnnnnnnnnnnnnnnnnnnnnnnnnnnnnnnnnnnnnnnnnnnnnnnnnnnnnnnnnnnnnnnnnnnnnnnnnnnnnnnnnnnnnnnnnnnnnnnnnnnnnnnnnnnnnnnnnnnnnnnnnnnnnnnnnnnnnnnnnnnnnnnnnnnnnnnnnnnnnnnnnnnnnnnnnnnnnnnnnnnnnnnnnnnnnnnnnnnnnnnnnnnnnnnnnnnnnnnnnnnnnnnnnnnnnnnnnnnnnnnnnnnnnnnnnnnnnnnnnnnnnnnnnnnnnnnnnnnnnnnnnnnnnnnnnnnnnnnnnnnnnnnnnnnnnnnnnnnnnnnnnnnnnnnnnnnnnnnnnnnnnnnnnnnnnnnnnnnnnnnnnnnnnnnnnnnnnnnnnnnnnnnnnnnnnnnnnnnnnnnnnnnnnnnnnnnnnnnnnnnnnnnnnnnnnnnnnnnnnnnnnnnnnnnnnnnnnnnnnnnnnnnnnnnnnnnnnnnnnnnnnnnnnnnnnnnnnnnnnnnnnnnnnnnnnnnnnnnnnnnnnnnnnnnnnnnnnnnnnnnnnnnnnnnnnnnnnnnnnnnnnnnnnnnnnnnnnnnnnnnnnnnnnnnnnnnnnnnnnnnnnnnnnnnnnnnnnnnnnnnnnnnnnnnnnnnnnnnnnnnnnnnnnnnnnnnnnnnnnnnnnnnnnnnnnnnnnnnnnnnnnnnnnnnnnnnnnnnnnnnnnnnnnnnnnnnnnnnnnnnnnnnnnnnnnnnnnnnnnnnnnnnnnnnnnnnnnnnnnnnnnnnnnnnnnnnnnnnnnnnnnnnnnnnnnnnnnnnnnnnnnnnnnnnnnnnnnnnnnnnnnnnnnnnnnnnnnnnnnnnnnnnnnnnnnnnnnnnnnnnnnnnnnnnnnnnnnnnnnnnnnnnnnnnnnnnnnnnnnnnnnnnnnnnnnnnnnnnnnnnnnnnnnnnnnnnnnnnnnnnnnnnnnnnnnnnnnnnnnnnnnnnnnnnnnnnnnnnnnnnnnnnnnnnnnnnnnnnnnnnnnnnnnnnnnnnnnnnnnnnnnnnnnnnnnnnnnnnnnnnnnnnnnnnnnnnnnnnnnnnnnnnnnnnnnnnnnnnnnnnnnnnnnnnnnnnnnnnnnnnnnnnnnnnnnnnnnnnnnnnnnnnnnnnnnnnnnnnnnnnnnnnnnnnnnnnnnnnnnnnnnnnnnnnnnnnnnnnnnnnnnnnnnnnnnnnnnnnnnnnnnnnnnnnnnnnnnnnnnnnnnnnnnnnnnnnnnnnnnnnnnnnnnnnnnnnnnnnnnnnnnnnnnnnnnnnnnnnnnnnnnnnnnnnnnnnnnnnnnnnnnnnnnnnnnnnnnnnnnnnnnnnnnnnnnnnnnnnnnnnnnnnnnnnnnnnnnnnnnnnnnnnnnnnnnnnnnnnnnnnnnnnnnnnnnnnnnnnnnnnnnnnnnnnnnnnnnnnnnnnnnnnnnnnnnnnnnnnnnnnnnnnnnnnnnnnnnnnnnnnnnnnnnnnnnnnnnnnnnnnnnnnnnnnnnnnnnnnnnnnnnnnnnnnnnnnnnnnnnnnnnnnnnnnnnnnnnnnnnnnnnnnnnnnnnnnnnnnnnnnnnnnnnnnnnnnnnnnnnnnnnnnnnnnnnnnnnnnnnnnnnnnnnnnnnnnnnnnnnnnnnnnnnnnnnnnnnnnnnnnnnnnnnnnnnnnnnnnnnnnnnnnnnnnnnnnnnnnnnnnnnnnnnnnnnnnnnnnnnnnnnnnnnnnnnnnnnnnnnnnnnnnnnnnnnnnnnnnnnnnnnnnnnnnnnnnnnnnnnnnnnnnnnnnnnnnnnnnnnnnnnnnnnnnnnnnnnnnnnnnnnnnnnnnnnnnnnnnnnnnnnnnnnnnnnnnnnnnnnnnnnnnnnnnnnnnnnnnnnnnnnnnnnnnnnnnnnnnnnnnnnnnnnnnnnnnnnnnnnnnnnnnnnnnnnnnnnnnnnnnnnnnnnnnnnnnnnnnnnnnnnnnnnnnnnnnnnnnnnnnnnnnnnnnnnnnnnnnnnnnnnnnnnnnnnnnnnnnnnnnnnnnnnnnnnnnnnnnnnnnnnnnnnnnnnnnnnnnnnnnnnnnnnnnnnnnnnnnnnnnnnnnnnnnnnnnnnnnnnnnnnnnnnnnnnnnnnnnnnnnnnnnnnnnnnnnnnnnnnnnnnnnnnnnnnnnnnnnnnnnnnnnnnnnnnnnnnnnnnnnnnnnnnnnnnnnnnnnnnnnnnnnnnnnnnnnnnnnnnnnnnnnnnnnnnnnnnnnnnnnnnnnnnnnnnnnnnnnnnnnnnnnnnnnnnnnnnnnnnnnnnnnnnnnnnnnnnnnnnnnnnnnnnnnnnnnnnnnnnnnnnnnnnnnnnnnnnnnnnnnnnnnnnnnnnnnnnnnnnnnnnnnnnnnnnnnnnnnnnnnnnnnnnnnnnnnnnnnnnnnnnnnnnnnnnnnnnnnnnnnnnnnnnnnnnnnnnnnnnnnnnnnnnnnnnnnnnnnnnnnnnnnnnnnnnnnnnnnnnnnnnnnnnnnnnnnnnnnnnnnnnnnnnnnnnnnnnnnnnnnnnnnnnnnnnnnnnnnnnnnnnnnnnnnnnnnnnnnnnnnnnnnnnnnnnnnnnnnnnnnnnnnnnnnnnnnnnnnnnnnnnnnnnnnnnnnnnnnnnnnnnnnnnnnnnnnnnnnnnnnnnnnnnnnnnnnnnnnnnnnnnnnnnnnnnnnnnnnnnnnnnnnnnnnnnnnnnnnnnnnnnnnnnnnnnnnnnnnnnnnnnnnnnnnnnnnnnnnnnnnnnnnnnnnnnnnnnnnnnnnnnnnnnnnnnnnnnnnnnnnnnnnnnnnnnnnnnnnnnnnnnnnnnnnnnnnnnnnnnnnnnnnnnnnnnnnnnnnnnnnnnnnnnnnnnnnnnnnnnnnnnnnnnnnnnnnnnnnnnnnnnnnnnnnnnnnnnnnnnnnnnnnnnnnnnnnnnnnnnnnnnnnnnnnnnnnnnnnnnnnnnnnnnnnnnnnnnnnnnnnnnnnnnnnnnnnnnnnnnnnnnnnnnnnnnnnnnnnnnnnnnnnnnnnnnnnnnnnnnnnnnnnnnnnnnnnnnnnnnnnnnnnnnnnnnnnnnnnnnnnnnnnnnnnnnnnnnnnnnnnnnnnnnnnnnnnnnnnnnnnnnnnnnnnnnnnnnnnnnnnnnnnnnnnnnnnnnnnnnnnnnnnnnnnnnnnnnnnnnnnnnnnnnnnnnnnnnnnnnnnnnnnnnnnnnnnnnnnnnnnnnnnnnnnnnnnnnnnnnnnnnnnnnnnnnnnnnnnnnnnnnnnnnnnnnnnnnnnnnnnnnnnnnnnnnnnnnnnnnnnnnnnnnnnnnnnnnnnnnnnnnnnnnnnnnnnnnnnnnnnnnnnnnnnnnnnnnnnnnnnnnnnnnnnnnnnnnnnnnnnnnnnnnnnnnnnnnnnnnnnnnnnnnnnnnnnnnnnnnnnnnnnnnnnnnnnnnnnnnnnnnnnnnnnnnnnnnnnnnnnnnnnnnnnnnnnnnnnnnnnnnnnnnnnnnnnnnnnnnnnnnnnnnnnnnnnnnnnnnnnnnnnnnnnnnnnnnnnnnnnnnnnnnnnnnnnnnnnnnnnnnnnnnnnnnnnnnnnnnnnnnnnnnnnnnnnnnnnnnnnnnnnnnnnnnnnnnnnnnnnnnnnnnnnnnnnnnnnnnnnnnnnnnnnnnnnnnnnnnnnnnnnnnnnnnnnnnnnnnnnnnnnnnnnnnnnnnnnnnnnnnnnnnnnnnnnnnnnnnnnnnnnnnnnnnnnnnnnnnnnnnnnnnnnnnnnnnnnnnnnnnnnnnnnnnnnnnnnnnnnnnnnnnnnnnnnnnnnnnnnnnnnnnnnnnnnnnnnnnnnnnnnnnnnnnnnnnnnnnnnnnnnnnnnnnnnnnnnnnnnnnnnnnnnnnnnnnnnnnnnnnnnnnnnnnnnnnnnnnnnnnnnnnnnnnnnnnnnnnnnnnnnnnnnnnnnnnnnnnnnnnnnnnnnnnnnnnnnnnnnnnnnnnnnnnnnnnnnnnnnnnnnnnnnnnnnnnnnnnnnnnnnnnnnnnnnnnnnnnnnnnnnnnnnnnnnnnnnnnnnnnnnnnnnnnnnnnnnnnnnnnnnnnnnnnnnnnnnnnnnnnnnnnnnnnnnnnnnnnnnnnnnnnnnnnnnnnnnnnnnnnnnnnnnnnnnnnnnnnnnnnnnnnnnnnnnnnnnnnnnnnnnnnnnnnnnnnnnnnnnnnnnnnnnnnnnnnnnnnnnnnnnnnnnnnnnnnnnnnnnnnnnnnnnnnnnnnnnnnnnnnnnnnnnnnnnnnnnnnnnnnnnnnnnnnnnnnnnnnnnnnnnnnnnnnnnnnnnnnnnnnnnnnnnnnnnnnnnnnnnnnnnnnnnnnnnnnnnnnnnnnnnnnnnnnnnnnnnnnnnnnnnnnnnnnnnnnnnnnnnnnnnnnnnnnnnnnnnnnnnnnnnnnnnnnnnnnnnnnnnnnnnnnnnnnnnnnnnnnnnnnnnnnnnnnnnnnnnnnnnnnnnnnnnnnnnnnnnnnnnnnnnnnnnnnnnnnnnnnnnnnnnnnnnnnnnnnnnnnnnnnnnnnnnnnnnnnnnnnnnnnnnnnnnnnnnnnnnnnnnnnnnnnnnnnnnnnnnnnnnnnnnnnnnnnnnnnnnnnnnnnnnnnnnnnnnnnnnnnnnnnnnnnnnnnnnnnnnnnnnnnnnnnnnnnnnnnnnnnnnnnnnnnnnnnnnnnnnnnnnnnnnnnnnnnnnnnnnnnnnnnnnnnnnnnnnnnnnnnnnnnnnnnnnnnnnnnnnnnnnnnnnnnnnnnnnnnnnnnnnnnnnnnnnnnnnnnnnnnnnnnnnnnnnnnnnnnnnnnnnnnnnnnnnnnnnnnnnnnnnnnnnnnnnnnnnnnnnnnnnnnnnnnnnnnnnnnnnnnnnnnnnnnnnnnnnnnnnnnnnnnnnnnnnnnnnnnnnnnnnnnnnnnnnnnnnnnnnnnnnnnnnnnnnnnnnnnnnnnnnnnnnnnnnnnnnnnnnnnnnnnnnnnnnnnnnnnnnnnnnnnnnnnnnnnnnnnnnnnnnnnnnnnnnnnnnnnnnnnnnnnnnnnnnnnnnnnnnnnnnnnnnnnnnnnnnnnnnnnnnnnnnnnnnnnnnnnnnnnnnnnnnnnnnnnnnnnnnnnnnnnnnnnnnnnnnnnnnnnnnnnnnnnnnnnnnnnnnnnnnnnnnnnnnnnnnnnnnnnnnnnnnnnnnnnnnnnnnnnnnnnnnnnnnnnnnnnnnnnnnnnnnnnnnnnnnnnnnnnnnnnnnnnnnnnnnnnnnnnnnnnnnnnnnnnnnnnnnnnnnnnnnnnnnnnnnnnnnnnnnnnnnnnnnnnnnnnnnnnnnnnnnnnnnnnnnnnnnnnnnnnnnnnnnnnnnnnnnnnnnnnnnnnnnnnnnnnnnnnnnnnnnnnnnnnnnnnnnnnnnnnnnnnnnnnnnnnnnnnnnnnnnnnnnnnnnnnnnnnnnnnnnnnnnnnnnnnnnnnnnnnnnnnnnnnnnnnnnnnnnnnnnnnnnnnnnnnnnnnnnnnnnnnnnnnnnnnnnnnnnnnnnnnnnnnnnnnnnnnnnnnnnnnnnnnnnnnnnnnnnnnnnnnnnnnnnnnnnnnnnnnnnnnnnnnnnnnnnnnnnnnnnnnnnnnnnnnnnnnnnnnnnnnnnnnnnnnnnnnnnnnnnnnnnnnnnnnnnnnnnnnnnnnnnnnnnnnnnnnnnnnnnnnnnnnnnnnnnnnnnnnnnnnnnnnnnnnnnnnnnnnnnnnnnnnnnnnnnnnnnnnnnnnnnnnnnnnnnnnnnnnnnnnnnnnnnnnnnnnnnnnnnnnnnnnnnnnnnnnnnnnnnnnnnnnnnnnnnnnnnnnnnnnnnnnnnnnnnnnnnnnnnnnnnnnnnnnnnnnnnnnnnnnnnnnnnnnnnnnnnnnnnnnnnnnnnnnnnnnnnnnnnnnnnnnnnnnnnnnnnnnnnnnnnnnnnnnnnnnnnnnnnnnnnnnnnnnnnnnnnnnnnnnnnnnnnnnnnnnnnnnnnnnnnnnnnnnnnnnnnnnnnnnnnnnnnnnnnnnnnnnnnnnnnnnnnnnnnnnnnnnnnnnnnnnnnnnnnnnnnnnnnnnnnnnnnnnnnnnnnnnnnnnnnnnnnnnnnnnnnnnnnnnnnnnnnnnnnnnnnnnnnnnnnnnnnnnnnnnnnnnnnnnnnnnnnnnnnnnnnnnnnnnnnnnnnnnnnnnnnnnnnnnnnnnnnnnnnnnnnnnnnnnnnnnnnnnnnnnnnnnnnnnnnnnnnnnnnnnnnnnnnnnnnnnnnnnnnnnnnnnnnnnnnnnnnnnnnnnnnnnnnnnnnnnnnnnnnnnnnnnnnnnnnnnnnnnnnnnnnnnnnnnnnnnnnnnnnnnnnnnnnnnnnnnnnnnnnnnnnnnnnnnnnnnnnnnnnnnnnnnnnnnnnnnnnnnnnnnnnnnnnnnnnnnnnnnnnnnnnnnnnnnnnnnnnnnnnnnnnnnnnnnnnnnnnnnnnnnnnnnnnnnnnnnnnnnnnnnnnnnnnnnnnnnnnnnnnnnnnnnnnnnnnnnnnnnnnnnnnnnnnnnnnnnnnnnnnnnnnnnnnnnnnnnnnnnnnnnnnnnnnnnnnnnnnnnnnnnnnnnnnnnnnnnnnnnnnnnnnnnnnnnnnnnnnnnnnnnnnnnnnnnnnnnnnnnnnnnnnnnnnnnnnnnnnnnnnnnnnnnnnnnnnnnnnnnnnnnnnnnnnnnnnnnnnnnnnnnnnnnnnnnnnnnnnnnnnnnnnnnnnnnnnnnnnnnnnnnnnnnnnnnnnnnnnnnnnnnnnnnnnnnnnnnnnnnnnnnnnnnnnnnnnnnnnnnnnnnnnnnnnnnnnnnnnnnnnnnnnnnnnnnnnnnnnnnnnnnnnnnnnnnnnnnnnnnnnnnnnnnnnnnnnnnnnnnnnnnnnnnnnnnnnnnnnnnnnnnnnnnnnnnnnnnnnnnnnnnnnnnnnnnnnnnnnnnnnnnnnnnnnnnnnnnnnnnnnnnnnnnnnnnnnnnnnnnnnnnnnnnnnnnnnnnnnnnnnnnnnnnnnnnnnnnnnnnnnnnnnnnnnnnnnnnnnnnnnnnnnnnnnnnnnnnnnnnnnnnnnnnnnnnnnnnnnnnnnnnnnnnnnnnnnnnnnnnnnnnnnnnnnnnnnnnnnnnnnnnnnnnnnnnnnnnnnnnnnnnnnnnnnnnnnnnnnnnnnnnnnnnnnnnnnnnnnnnnnnnnnnnnnnnnnnnnnnnnnnnnnnnnnnnnnnnnnnnnnnnnnnnnnnnnnnnnnnnnnnnnnnnnnnnnnnnnnnnnnnnnnnnnnnnnnnnnnnnnnnnnnnnnnnnnnnnnnnnnnnnnnnnnnnnnnnnnnnnnnnnnnnnnnnnnnnnnnnnnnnnnnnnnnnnnnnnnnnnnnnnnnnnnnnnnnnnnnnnnnnnnnnnnnnnnnnnnnnnnnnnnnnnnnnnnnnnnnnnnnnnnnnnnnnnnnnnnnnnnnnnnnnnnnnnnnnnnnnnnnnnnnnnnnnnnnnnnnnnnnnnnnnnnnnnnnnnnnnnnnnnnnnnnnnnnnnnnnnnnnnnnnnnnnnnnnnnnnnnnnnnnnnnnnnnnnnnnnnnnnnnnnnnnnnnnnnnnnnnnnnnnnnnnnnnnnnnnnnnnnnnnnnnnnnnnnnnnnnnnnnnnnnnnnnnnnnnnnnnnnnnnnnnnnnnnnnnnnnnnnnnnnnnnnnnnnnnnnnnnnnnnnnnnnnnnnnnnnnnnnnnnnnnnnnnnnnnnnnnnnnnnnnnnnnnnnnnnnnnnnnnnnnnnnnnnnnnnnnnnnnnnnnnnnnnnnnnnnnnnnnnnnnnnnnnnnnnnnnnnnnnnnnnnnnnnnnnnnnnnnnnnnnnnnnnnnnnnnnnnnnnnnnnnnnnnnnnnnnnnnnnnnnnnnnnnnnnnnnnnnnnnnnnnnnnnnnnnnnnnnnnnnnnnnnnnnnnnnnnnnnnnnnnnnnnnnnnnnnnnnnnnnnnnnnnnnnnnnnnnnnnnnnnnnnnnnnnnnnnnnnnnnnnnnnnnnnnnnnnnnnnnnnnnnnnnnnnnnnnnnnnnnnnnnnnnnnnnnnnnnnnnnnnnnnnnnnnnnnnnnnnnnnnnnnnnnnnnnnnnnnnnnnnnnnnnnnnnnnnnnnnnnnnnnnnnnnnnnnnnnnnnnnnnnnnnnnnnnnnnnnnnnnnnnnnnnnnnnnnnnnnnnnnnnnnnnnnnnnnnnnnnnnnnnnnnnnnnnnnnnnnnnnnnnnnnnnnnnnnnnnnnnnnnnnnnnnnnnnnnnnnnnnnnnnnnnnnnnnnnnnnnnnnnnnnnnnnnnnnnnnnnnnnnnnnnnnnnnnnnnnnnnnnnnnnnnnnnnnnnnnnnnnnnnnnnnnnnnnnnnnnnnnnnnnnnnnnnnnnnnnnnnnnnnnnnnnnnnnnnnnnnnnnnnnnnnnnnnnnnnnnnnnnnnnnnnnnnnnnnnnnnnnnnnnnnnnnnnnnnnnnnnnnnnnnnnnnnnnnnnnnnnnnnnnnnnnnnnnnnnnnnnnnnnnnnnnnnnnnnnnnnnnnnnnnnnnnnnnnnnnnnnnnnnnnnnnnnnnnnnnnnnnnnnnnnnnnnnnnnnnnnnnnnnnnnnnnnnnnnnnnnnnnnnnnnnnnnnnnnnnnnnnnnnnnnnnnnnnnnnnnnnnnnnnnnnnnnnnnnnnnnnnnnnnnnnnnnnnnnnnnnnnnnnnnnnnnnnnnnnnnnnnnnnnnnnnnnnnnnnnnnnnnnnnnnnnnnnnnnnnnnnnnnnnnnnnnnnnnnnnnnnnnnnnnnnnnnnnnnnnnnnnnnnnnnnnnnnnnnnnnnnnnnnnnnnnnnnnnnnnnnnnnnnnnnnnnnnnnnnnnnnnnnnnnnnnnnnnnnnnnnnnnnnnnnnnnnnnnnnnnnnnnnnnnnnnnnnnnnnnnnnnnnnnnnnnnnnnnnnnnnnnnnnnnnnnnnnnnnnnnnnnnnnnnnnnnnnnnnnnnnnnnnnnnnnnnnnnnnnnnnnnnnnnnnnnnnnnnnnnnnnnnnnnnnnnnnnnnnnnnnnnnnnnnnnnnnnnnnnnnnnnnnnnnnnnnnnnnnnnnnnnnnnnnnnnnnnnnnnnnnnnnnnnnnnnnnnnnnnnnnnnnnnnnnnnnnnnnnnnnnnnnnnnnnnnnnnnnnnnnnnnnnnnnnnnnnnnnnnnnnnnnnnnnnnnnnnnnnnnnnnnnnnnnnnnnnnnnnnnnnnnnnnnnnnnnnnnnnnnnnnnnnnnnnnnnnnnnnnnnnnnnnnnnnnnnnnnnnnnnnnnnnnnnnnnnnnnnnnnnnnnnnnnnnnnnnnnnnnnnnnnnnnnnnnnnnnnnnnnnnnnnnnnnnnnnnnnnnnnnnnnnnnnnnnnnnnnnnnnnnnnnnnnnnnnnnnnnnnnnnnnnnnnnnnnnnnnnnnnnnnnnnnnnnnnnnnnnnnnnnnnnnnnnnnnnnnnnnnnnnnnnnnnnnnnnnnnnnnnnnnnnnnnnnnnnnnnnnnnnnnnnnnnnnnnnnnnnnnnnnnnnnnnnnnnnnnnnnnnnnnnnnnnnnnnnnnnnnnnnnnnnnnnnnnnnnnnnnnnnnnnnnnnnnnnnnnnnnnnnnnnnnnnnnnnnnnnnnnnnnnnnnnnnnnnnnnnnnnnnnnnnnnnnnnnnnnnnnnnnnnnnnnnnnnnnnnnnnnnnnnnnnnnnnnnnnnnnnnnnnnnnnnnnnnnnnnnnnnnnnnnnnnnnnnnnnnnnnnnnnnnnnnnnnnnnnnnnnnnnnnnnnnnnnnnnnnnnnnnnnnnnnnnnnnnnnnnnnnnnnnnnnnnnnnnnnnnnnnnnnnnnnnnnnnnnnnnnnnnnnnnnnnnnnnnnnnnnnnnnnnnnnnnnnnnnnnnnnnnnnnnnnnnnnnnnnnnnnnnnnnnnnnnnnnnnnnnnnnnnnnnnnnnnnnnnnnnnnnnnnnnnnnnnnnnnnnnnnnnnnnnnnnnnnnnnnnnnnnnnnnnnnnnnnnnnnnnnnnnnnnnnnnnnnnnnnnnnnnnnnnnnnnnnnnnnnnnnnnnnnnnnnnnnnnnnnnnnnnnnnnnnnnnnnnnnnnnnnnnnnnnnnnnnnnnnnnnnnnnnnnnnnnnnnnnnnnnnnnnnnnnnnnnnnnnnnnnnnnnnnnnnnnnnnnnnnnnnnnnnnnnnnnnnnnnnnnnnnnnnnnnnnnnnnnnnnnnnnnnnnnnnnnnnnnnnnnnnnnnnnnnnnnnnnnnnnnnnnnnnnnnnnnnnnnnnnnnnnnnnnnnnnnnnnnnnnnnnnnnnnnnnnnnnnnnnnnnnnnnnnnnnnnnnnnnnnnnnnnnnnnnnnnnnnnnnnnnnnnnnnnnnnnnnnnnnnnnnnnnnnnnnnnnnnnnnnnnnnnnnnnnnnnnnnnnnnnnnnnnnnnnnnnnnnnnnnnnnnnnnnnnnnnnnnnnnnnnnnnnnnnnnnnnnnnnnnnnnnnnnnnnnnnnnnnnnnnnnnnnnnnnnnnnnnnnnnnnnnnnnnnnnnnnnnnnnnnnnnnnnnnnnnnnnnnnnnnnnnnnnnnnnnnnnnnnnnnnnnnnnnnnnnnnnnnnnnnnnnnnnnnnnnnnnnnnnnnnnnnnnnnnnnnnnnnnnnnnnnnnnnnnnnnnnnnnnnnnnnnnnnnnnnnnnnnnnnnnnnnnnnnnnnnnnnnnnnnnnnnnnnnnnnnnnnnnnnnnnnnnnnnnnnnnnnnnnnnnnnnnnnnnnnnnnnnnnnnnnnnnnnnnnnnnnnnnnnnnnnnnnnnnnnnnnnnnnnnnnnnnnnnnnnnnnnnnnnnnnnnnnnnnnnnnnnnnnnnnnnnnnnnnnnnnnnnnnnnnnnnnnnnnnnnnnnnnnnnnnnnnnnnnnnnnnnnnnnnnnnnnnnnnnnnnnnnnnnnnnnnnnnnnnnnnnnnnnnnnnnnnnnnnnnnnnnnnnnnnnnnnnnnnnnnnnnnnnnnnnnnnnnnnnnnnnnnnnnnnnnnnnnnnnnnnnnnnnnnnnnnnnnnnnnnnnnnnnnnnnnnnnnnnnnnnnnnnnnnnnnnnnnnnnnnnnnnnnnnnnnnnnnnnnnnnnnnnnnnnnnnnnnnnnnnnnnnnnnnnnnnnnnnnnnnnnnnnnnnnnnnnnnnnnnnnnnnnnnnnnnnnnnnnnnnnnnnnnnnnnnnnnnnnnnnnnnnnnnnnnnnnnnnnnnnnnnnnnnnnnnnnnnnnnnnnnnnnnnnnnnnnnnnnnnnnnnnnnnnnnnnnnnnnnnnnnnnnnnnnnnnnnnnnnnnnnnnnnnnnnnnnnnnnnnnnnnnnnnnnnnnnnnnnnnnnnnnnnnnnnnnnnnnnnnnnnnnnnnnnnnnnnnnnnnnnnnnnnnnnnnnnnnnnnnnnnnnnnnnnnnnnnnnnnnnnnnnnnnnnnnnnnnnnnnnnnnnnnnnnnnnnnnnnnnnnnnnnnnnnnnnnnnnnnnnnnnnnnnnnnnnnnnnnnnnnnnnnnnnnnnnnnnnnnnnnnnnnnnnnnnnnnnnnnnnnnnnnnnnnnnnnnnnnnnnnnnnnnnnnnnnnnnnnnnnnnnnnnnnnnnnnnnnnnnnnnnnnnnnnnnnnnnnnnnnnnnnnnnnnnnnnnnnnnnnnnnnnnnnnnnnnnnnnnnnnnnnnnnnnnnnnnnnnnnnnnnnnnnnnnnnnnnnnnnnnnnnnnnnnnnnnnnnnnnnnnnnnnnnnnnnnnnnnnnnnnnnnnnnnnnnnnnnnnnnnnnnnnnnnnnnnnnnnnnnnnnnnnnnnnnnnnnnnnnnnnnnnnnnnnnnnnnnnnnnnnnnnnnnnnnnnnnnnnnnnnnnnnnnnnnnnnnnnnnnnnnnnnnnnnnnnnnnnnnnnnnnnnnnnnnnnnnnnnnnnnnnnnnnnnnnnnnnnnnnnnnnnnnnnnnnnnnnnnnnnnnnnnnnnnnnnnnnnnnnnnnnnnnnnnnnnnnnnnnnnnnnnnnnnnnnnnnnnnnnnnnnnnnnnnnnnnnnnnnnnnnnnnnnnnnnnnnnnnnnnnnnnnnnnnnnnnnnnnnnnnnnnnnnnnnnnnnnnnnnnnnnnnnnnnnnnnnnnnnnnnnnnnnnnnnnnnnnnnnnnnnnnnnnnnnnnnnnnnnnnnnnnnnnnnnnnnnnnnnnnnnnnnnnnnnnnnnnnnnnnnnnnnnnnnnnnnnnnnnnnnnnnnnnnnnnnnnnnnnnnnnnnnnnnnnnnnnnnnnnnnnnnnnnnnnnnnnnnnnnnnnnnnnnnnnnnnnnnnnnnnnnnnnnnnnnnnnnnnnnnnnnnnnnnnnnnnnnnnnnnnnnnnnnnnnnnnnnnnnnnnnnnnnnnnnnnnnnnnnnnnnnnnnnnnnnnnnnnnnnnnnnnnnnnnnnnnnnnnnnnnnnnnnnnnnnnnnnnnnnnnnnnnnnnnnnnnnnnnnnnnnnnnnnnnnnnnnnnnnnnnnnnnnnnnnnnnnnnnnnnnnnnnnnnnnnnnnnnnnnnnnnnnnnnnnnnnnnnnnnnnnnnnnnnnnnnnnnnnnnnnnnnnnnnnnnnnnnnnnnnnnnnnnnnnnnnnnnnnnnnnnnnnnnnnnnnnnnnnnnnnnnnnnnnnnnnnnnnnnnnnnnnnnnnnnnnnnnnnnnnnnnnnnnnnnnnnnnnnnnnnnnnnnnnnnnnnnnnnnnnnnnnnnnnnnnnnnnnnnnnnnnnnnnnnnnnnnnnnnnnnnnnnnnnnnnnnnnnnnnnnnnnnnnnnnnnnnnnnnnnnnnnnnnnnnnnnnnnnnnnnnnnnnnnnnnnnnnnnnnnnnnnnnnnnnnnnnnnnnnnnnnnnnnnnnnnnnnnnnnnnnnnnnnnnnnnnnnnnnnnnnnnnnnnnnnnnnnnnnnnnnnnnnnnnnnnnnnnnnnnnnnnnnnnnnnnnnnnnnnnnnnnnnnnnnnnnnnnnnnnnnnnnnnnnnnnnnnnnnnnnnnnnnnnnnnnnnnnnnnnnnnnnnnnnnnnnnnnnnnnnnnnnnnnnnnnnnnnnnnnnnnnnnnnnnnnnnnnnnnnnnnnnnnnnnnnnnnnnnnnnnnnnnnnnnnnnnnnnnnnnnnnnnnnnnnnnnnnnnnnnnnnnnnnnnnnnnnnnnnnnnnnnnnnnnnnnnnnnnnnnnnnnnnnnnnnnnnnnnnnnnnnnnnnnnnnnnnnnnnnnnnnnnnnnnnnnnnnnnnnnnnnnnnnnnnnnnnnnnnnnnnnnnnnnnnnnnnnnnnnnnnnnnnnnnnnnnnnnnnnnnnnnnnnnnnnnnnnnnnnnnnnnnnnnnnnnnnnnnnnnnnnnnnnnnnnnnnnnnnnnnnnnnnnnnnnnnnnnnnnnnnnnnnnnnnnnnnnnnnnnnnnnnnnnnnnnnnnnnnnnnnnnnnnnnnnnnnnnnnnnnnnnnnnnnnnnnnnnnnnnnnnnnnnnnnnnnnnnnnnnnnnnnnnnnnnnnnnnnnnnnnnnnnnnnnnnnnnnnnnnnnnnnnnnnnnnnnnnnnnnnnnnnnnnnnnnnnnnnnnnnnnnnnnnnnnnnnnnnnnnnnnnnnnnnnnnnnnnnnnnnnnnnnnnnnnnnnnnnnnnnnnnnnnnnnnnnnnnnnnnnnnnnnnnnnnnnnnnnnnnnnnnnnnnnnnnnnnnnnnnnnnnnnnnnnnnnnnnnnnnnnnnnnnnnnnnnnnnnnnnnnnnnnnnnnnnnnnnnnnnnnnnnnnnnnnnnnnnnnnnnnnnnnnnnnnnnnnnnnnnnnnnnnnnnnnnnnnnnnnnnnnnnnnnnnnnnnnnnnnnnnnnnnnnnnnnnnnnnnnnnnnnnnnnnnnnnnnnnnnnnnnnnnnnnnnnnnnnnnnnnnnnnnnnnnnnnnnnnnnnnnnnnnnnnnnnnnnnnnnnnnnnnnnnnnnnnnnnnnnnnnnnnnnnnnnnnnnnnnnnnnnnnnnnnnnnnnnnnnnnnnnnnnnnnnnnnnnnnnnnnnnnnnnnnnnnnnnnnnnnnnnnnnnnnnnnnnnnnnnnnnnnnnnnnnnnnnnnnnnnnnnnnnnnnnnnnnnnnnnnnnnnnnnnnnnnnnnnnnnnnnnnnnnnnnnnnnnnnnnnnnnnnnnnnnnnnnnnnnnnnnnnnnnnnnnnnnnnnnnnnnnnnnnnnnnnnnnnnnnnnnnnnnnnnnnnnnnnnnnnnnnnnnnnnnnnnnnnnnnnnnnnnnnnnnnnnnnnnnnnnnnnnnnnnnnnnnnnnnnnnnnnnnnnnnnnnnnnnnnnnnnnnnnnnnnnnnnnnnnnnnnnnnnnnnnnnnnnnnnnnnnnnnnnnnnnnnnnnnnnnnnnnnnnnnnnnnnnnnnnnnnnnnnnnnnnnnnnnnnnnnnnnnnnnnnnnnnnnnnnnnnnnnnnnnnnnnnnnnnnnnnnnnnnnnnnnnnnnnnnnnnnnnnnnnnnnnnnnnnnnnnnnnnnnnnnnnnnnnnnnnnnnnnnnnnnnnnnnnnnnnnnnnnnnnnnnnnnnnnnnnnnnnnnnnnnnnnnnnnnnnnnnnnnnnnnnnnnnnnnnnnnnnnnnnnnnnnnnnnnnnnnnnnnnnnnnnnnnnnnnnnnnnnnnnnnnnnnnnnnnnnnnnnnnnnnnnnnnnnnnnnnnnnnnnnnnnnnnnnnnnnnnnnnnnnnnnnnnnnnnnnnnnnnnnnnnnnnnnnnnnnnnnnnnnnnnnnnnnnnnnnnnnnnnnnnnnnnnnnnnnnnnnnnnnnnnnnnnnnnnnnnnnnnnnnnnnnnnnnnnnnnnnnnnnnnnnnnnnnnnnnnnnnnnnnnnnnnnnnnnnnnnnnnnnnnnnnnnnnnnnnnnnnnnnnnnnnnnnnnnnnnnnnnnnnnnnnnnnnnnnnnnnnnnnnnnnnnnnnnnnnnnnnnnnnnnnnnnnnnnnnnnnnnnnnnnnnnnnnnnnnnnnnnnnnnnnnnnnnnnnnnnnnnnnnnnnnnnnnnnnnnnnnnnnnnnnnnnnnnnnnnnnnnnnnnnnnnnnnnnnnnnnnnnnnnnnnnnnnnnnnnnnnnnnnnnnnnnnnnnnnnnnnnnnnnnnnnnnnnnnnnnnnnnnnnnnnnnnnnnnnnnnnnnnnnnnnnnnnnnnnnnnnnnnnnnnnnnnnnnnnnnnnnnnnnnnnnnnnnnnnnnnnnnnnnnnnnnnnnnnnnnnnnnnnnnnnnnnnnnnnnnnnnnnnnnnnnnnnnnnnnnnnnnnnnnnnnnnnnnnnnnnnnnnnnnnnnnnnnnnnnnnnnnnnnnnnnnnnnnnnnnnnnnnnnnnnnnnnnnnnnnnnnnnnnnnnnnnnnnnnnnnnnnnnnnnnnnnnnnnnnnnnnnnnnnnnnnnnnnnnnnnnnnnnnnnnnnnnnnnnnnnnnnnnnnnnnnnnnnnnnnnnnnnnnnnnnnnnnnnnnnnnnnnnnnnnnnnnnnnnnnnnnnnnnnnnnnnnnnnnnnnnnnnnnnnnnnnnnnnnnnnnnnnnnnnnnnnnnnnnnnnnnnnnnnnnnnnnnnnnnnnnnnnnnnnnnnnnnnnnnnnnnnnnnnnnnnnnnnnnnnnnnnnnnnnnnnnnnnnnnnnnnnnnnnnnnnnnnnnnnnnnnnnnnnnnnnnnnnnnnnnnnnnnnnnnnnnnnnnnnnnnnnnnnnnnnnnnnnnnnnnnnnnnnnnnnnnnnnnnnnnnnnnnnnnnnnnnnnnnnnnnnnnnnnnnnnnnnnnnnnnnnnnnnnnnnnnnnnnnnnnnnnnnnnnnnnnnnnnnnnnnnnnnnnnnnnnnnnnnnnnnnnnnnnnnnnnnnnnnnnnnnnnnnnnnnnnnnnnnnnnnnnnnnnnnnnnnnnnnnnnnnnnnnnnnnnnnnnnnnnnnnnnnnnnnnnnnnnnnnnnnnnnnnnnnnnnnnnnnnnnnnnnnnnnnnnnnnnnnnnnnnnnnnnnnnnnnnnnnnnnnnnnnnnnnnnnnnnnnnnnnnnnnnnnnnnnnnnnnnnnnnnnnnnnnnnnnnnnnnnnnnnnnnnnnnnnnnnnnnnnnnnnnnnnnnnnnnnnnnnnnnnnnnnnnnnnnnnnnnnnnnnnnnnnnnnnnnnnnnnnnnnnnnnnnnnnnnnnnnnnnnnnnnnnnnnnnnnnnnnnnnnnnnnnnnnnnnnnnnnnnnnnnnnnnnnnnnnnnnnnnnnnnnnnnnnnnnnnnnnnnnnnnnnnnnnnnnnnnnnnnnnnnnnnnnnnnnnnnnnnnnnnnnnnnnnnnnnnnnnnnnnnnnnnnnnnnnnnnnnnnnnnnnnnnnnnnnnnnnnnnnnnnnnnnnnnnnnnnnnnnnnnnnnnnnnnnnnnnnnnnnnnnnnnnnnnnnnnnnnnnnnnnnnnnnnnnnnnnnnnnnnnnnnnnnnnnnnnnnnnnnnnnnnnnnnnnnnnnnnnnnnnnnnnnnnnnnnnnnnnnnnnnnnnnnnnnnnnnnnnnnnnnnnnnnnnnnnnnnnnnnnnnnnnnnnnnnnnnnnnnnnnnnnnnnnnnnnnnnnnnnnnnnnnnnnnnnnnnnnnnnnnnnnnnnnnnnnnnnnnnnnnnnnnnnnnnnnnnnnnnnnnnnnnnnnnnnnnnnnnnnnnnnnnnnnnnnnnnnnnnnnnnnnnnnnnnnnnnnnnnnnnnnnnnnnnnnnnnnnnnnnnnnnnnnnnnnnnnnnnnnnnnnnnnnnnnnnnnnnnnnnnnnnnnnnnnnnnnnnnnnnnnnnnnnnnnnnnnnnnnnnnnnnnnnnnnnnnnnnnnnnnnnnnnnnnnnnnnnnnnnnnnnnnnnnnnnnnnnnnnnnnnnnnnnnnnnnnnnnnnnnnnnnnnnnnnnnnnnnnnnnnnnnnnnnnnnnnnnnnnnnnnnnnnnnnnnnnnnnnnnnnnnnnnnnnnnnnnnnnnnnnnnnnnnnnnnnnnnnnnnnnnnnnnnnnnnnnnnnnnnnnnnnnnnnnnnnnnnnnnnnnnnnnnnnnnnnnnnnnnnnnnnnnnnnnnnnnnnnnnnnnnnnnnnnnnnnnnnnnnnnnnnnnnnnnnnnnnnnnnnnnnnnnnnnnnnnnnnnnnnnnnnnnnnnnnnnnnnnnnnnnnnnnnnnnnnnnnnnnnnnnnnnnnnnnnnnnnnnnnnnnnnnnnnnnnnnnnnnnnnnnnnnnnnnnnnnnnnnnnnnnnnnnnnnnnnnnnnnnnnnnnnnnnnnnnnnnnnnnnnnnnnnnnnnnnnnnnnnnnnnnnnnnnnnnnnnnnnnnnnnnnnnnnnnnnnnnnnnnnnnnnnnnnnnnnnnnnnnnnnnnnnnnnnnnnnnnnnnnnnnnnnnnnnnnnnnnnnnnnnnnnnnnnnnnnnnnnnnnnnnnnnnnnnnnnnnnnnnnnnnnnnnnnnnnnnnnnnnnnnnnnnnnnnnnnnnnnnnnnnnnnnnnnnnnnnnnnnnnnnnnnnnnnnnnnnnnnnnnnnnnnnnnnnnnnnnnnnnnnnnnnnnnnnnnnnnnnnnnnnnnnnnnnnnnnnnnnnnnnnnnnnnnnnnnnnnnnnnnnnnnnnnnnnnnnnnnnnnnnnnnnnnnnnnnnnnnnnnnnnnnnnnnnnnnnnnnnnnnnnnnnnnnnnnnnnnnnnnnnnnnnnnnnnnnnnnnnnnnnnnnnnnnnnnnnnnnnnnnnnnnnnnnnnnnnnnnnnnnnnnnnnnnnnnnnnnnnnnnnnnnnnnnnnnnnnnnnnnnnnnnnnnnnnnnnnnnnnnnnnnnnnnnnnnnnnnnnnnnnnnnnnnnnnnnnnnnnnnnnnnnnnnnnnnnnnnnnnnnnnnnnnnnnnnnnnnnnnnnnnnnnnnnnnnnnnnnnnnnnnnnnnnnnnnnnnnnnnnnnnnnnnnnnnnnnnnnnnnnnnnnnnnnnnnnnnnnnnnnnnnnnnnnnnnnnnnnnnnnnnnnnnnnnnnnnnnnnnnnnnnnnnnnnnnnnnnnnnnnnnnnnnnnnnnnnnnnnnnnnnnnnnnnnnnnnnnnnnnnnnnnnnnnnnnnnnnnnnnnnnnnnnnnnnnnnnnnnnnnnnnnnnnnnnnnnnnnnnnnnnnnnnnnnnnnnnnnnnnnnnnnnnnnnnnnnnnnnnnnnnnnnnnnnnnnnnnnnnnnnnnnnnnnnnnnnnnnnnnnnnnnnnnnnnnnnnnnnnnnnnnnnnnnnnnnnnnnnnnnnnnnnnnnnnnnnnnnnnnnnnnnnnnnnnnnnnnnnnnnnnnnnnnnnnnnnnnnnnnnnnnnnnnnnnnnnnnnnnnnnnnnnnnnnnnnnnnnnnnnnnnnnnnnnnnnnnnnnnnnnnnnnnnnnnnnnnnnnnnnnnnnnnnnnnnnnnnnnnnnnnnnnnnnnnnnnnnnnnnnnnnnnnnnnnnnnnnnnnnnnnnnnnnnnnnnnnnnnnnnnnnnnnnnnnnnnnnnnnnnnnnnnnnnnnnnnnnnnnnnnnnnnnnnnnnnnnnnnnnnnnnnnnnnnnnnnnnnnnnnnnnnnnnnnnnnnnnnnnnnnnnnnnnnnnnnnnnnnnnnnnnnnnnnnnnnnnnnnnnnnnnnnnnnnnnnnnnnnnnnnnnnnnnnnnnnnnnnnnnnnnnnnnnnnnnnnnnnnnnnnnnnnnnnnnnnnnnnnnnnnnnnnnnnnnnnnnnnnnnnnnnnnnnnnnnnnnnnnnnnnnnnnnnnnnnnnnnnnnnnnnnnnnnnnnnnnnnnnnnnnnnnnnnnnnnnnnnnnnnnnnnnnnnnnnnnnnnnnnnnnnnnnnnnnnnnnnnnnnnnnnnnnnnnnnnnnnnnnnnnnnnnnnnnnnnnnnnnnnnnnnnnnnnnnnnnnnnnnnnnnnnnnnnnnnnnnnnnnnnnnnnnnnnnnnnnnnnnnnnnnnnnnnnnnnnnnnnnnnnnnnnnnnnnnnnnnnnnnnnnnnnnnnnnnnnnnnnnnnnnnnnnnnnnnnnnnnnnnnnnnnnnnnnnnnnnnnnnnnnnnnnnnnnnnnnnnnnnnnnnnnnnnnnnnnnnnnnnnnnnnnnnnnnnnnnnnnnnnnnnnnnnnnnnnnnnnnnnnnnnnnnnnnnnnnnnnnnnnnnnnnnnnnnnnnnnnnnnnnnnnnnnnnnnnnnnnnnnnnnnnnnnnnnnnnnnnnnnnnnnnnnnnnnnnnnnnnnnnnnnnnnnnnnnnnnnnnnnnnnnnnnnnnnnnnnnnnnnnnnnnnnnnnnnnnnnnnnnnnnnnnnnnnnnnnnnnnnnnnnnnnnnnnnnnnnnnnnnnnnnnnnnnnnnnnnnnnnnnnnnnnnnnnnnnnnnnnnnnnnnnnnnnnnnnnnnnnnnnnnnnnnnnnnnnnnnnnnnnnnnnnnnnnnnnnnnnnnnnnnnnnnnnnnnnnnnnnnnnnnnnnnnnnnnnnnnnnnnnnnnnnnnnnnnnnnnnnnnnnnnnnnnnnnnnnnnnnnnnnnnnnnnnnnnnnnnnnnnnnnnnnnnnnnnnnnnnnnnnnnnnnnnnnnnnnnnnnnnnnnnnnnnnnnnnnnnnnnnnnnnnnnnnnnnnnnnnnnnnnnnnnnnnnnnnnnnnnnnnnnnnnnnnnnnnnnnnnnnnnnnnnnnnnnnnnnnnnnnnnnnnnnnnnnnnnnnnnnnnnnnnnnnnnnnnnnnnnnnnnnnnnnnnnnnnnnnnnnnnnnnnnnnnnnnnnnnnnnnnnnnnnnnnnnnnnnnnnnnnnnnnnnnnnnnnnnnnnnnnnnnnnnnnnnnnnnnnnnnnnnnnnnnnnnnnnnnnnnnnnnnnnnnnnnnnnnnnnnnnnnnnnnnnnnnnnnnnnnnnnnnnnnnnnnnnnnnnnnnnnnnnnnnnnnnnnnnnnnnnnnnnnnnnnnnnnnnnnnnnnnnnnnnnnnnnnnnnnnnnnnnnnnnnnnnnnnnnnnnnnnnnnnnnnnnnnnnnnnnnnnnnnnnnnnnnnnnnnnnnnnnnnnnnnnnnnnnnnnnnnnnnnnnnnnnnnnnnnnnnnnnnnnnnnnnnnnnnnnnnnnnnnnnnnnnnnnnnnnnnnnnnnnnnnnnnnnnnnnnnnnnnnnnnnnnnnnnnnnnnnnnnnnnnnnnnnnnnnnnnnnnnnnnnnnnnnnnnnnnnnnnnnnnnnnnnnnnnnnnnnnnnnnnnnnnnnnnnnnnnnnnnnnnnnnnnnnnnnnnnnnnnnnnnnnnnnnnnnnnnnnnnnnnnnnnnnnnnnnnnnnnnnnnnnnnnnnnnnnnnnnnnnnnnnnnnnnnnnnnnnnnnnnnnnnnnnnnnnnnnnnnnnnnnnnnnnnnnnnnnnnnnnnnnnnnnnnnnnnnnnnnnnnnnnnnnnnnnnnnnnnnnnnnnnnnnnnnnnnnnnnnnnnnnnnnnnnnnnnnnnnnnnnnnnnnnnnnnnnnnnnnnnnnnnnnnnnnnnnnnnnnnnnnnnnnnnnnnnnnnnnnnnnnnnnnnnnnnnnnnnnnnnnnnnnnnnnnnnnnnnnnnnnnnnnnnnnnnnnnnnnnnnnnnnnnnnnnnnnnnnnnnnnnnnnnnnnnnnnnnnnnnnnnnnnnnnnnnnnnnnnnnnnnnnnnnnnnnnnnnnnnnnnnnnnnnnnnnnnnnnnnnnnnnnnnnnnnnnnnnnnnnnnnnnnnnnnnnnnnnnnnnnnnnnnnnnnnnnnnnnnnnnnnnnnnnnnnnnnnnnnnnnnnnnnnnnnnnnnnnnnnnnnnnnnnnnnnnnnnnnnnnnnnnnnnnnnnnnnnnnnnnnnnnnnnnnnnnnnnnnnnnnnnnnnnnnnnnnnnnnnnnnnnnnnnnnnnnnnnnnnnnnnnnnnnnnnnnnnnnnnnnnnnnnnnnnnnnnnnnnnnnnnnnnnnnnnnnnnnnnnnnnnnnnnnnnnnnnnnnnnnnnnnnnnnnnnnnnnnnnnnnnnnnnnnnnnnnnnnnnnnnnnnnnnnnnnnnnnnnnnnnnnnnnnnnnnnnnnnnnnnnnnnnnnnnnnnnnnnnnnnnnnnnnnnnnnnnnnnnnnnnnnnnnnnnnnnnnnnnnnnnnnnnnnnnnnnnnnnnnnnnnnnnnnnnnnnnnnnnnnnnnnnnnnnnnnnnnnnnnnnnnnnnnnnnnnnnnnnnnnnnnnnnnnnnnnnnnnnnnnnnnnnnnnnnnnnnnnnnnnnnnnnnnnnnnnnnnnnnnnnnnnnnnnnnnnnnnnnnnnnnnnnnnnnnnnnnnnnnnnnnnnnnnnnnnnnnnnnnnnnnnnnnnnnnnnnnnnnnnnnnnnnnnnnnnnnnnnnnnnnnnnnnnnnnnnnnnnnnnnnnnnnnnnnnnnnnnnnnnnnnnnnnnnnnnnnnnnnnnnnnnnnnnnnnnnnnnnnnnnnnnnnnnnnnnnnnnnnnnnnnnnnnnnnnnnnnnnnnnnnnnnnnnnnnnnnnnnnnnnnnnnnnnnnnnnnnnnnnnnnnnnnnnnnnnnnnnnnnnnnnnnnnnnnnnnnnnnnnnnnnnnnnnnnnnnnnnnnnnnnnnnnnnnnnnnnnnnnnnnnnnnnnnnnnnnnnnnnnnnnnnnnnnnnnnnnnnnnnnnnnnnnnnnnnnnnnnnnnnnnnnnnnnnnnnnnnnnnnnnnnnnnnnnnnnnnnnnnnnnnnnnnnnnnnnnnnnnnnnnnnnnnnnnnnnnnnnnnnnnnnnnnnnnnnnnnnnnnnnnnnnnnnnnnnnnnnnnnnnnnnnnnnnnnnnnnnnnnnnnnnnnnnnnnnnnnnnnnnnnnnnnnnnnnnnnnnnnnnnnnnnnnnnnnnnnnnnnnnnnnnnnnnnnnnnnnnnnnnnnnnnnnnnnnnnnnnnnnnnnnnnnnnnnnnnnnnnnnnnnnnnnnnnnnnnnnnnnnnnnnnnnnnnnnnnnnnnnnnnnnnnnnnnnnnnnnnnnnnnnnnnnnnnnnnnnnnnnnnnnnnnnnnnnnnnnnnnnnnnnnnnnnnnnnnnnnnnnnnnnnnnnnnnnnnnnnnnnnnnnnnnnnnnnnnnnnnnnnnnnnnnnnnnnnnnnnnnnnnnnnnnnnnnnnnnnnnnnnnnnnnnnnnnnnnnnnnnnnnnnnnnnnnnnnnnnnnnnnnnnnnnnnnnnnnnnnnnnnnnnnnnnnnnnnnnnnnnnnnnnnnnnnnnnnnnnnnnnnnnnnnnnnnnnnnnnnnnnnnnnnnnnnnnnnnnnnnnnnnnnnnnnnnnnnnnnnnnnnnnnnnnnnnnnnnnnnnnnnnnnnnnnnnnnnnnnnnnnnnnnnnnnnnnnnnnnnnnnnnnnnnnnnnnnnnnnnnnnnnnnnnnnnnnnnnnnnnnnnnnnnnnnnnnnnnnnnnnnnnnnnnnnnnnnnnnnnnnnnnnnnnnnnnnnnnnnnnnnnnnnnnnnnnnnnnnnnnnnnnnnnnnnnnnnnnnnnnnnnnnnnnnnnnnnnnnnnnnnnnnnnnnnnnnnnnnnnnnnnnnnnnnnnnnnnnnnnnnnnnnnnnnnnnnnnnnnnnnnnnnnnnnnnnnnnnnnnnnnnnnnnnnnnnnnnnnnnnnnnnnnnnnnnnnnnnnnnnnnnnnnnnnnnnnnnnnnnnnnnnnnnnnnnnnnnnnnnnnnnnnnnnnnnnnnnnnnnnnnnnnnnnnnnnnnnnnnnnnnnnnnnnnnnnnnnnnnnnnnnnnnnnnnnnnnnnnnnnnnnnnnnnnnnnnnnnnnnnnnnnnnnnnnnnnnnnnnnnnnnnnnnnnnnnnnnnnnnnnnnnnnnnnnnnnnnnnnnnnnnnnnnnnnnnnnnnnnnnnnnnnnnnnnnnnnnnnnnnnnnnnnnnnnnnnnnnnnnnnnnnnnnnnnnnnnnnnnnnnnnnnnnnnnnnnnnnnnnnnnnnnnnnnnnnnnnnnnnnnnnnnnnnnnnnnnnnnnnnnnnnnnnnnnnnnnnnnnnnnnnnnnnnnnnnnnnnnnnnnnnnnnnnnnnnnnnnnnnnnnnnnnnnnnnnnnnnnnnnnnnnnnnnnnnnnnnnnnnnnnnnnnnnnnnnnnnnnnnnnnnnnnnnnnnnnnnnnnnnnnnnnnnnnnnnnnnnnnnnnnnnnnnnnnnnnnnnnnnnnnnnnnnnnnnnnnnnnnnnnnnnnnnnnnnnnnnnnnnnnnnnnnnnnnnnnnnnnnnnnnnnnnnnnnnnnnnnnnnnnnnnnnnnnnnnnnnnnnnnnnnnnnnnnnnnnnnnnnnnnnnnnnnnnnnnnnnnnnnnnnnnnnnnnnnnnnnnnnnnnnnnnnnnnnnnnnnnnnnnnnnnnnnnnnnnnnnnnnnnnnnnnnnnnnnnnnnnnnnnnnnnnnnnnnnnnnnnnnnnnnnnnnnnnnnnnnnnnnnnnnnnnnnnnnnnnnnnnnnnnnnnnnnnnnnnnnnnnnnnnnnnnnnnnnnnnnnnnnnnnnnnnnnnnnnnnnnnnnnnnnnnnnnnnnnnnnnnnnnnnnnnnnnnnnnnnnnnnnnnnnnnnnnnnnnnnnnnnnnnnnnnnnnnnnnnnnnnnnnnnnnnnnnnnnnnnnnnnnnnnnnnnnnnnnnnnnnnnnnnnnnnnnnnnnnnnnnnnnnnnnnnnnnnnnnnnnnnnnnnnnnnnnnnnnnnnnnnnnnnnnnnnnnnnnnnnnnnnnnnnnnnnnnnnnnnnnnnnnnnnnnnnnnnnnnnnnnnnnnnnnnnnnnnnnnnnnnnnnnnnnnnnnnnnnnnnnnnnnnnnnnnnnnnnnnnnnnnnnnnnnnnnnnnnnnnnnnnnnnnnnnnnnnnnnnnnnnnnnnnnnnnnnnnnnnnnnnnnnnnnnnnnnnnnnnnnnnnnnnnnnnnnnnnnnnnnnnnnnnnnnnnnnnnnnnnnnnnnnnnnnnnnnnnnnnnnnnnnnnnnnnnnnnnnnnnnnnnnnnnnnnnnnnnnnnnnnnnnnnnnnnnnnnnnnnnnnnnnnnnnnnnnnnnnnnnnnnnnnnnnnnnnnnnnnnnnnnnnnnnnnnnnnnnnnnnnnnnnnnnnnnnnnnnnnnnnnnnnnnnnnnnnnnnnnnnnnnnnnnnnnnnnnnnnnnnnnnnnnnnnnnnnnnnnnnnnnnnnnnnnnnnnnnnnnnnnnnnnnnnnnnnnnnnnnnnnnnnnnnnnnnnnnnnnnnnnnnnnnnnnnnnnnnnnnnnnnnnnnnnnnnnnnnnnnnnnnnnnnnnnnnnnnnnnnnnnnnnnnnnnnnnnnnnnnnnnnnnnnnnnnnnnnnnnnnnnnnnnnnnnnnnnnnnnnnnnnnnnnnnnnnnnnnnnnnnnnnnnnnnnnnnnnnnnnnnnnnnnnnnnnnnnnnnnnnnnnnnnnnnnnnnnnnnnnnnnnnnnnnnnnnnnnnnnnnnnnnnnnnnnnnnnnnnnnnnnnnnnnnnnnnnnnnnnnnnnnnnnnnnnnnnnnnnnnnnnnnnnnnnnnnnnnnnnnnnnnnnnnnnnnnnnnnnnnnnnnnnnnnnnnnnnnnnnnnnnnnnnnnnnnnnnnnnnnnnnnnnnnnnnnnnnnnnnnnnnnnnnnnnnnnnnnnnnnnnnnnnnnnnnnnnnnnnnnnnnnnnnnnnnnnnnnnnnnnnnnnnnnnnnnnnnnnnnnnnnnnnnnnnnnnnnnnnnnnnnnnnnnnnnnnnnnnnnnnnnnnnnnnnnnnnnnnnnnnnnnnnnnnnnnnnnnnnnnnnnnnnnnnnnnnnnnnnnnnnnnnnnnnnnnnnnnnnnnnnnnnnnnnnnnnnnnnnnnnnnnnnnnnnnnnnnnnnnnnnnnnnnnnnnnnnnnnnnnnnnnnnnnnnnnnnnnnnnnnnnnnnnnnnnnnnnnnnnnnnnnnnnnnnnnnnnnnnnnnnnnnnnnnnnnnnnnnnnnnnnnnnnnnnnnnnnnnnnnnnnnnnnnnnnnnnnnnnnnnnnnnnnnnnnnnnnnnnnnnnnnnnnnnnnnnnnnnnnnnnnnnnnnnnnnnnnnnnnnnnnnnnnnnnnnnnnnnnnnnnnnnnnnnnnnnnnnnnnnnnnnnnnnnnnnnnnnnnnnnnnnnnnnnnnnnnnnnnnnnnnnnnnnnnnnnnnnnnnnnnnnnnnnnnnnnnnnnnnnnnnnnnnnnnnnnnnnnnnnnnnnnnnnnnnnnnnnnnnnnnnnnnnnnnnnnnnnnnnnnnnnnnnnnnnnnnnnnnnnnnnnnnnnnnnnnnnnnnnnnnnnnnnnnnnnnnnnnnnnnnnnnnnnnnnnnnnnnnnnnnnnnnnnnnnnnnnnnnnnnnnnnnnnnnnnnnnnnnnnnnnnnnnnnnnnnnnnnnnnnnnnnnnnnnnnnnnnnnnnnnnnnnnnnnnnnnnnnnnnnnnnnnnnnnnnnnnnnnnnnnnnnnnnnnnnnnnnnnnnnnnnnnnnnnnnnnnnnnnnnnnnnnnnnnnnnnnnnnnnnnnnnnnnnnnnnnnnnnnnnnnnnnnnnnnnnnnnnnnnnnnnnnnnnnnnnnnnnnnnnnnnnnnnnnnnnnnnnnnnnnnnnnnnnnnnnnnnnnnnnnnnnnnnnnnnnnnnnnnnnnnnnnnnnnnnnnnnnnnnnnnnnnnnnnnnnnnnnnnnnnnnnnnnnnnnnnnnnnnnnnnnnnnnnnnnnnnnnnnnnnnnnnnnnnnnnnnnnnnnnnnnnnnnnnnnnnnnnnnnnnnnnnnnnnnnnnnnnnnnnnnnnnnnnnnnnnnnnnnnnnnnnnnnnnnnnnnnnnnnnnnnnnnnnnnnnnnnnnnnnnnnnnnnnnnnnnnnnnnnnnnnnnnnnnnnnnnnnnnnnnnnnnnnnnnnnnnnnnnnnnnnnnnnnnnnnnnnnnnnnnnnnnnnnnnnnnnnnnnnnnnnnnnnnnnnnnnnnnnnnnnnnnnnnnnnnnnnnnnnnnnnnnnnnnnnnnnnnnnnnnnnnnnnnnnnnnnnnnnnnnnnnnnnnnnnnnnnnnnnnnnnnnnnnnnnnnnnnnnnnnnnnnnnnnnnnnnnnnnnnnnnnnnnnnnnnnnnnnnnnnnnnnnnnnnnnnnnnnnnnnnnnnnnnnnnnnnnnnnnnnnnnnnnnnnnnnnnnnnnnnnnnnnnnnnnnnnnnnnnnnnnnnnnnnnnnnnnnnnnnnnnnnnnnnnnnnnnnnnnnnnnnnnnnnnnnnnnnnnnnnnnnnnnnnnnnnnnnnnnnnnnnnnnnnnnnnnnnnnnnnnnnnnnnnnnnnnnnnnnnnnnnnnnnnnnnnnnnnnnnnnnnnnnnnnnnnnnnnnnnnnnnnnnnnnnnnnnnnnnnnnnnnnnnnnnnnnnnnnnnnnnnnnnnnnnnnnnnnnnnnnnnnnnnnnnnnnnnnnnnnnnnnnnnnnnnnnnnnnnnnnnnnnnnnnnnnnnnnnnnnnnnnnnnnnnnnnnnnnnnnnnnnnnnnnnnnnnnnnnnnnnnnnnnnnnnnnnnnnnnnnnnnnnnnnnnnnnnnnnnnnnnnnnnnnnnnnnnnnnnnnnnnnnnnnnnnnnnnnnnnnnnnnnnnnnnnnnnnnnnnnnnnnnnnnnnnnnnnnnnnnnnnnnnnnnnnnnnnnnnnnnnnnnnnnnnnnnnnnnnnnnnnnnnnnnnnnnnnnnnnnnnnnnnnnnnnnnnnnnnnnnnnnnnnnnnnnnnnnnnnnnnnnnnnnnnnnnnnnnnnnnnnnnnnnnnnnnnnnnnnnnnnnnnnnnnnnnnnnnnnnnnnnnnnnnnnnnnnnnnnnnnnnnnnnnnnnnnnnnnnnnnnnnnnnnnnnnnnnnnnnnnnnnnnnnnnnnnnnnnnnnnnnnnnnnnnnnnnnnnnnnnnnnnnnnnnnnnnnnnnnnnnnnnnnnnnnnnnnnnnnnnnnnnnnnnnnnnnnnnnnnnnnnnnnnnnnnnnnnnnnnnnnnnnnnnnnnnnnnnnnnnnnnnnnnnnnnnnnnnnnnnnnnnnnnnnnnnnnnnnnnnnnnnnnnnnnnnnnnnnnnnnnnnnnnnnnnnnnnnnnnnnnnnnnnnnnnnnnnnnnnnnnnnnnnnnnnnnnnnnnnnnnnnnnnnnnnnnnnnnnnnnnnnnnnnnnnnnnnnnnnnnnnnnnnnnnnnnnnnnnnnnnnnnnnnnnnnnnnnnnnnnnnnnnnnnnnnnnnnnnnnnnnnnnnnnnnnnnnnnnnnnnnnnnnnnnnnnnnnnnnnnnnnnnnnnnnnnnnnnnnnnnnnnnnnnnnnnnnnnnnnnnnnnnnnnnnnnnnnnnnnnnnnnnnnnnnnnnnnnnnnnnnnnnnnnnnnnnnnnnnnnnnnnnnnnnnnnnnnnnnnnnnnnnnnnnnnnnnnnnnnnnnnnnnnnnnnnnnnnnnnnnnnnnnnnnnnnnnnnnnnnnnnnnnnnnnnnnnnnnnnnnnnnnnnnnnnnnnnnnnnnnnnnnnnnnnnnnnnnnnnnnnnnnnnnnnnnnnnnnnnnnnnnnnnnnnnnnnnnnnnnnnnnnnnnnnnnnnnnnnnnnnnnnnnnnnnnnnnnnnnnnnnnnnnnnnnnnnnnnnnnnnnnnnnnnnnnnnnnnnnnnnnnnnnnnnnnnnnnnnnnnnnnnnnnnnnnnnnnnnnnnnnnnnnnnnnnnnnnnnnnnnnnnnnnnnnnnnnnnnnnnnnnnnnnnnnnnnnnnnnnnnnnnnnnnnnnnnnnnnnnnnnnnnnnnnnnnnnnnnnnnnnnnnnnnnnnnnnnnnnnnnnnnnnnnnnnnnnnnnnnnnnnnnnnnnnnnnnnnnnnnnnnnnnnnnnnnnnnnnnnnnnnnnnnnnnnnnnnnnnnnnnnnnnnnnnnnnnnnnnnnnnnnnnnnnnnnnnnnnnnnnnnnnnnnnnnnnnnnnnnnnnnnnnnnnnnnnnnnnnnnnnnnnnnnnnnnnnnnnnnnnnnnnnnnnnnnnnnnnnnnnnnnnnnnnnnnnnnnnnnnnnnnnnnnnnnnnnnnnnnnnnnnnnnnnnnnnnnnnnnnnnnnnnnnnnnnnnnnnnnnnnnnnnnnnnnnnnnnnnnnnnnnnnnnnnnnnnnnnnnnnnnnnnnnnnnnnnnnnnnnnnnnnnnnnnnnnnnnnnnnnnnnnnnnnnnnnnnnnnnnnnnnnnnnnnnnnnnnnnnnnnnnnnnnnnnnnnnnnnnnnnnnnnnnnnnnnnnnnnnnnnnnnnnnnnnnnnnnnnnnnnnnnnnnnnnnnnnnnnnnnnnnnnnnnnnnnnnnnnnnnnnnnnnnnnnnnnnnnnnnnnnnnnnnnnnnnnnnnnnnnnnnnnnnnnnnnnnnnnnnnnnnnnnnnnnnnnnnnnnnnnnnnnnnnnnnnnnnnnnnnnnnnnnnnnnnnnnnnnnnnnnnnnnnnnnnnnnnnnnnnnnnnnnnnnnnnnnnnnnnnnnnnnnnnnnnnnnnnnnnnnnnnnnnnnnnnnnnnnnnnnnnnnnnnnnnnnnnnnnnnnnnnnnnnnnnnnnnnnnnnnnnnnnnnnnnnnnnnnnnnnnnnnnnnnnnnnnnnnnnnnnnnnnnnnnnnnnnnnnnnnnnnnnnnnnnnnnnnnnnnnnnnnnnnnnnnnnnnnnnnnnnnnnnnnnnnnnnnnnnnnnnnnnnnnnnnnnnnnnnnnnnnnnnnnnnnnnnnnnnnnnnnnnnnnnnnnnnnnnnnnnnnnnnnnnnnnnnnnnnnnnnnnnnnnnnnnnnnnnnnnnnnnnnnnnnnnnnnnnnnnnnnnnnnnnnnnnnnnnnnnnnnnnnnnnnnnnnnnnnnnnnnnnnnnnnnnnnnnnnnnnnnnnnnnnnnnnnnnnnnnnnnnnnnnnnnnnnnnnnnnnnnnnnnnnnnnnnnnnnnnnnnnnnnnnnnnnnnnnnnnnnnnnnnnnnnnnnnnnnnnnnnnnnnnnnnnnnnnnnnnnnnnnnnnnnnnnnnnnnnnnnnnnnnnnnnnnnnnnnnnnnnnnnnnnnnnnnnnnnnnnnnnnnnnnnnnnnnnnnnnnnnnnnnnnnnnnnnnnnnnnnnnnnnnnnnnnnnnnnnnnnnnnnnnnnnnnnnnnnnnnnnnnnnnnnnnnnnnnnnnnnnnnnnnnnnnnnnnnnnnnnnnnnnnnnnnnnnnnnnnnnnnnnnnnnnnnnnnnnnnnnnnnnnnnnnnnnnnnnnnnnnnnnnnnnnnnnnnnnnnnnnnnnnnnnnnnnnnnnnnnnnnnnnnnnnnnnnnnnnnnnnnnnnnnnnnnnnnnnnnnnnnnnnnnnnnnnnnnnnnnnnnnnnnnnnnnnnnnnnnnnnnnnnnnnnnnnnnnnnnnnnnnnnnnnnnnnnnnnnnnnnnnnnnnnnnnnnnnnnnnnnnnnnnnnnnnnnnnnnnnnnnnnnnnnnnnnnnnnnnnnnnnnnnnnnnnnnnnnnnnnnnnnnnnnnnnnnnnnnnnnnnnnnnnnnnnnnnnnnnnnnnnnnnnnnnnnnnnnnnnnnnnnnnnnnnnnnnnnnnnnnnnnnnnnnnnnnnnnnnnnnnnnnnnnnnnnnnnnnnnnnnnnnnnnnnnnnnnnnnnnnnnnnnnnnnnnnnnnnnnnnnnnnnnnnnnnnnnnnnnnnnnnnnnnnnnnnnnnnnnnnnnnnnnnnnnnnnnnnnnnnnnnnnnnnnnnnnnnnnnnnnnnnnnnnnnnnnnnnnnnnnnnnnnnnnnnnnnnnnnnnnnnnnnnnnnnnnnnnnnnnnnnnnnnnnnnnnnnnnnnnnnnnnnnnnnnnnnnnnnnnnnnnnnnnnnnnnnnnnnnnnnnnnnnnnnnnnnnnnnnnnnnnnnnnnnnnnnnnnnnnnnnnnnnnnnnnnnnnnnnnnnnnnnnnnnnnnnnnnnnnnnnnnnnnnnnnnnnnnnnnnnnnnnnnnnnnnnnnnnnnnnnnnnnnnnnnnnnnnnnnnnnnnnnnnnnnnnnnnnnnnnnnnnnnnnnnnnnnnnnnnnnnnnnnnnnnnnnnnnnnnnnnnnnnnnnnnnnnnnnnnnnnnnnnnnnnnnnnnnnnnnnnnnnnnnnnnnnnnnnnnnnnnnnnnnnnnnnnnnnnnnnnnnnnnnnnnnnnnnnnnnnnnnnnnnnnnnnnnnnnnnnnnnnnnnnnnnnnnnnnnnnnnnnnnnnnnnnnnnnnnnnnnnnnnnnnnnnnnnnnnnnnnnnnnnnnnnnnnnnnnnnnnnnnnnnnnnnnnnnnnnnnnnnnnnnnnnnnnnnnnnnnnnnnnnnnnnnnnnnnnnnnnnnnnnnnnnnnnnnnnnnnnnnnnnnnnnnnnnnnnnnnnnnnnnnnnnnnnnnnnnnnnnnnnnnnnnnnnnnnnnnnnnnnnnnnnnnnnnnnnnnnnnnnnnnnnnnnnnnnnnnnnnnnnnnnnnnnnnnnnnnnnnnnnnnnnnnnnnnnnnnnnnnnnnnnnnnnnnnnnnnnnnnnnnnnnnnnnnnnnnnnnnnnnnnnnnnnnnnnnnnnnnnnnnnnnnnnnnnnnnnnnnnnnnnnnnnnnnnnnnnnnnnnnnnnnnnnnnnnnnnnnnnnnnnnnnnnnnnnnnnnnnnnnnnnnnnnnnnnnnnnnnnnnnnnnnnnnnnnnnnnnnnnnnnnnnnnnnnnnnnnnnnnnnnnnnnnnnnnnnnnnnnnnnnnnnnnnnnnnnnnnnnnnnnnnnnnnnnnnnnnnnnnnnnnnnnnnnnnnnnnnnnnnnnnnnnnnnnnnnnnnnnnnnnnnnnnnnnnnnnnnnnnnnnnnnnnnnnnnnnnnnnnnnnnnnnnnnnnnnnnnnnnnnnnnnnnnnnnnnnnnnnnnnnnnnnnnnnnnnnnnnnnnnnnnnnnnnnnnnnnnnnnnnnnnnnnnnnnnnnnnnnnnnnnnnnnnnnnnnnnnnnnnnnnnnnnnnnnnnnnnnnnnnnnnnnnnnnnnnnnnnnnnnnnnnnnnnnnnnnnnnnnnnnnnnnnnnnnnnnnnnnnnnnnnnnnnnnnnnnnnnnnnnnnnnnnnnnnnnnnnnnnnnnnnnnnnnnnnnnnnnnnnnnnnnnnnnnnnnnnnnnnnnnnnnnnnnnnnnnnnnnnnnnnnnnnnnnnnnnnnnnnnnnnnnnnnnnnnnnnnnnnnnnnnnnnnnnnnnnnnnnnnnnnnnnnnnnnnnnnnnnnnnnnnnnnnnnnnnnnnnnnnnnnnnnnnnnnnnnnnnnnnnnnnnnnnnnnnnnnnnnnnnnnnnnnnnnnnnnnnnnnnnnnnnnnnnnnnnnnnnnnnnnnnnnnnnnnnnnnnnnnnnnnnnnnnnnnnnnnnnnnnnnnnnnnnnnnnnnnnnnnnnnnnnnnnnnnnnnnnnnnnnnnnnnnnnnnnnnnnnnnnnnnnnnnnnnnnnnnnnnnnnnnnnnnnnnnnnnnnnnnnnnnnnnnnnnnnnnnnnnnnnnnnnnnnnnnnnnnnnnnnnnnnnnnnnnnnnnnnnnnnnnnnnnnnnnnnnnnnnnnnnnnnnnnnnnnnnnnnnnnnnnnnnnnnnnnnnnnnnnnnnnnnnnnnnnnnnnnnnnnnnnnnnnnnnnnnnnnnnnnnnnnnnnnnnnnnnnnnnnnnnnnnnnnnnnnnnnnnnnnnnnnnnnnnnnnnnnnnnnnnnnnnnnnnnnnnnnnnnnnnnnnnnnnnnnnnnnnnnnnnnnnnnnnnnnnnnnnnnnnnnnnnnnnnnnnnnnnnnnnnnnnnnnnnnnnnnnnnnnnnnnnnnnnnnnnnnnnnnnnnnnnnnnnnnnnnnnnnnnnnnnnnnnnnnnnnnnnnnnnnnnnnnnnnnnnnnnnnnnnnnnnnnnnnnnnnnnnnnnnnnnnnnnnnnnnnnnnnnnnnnnnnnnnnnnnnnnnnnnnnnnnnnnnnnnnnnnnnnnnnnnnnnnnnnnnnnnnnnnnnnnnnnnnnnnnnnnnnnnnnnnnnnnnnnnnnnnnnnnnnnnnnnnnnnnnnnnnnnnnnnnnnnnnnnnnnnnnnnnnnnnnnnnnnnnnnnnnnnnnnnnnnnnnnnnnnnnnnnnnnnnnnnnnnnnnnnnnnnnnnnnnnnnnnnnnnnnnnnnnnnnnnnnnnnnnnnnnnnnnnnnnnnnnnnnnnnnnnnnnnnnnnnnnnnnnnnnnnnnnnnnnnnnnnnnnnnnnnnnnnnnnnnnnnnnnnnnnnnnnnnnnnnnnnnnnnnnnnnnnnnnnnnnnnnnnnnnnnnnnnnnnnnnnnnnnnnnnnnnnnnnnnnnnnnnnnnnnnnnnnnnnnnnnnnnnnnnnnnnnnnnnnnnnnnnnnnnnnnnnnnnnnnnnnnnnnnnnnnnnnnnnnnnnnnnnnnnnnnnnnnnnnnnnnnnnnnnnnnnnnnnnnnnnnnnnnnnnnnnnnnnnnnnnnnnnnnnnnnnnnnnnnnnnnnnnnnnnnnnnnnnnnnnnnnnnnnnnnnnnnnnnnnnnnnnnnnnnnnnnnnnnnnnnnnnnnnnnnnnnnnnnnnnnnnnnnnnnnnnnnnnnnnnnnnnnnnnnnnnnnnnnnnnnnnnnnnnnnnnnnnnnnnnnnnnnnnnnnnnnnnnnnnnnnnnnnnnnnnnnnnnnnnnnnnnnnnnnnnnnnnnnnnnnnnnnnnnnnnnnnnnnnnnnnnnnnnnnnnnnnnnnnnnnnnnnnnnnnnnnnnnnnnnnnnnnnnnnnnnnnnnnnnnnnnnnnnnnnnnnnnnnnnnnnnnnnnnnnnnnnnnnnnnnnnnnnnnnnnnnnnnnnnnnnnnnnnnnnnnnnnnnnnnnnnnnnnnnnnnnnnnnnnnnnnnnnnnnnnnnnnnnnnnnnnnnnnnnnnnnnnnnnnnnnnnnnnnnnnnnnnnnnnnnnnnnnnnnnnnnnnnnnnnnnnnnnnnnnnnnnnnnnnnnnnnnnnnnnnnnnnnnnnnnnnnnnnnnnnnnnnnnnnnnnnnnnnnnnnnnnnnnnnnnnnnnnnnnnnnnnnnnnnnnnnnnnnnnnnnnnnnnnnnnnnnnnnnnnnnnnnnnnnnnnnnnnnnnnnnnnnnnnnnnnnnnnnnnnnnnnnnnnnnnnnnnnnnnnnnnnnnnnnnnnnnnnnnnnnnnnnnnnnnnnnnnnnnnnnnnnnnnnnnnnnnnnnnnnnnnnnnnnnnnnnnnnnnnnnnnnnnnnnnnnnnnnnnnnnnnnnnnnnnnnnnnnnnnnnnnnnnnnnnnnnnnnnnnnnnnnnnnnnnnnnnnnnnnnnnnnnnnnnnnnnnnnnnnnnnnnnnnnnnnnnnnnnnnnnnnnnnnnnnnnnnnnnnnnnnnnnnnnnnnnnnnnnnnnnnnnnnnnnnnnnnnnnnnnnnnnnnnnnnnnnnnnnnnnnnnnnnnnnnnnnnnnnnnnnnnnnnnnnnnnnnnnnnnnnnnnnnnnnnnnnnnnnnnnnnnnnnnnnnnnnnnnnnnnnnnnnnnnnnnnnnnnnnnnnnnnnnnnnnnnnnnnnnnnnnnnnnnnnnnnnnnnnnnnnnnnnnnnnnnnnnnnnnnnnnnnnnnnnnnnnnnnnnnnnnnnnnnnnnnnnnnnnnnnnnnnnnnnnnnnnnnnnnnnnnnnnnnnnnnnnnnnnnnnnnnnnnnnnnnnnnnnnnnnnnnnnnnnnnnnnnnnnnnnnnnnnnnnnnnnnnnnnnnnnnnnnnnnnnnnnnnnnnnnnnnnnnnnnnnnnnnnnnnnnnnnnnnnnnnnnnnnnnnnnnnnnnnnnnnnnnnnnnnnnnnnnnnnnnnnnnnnnnnnnnnnnnnnnnnnnnnnnnnnnnnnnnnnnnnnnnnnnnnnnnnnnnnnnnnnnnnnnnnnnnnnnnnnnnnnnnnnnnnnnnnnnnnnnnnnnnnnnnnnnnnnnnnnnnnnnnnnnnnnnnnnnnnnnnnnnnnnnnnnnnnnnnnnnnnnnnnnnnnnnnnnnnnnnnnnnnnnnnnnnnnnnnnnnnnnnnnnnnnnnnnnnnnnnnnnnnnnnnnnnnnnnnnnnnnnnnnnnnnnnnnnnnnnnnnnnnnnnnnnnnnnnnnnnnnnnnnnnnnnnnnnnnnnnnnnnnnnnnnnnnnnnnnnnnnnnnnnnnnnnnnnnnnnnnnnnnnnnnnnnnnnnnnnnnnnnnnnnnnnnnnnnnnnnnnnnnnnnnnnnnnnnnnnnnnnnnnnnnnnnnnnnnnnnnnnnnnnnnnnnnnnnnnnnnnnnnnnnnnnnnnnnnnnnnnnnnnnnnnnnnnnnnnnnnnnnnnnnnnnnnnnnnnnnnnnnnnnnnnnnnnnnnnnnnnnnnnnnnnnnnnnnnnnnnnnnnnnnnnnnnnnnnnnnnnnnnnnnnnnnnnnnnnnnnnnnnnnnnnnnnnnnnnnnnnnnnnnnnnnnnnnnnnnnnnnnnnnnnnnnnnnnnnnnnnnnnnnnnnnnnnnnnnnnnnnnnnnnnnnnnnnnnnnnnnnnnnnnnnnnnnnnnnnnnnnnnnnnnnnnnnnnnnnnnnnnnnnnnnnnnnnnnnnnnnnnnnnnnnnnnnnnnnnnnnnnnnnnnnnnnnnnnnnnnnnnnnnnnnnnnnnnnnnnnnnnnnnnnnnnnnnnnnnnnnnnnnnnnnnnnnnnnnnnnnnnnnnnnnnnnnnnnnnnnnnnnnnnnnnnnnnnnnnnnnnnnnnnnnnnnnnnnnnnnnnnnnnnnnnnnnnnnnnnnnnnnnnnnnnnnnnnnnnnnnnnnnnnnnnnnnnnnnnnnnnnnnnnnnnnnnnnnnnnnnnnnnnnnnnnnnnnnnnnnnnnnnnnnnnnnnnnnnnnnnnnnnnnnnnnnnnnnnnnnnnnnnnnnnnnnnnnnnnnnnnnnnnnnnnnnnnnnnnnnnnnnnnnnnnnnnnnnnnnnnnnnnnnnnnnnnnnnnnnnnnnnnnnnnnnnnnnnnnnnnnnnnnnnnnnnnnnnnnnnnnnnnnnnnnnnnnnnnnnnnnnnnnnnnnnnnnnnnnnnnnnnnnnnnnnnnnnnnnnnnnnnnnnnnnnnnnnnnnnnnnnnnnnnnnnnnnnnnnnnnnnnnnnnnnnnnnnnnnnnnnnnnnnnnnnnnnnnnnnnnnnnnnnnnnnnnnnnnnnnnnnnnnnnnnnnnnnnnnnnnnnnnnnnnnnnnnnnnnnnnnnnnnnnnnnnnnnnnnnnnnnnnnnnnnnnnnnnnnnnnnnnnnnnnnnnnnnnnnnnnnnnnnnnnnnnnnnnnnnnnnnnnnnnnnnnnnnnnnnnnnnnnnnnnnnnnnnnnnnnnnnnnnnnnnnnnnnnnnnnnnnnnnnnnnnnnnnnnnnnnnnnnnnnnnnnnnnnnnnnnnnnnnnnnnnnnnnnnnnnnnnnnnnnnnnnnnnnnnnnnnnnnnnnnnnnnnnnnnnnnnnnnnnnnnnnnnnnnnnnnnnnnnnnnnnnnnnnnnnnnnnnnnnnnnnnnnnnnnnnnnnnnnnnnnnnnnnnnnnnnnnnnnnnnnnnnnnnnnnnnnnnnnnnnnnnnnnnnnnnnnnnnnnnnnnnnnnnnnnnnnnnnnnnnnnnnnnnnnnnnnnnnnnnnnnnnnnnnnnnnnnnnnnnnnnnnnnnnnnnnnnnnnnnnnnnnnnnnnnnnnnnnnnnnnnnnnnnnnnnnnnnnnnnnnnnnnnnnnnnnnnnnnnnnnnnnnnnnnnnnnnnnnnnnnnnnnnnnnnnnnnnnnnnnnnnnnnnnnnnnnnnnnnnnnnnnnnnnnnnnnnnnnnnnnnnnnnnnnnnnnnnnnnnnnnnnnnnnnnnnnnnnnnnnnnnnnnnnnnnnnnnnnnnnnnnnnnnnnnnnnnnnnnnnnnnnnnnnnnnnnnnnnnnnnnnnnnnnnnnnnnnnnnnnnnnnnnnnnnnnnnnnnnnnnnnnnnnnnnnnnnnnnnnnnnnnnnnnnnnnnnnnnnnnnnnnnnnnnnnnnnnnnnnnnnnnnnnnnnnnnnnnnnnnnnnnnnnnnnnnnnnnnnnnnnnnnnnnnnnnnnnnnnnnnnnnnnnnnnnnnnnnnnnnnnnnnnnnnnnnnnnnnnnnnnnnnnnnnnnnnnnnnnnnnnnnnnnnnnnnnnnnnnnnnnnnnnnnnnnnnnnnnnnnnnnnnnnnnnnnnnnnnnnnnnnnnnnnnnnnnnnnnnnnnnnnnnnnnnnnnnnnnnnnnnnnnnnnnnnnnnnnnnnnnnnnnnnnnnnnnnnnnnnnnnnnnnnnnnnnnnnnnnnnnnnnnnnnnnnnnnnnnnnnnnnnnnnnnnnnnnnnnnnnnnnnnnnnnnnnnnnnnnnnnnnnnnnnnnnnnnnnnnnnnnnnnnnnnnnnnnnnnnnnnnnnnnnnnnnnnnnnnnnnnnnnnnnnnnnnnnnnnnnnnnnnnnnnnnnnnnnnnnnnnnnnnnnnnnnnnnnnnnnnnnnnnnnnnnnnnnnnnnnnnnnnnnnnnnnnnnnnnnnnnnnnnnnnnnnnnnnnnnnnnnnnnnnnnnnnnnnnnnnnnnnnnnnnnnnnnnnnnnnnnnnnnnnnnnnnnnnnnnnnnnnnnnnnnnnnnnnnnnnnnnnnnnnnnnnnnnnnnnnnnnnnnnnnnnnnnnnnnnnnnnnnnnnnnnnnnnnnnnnnnnnnnnnnnnnnnnnnnnnnnnnnnnnnnnnnnnnnnnnnnnnnnnnnnnnnnnnnnnnnnnnnnnnnnnnnnnnnnnnnnnnnnnnnnnnnnnnnnnnnnnnnnnnnnnnnnnnnnnnnnnnnnnnnnnnnnnnnnnnnnnnnnnnnnnnnnnnnnnnnnnnnnnnnnnnnnnnnnnnnnnnnnnnnnnnnnnnnnnnnnnnnnnnnnnnnnnnnnnnnnnnnnnnnnnnnnnnnnnnnnnnnnnnnnnnnnnnnnnnnnnnnnnnnnnnnnnnnnnnnnnnnnnnnnnnnnnnnnnnnnnnnnnnnnnnnnnnnnnnnnnnnnnnnnnnnnnnnnnnnnnnnnnnnnnnnnnnnnnnnnnnnnnnnnnnnnnnnnnnnnnnnnnnnnnnnnnnnnnnnnnnnnnnnnnnnnnnnnnnnnnnnnnnnnnnnnnnnnnnnnnnnnnnnnnnnnnnnnnnnnnnnnnnnnnnnnnnnnnnnnnnnnnnnnnnnnnnnnnnnnnnnnnnnnnnnnnnnnnnnnnnnnnnnnnnnnnnnnnnnnnnnnnnnnnnnnnnnnnnnnnnnnnnnnnnnnnnnnnnnnnnnnnnnnnnnnnnnnnnnnnnnnnnnnnnnnnnnnnnnnnnnnnnnnnnnnnnnnnnnnnnnnnnnnnnnnnnnnnnnnnnnnnnnnnnnnnnnnnnnnnnnnnnnnnnnnnnnnnnnnnnnnnnnnnnnnnnnnnnnnnnnnnnnnnnnnnnnnnnnnnnnnnnnnnnnnnnnnnnnnnnnnnnnnnnnnnnnnnnnnnnnnnnnnnnnnnnnnnnnnnnnnnnnnnnnnnnnnnnnnnnnnnnnnnnnnnnnnnnnnnnnnnnnnnnnnnnnnnnnnnnnnnnnnnnnnnnnnnnnnnnnnnnnnnnnnnnnnnnnnnnnnnnnnnnnnnnnnnnnnnnnnnnnnnnnnnnnnnnnnnnnnnnnnnnnnnnnnnnnnnnnnnnnnnnnnnnnnnnnnnnnnnnnnnnnnnnnnnnnnnnnnnnnnnnnnnnnnnnnnnnnnnnnnnnnnnnnnnnnnnnnnnnnnnnnnnnnnnnnnnnnnnnnnnnnnnnnnnnnnnnnnnnnnnnnnnnnnnnnnnnnnnnnnnnnnnnnnnnnnnnnnnnnnnnnnnnnnnnnnnnnnnnnnnnnnnnnnnnnnnnnnnnnnnnnnnnnnnnnnnnnnnnnnnnnnnnnnnnnnnnnnnnnnnnnnnnnnnnnnnnnnnnnnnnnnnnnnnnnnnnnnnnnnnnnnnnnnnnnnnnnnnnnnnnnnnnnnnnnnnnnnnnnnnnnnnnnnnnnnnnnnnnnnnnnnnnnnnnnnnnnnnnnnnnnnnnnnnnnnnnnnnnnnnnnnnnnnnnnnnnnnnnnnnnnnnnnnnnnnnnnnnnnnnnnnnnnnnnnnnnnnnnnnnnnnnnnnnnnnnnnnnnnnnnnnnnnnnnnnnnnnnnnnnnnnnnnnnnnnnnnnnnnnnnnnnnnnnnnnnnnnnnnnnnnnnnnnnnnnnnnnnnnnnnnnnnnnnnnnnnnnnnnnnnnnnnnnnnnnnnnnnnnnnnnnnnnnnnnnnnnnnnnnnnnnnnnnnnnnnnnnnnnnnnnnnnnnnnnnnnnnnnnnnnnnnnnnnnnnnnnnnnnnnnnnnnnnnnnnnnnnnnnnnnnnnnnnnnnnnnnnnnnnnnnnnnnnnnnnnnnnnnnnnnnnnnnnnnnnnnnnnnnnnnnnnnnnnnnnnnnnnnnnnnnnnnnnnnnnnnnnnnnnnnnnnnnnnnnnnnnnnnnnnnnnnnnnnnnnnnnnnnnnnnnnnnnnnnnnnnnnnnnnnnnnnnnnnnnnnnnnnnnnnnnnnnnnnnnnnnnnnnnnnnnnnnnnnnnnnnnnnnnnnnnnnnnnnnnnnnnnnnnnnnnnnnnnnnnnnnnnnnnnnnnnnnnnnnnnnnnnnnnnnnnnnnnnnnnnnnnnnnnnnnnnnnnnnnnnnnnnnnnnnnnnnnnnnnnnnnnnnnnnnnnnnnnnnnnnnnnnnnnnnnnnnnnnnnnnnnnnnnnnnnnnnnnnnnnnnnnnnnnnnnnnnnnnnnnnnnnnnnnnnnnnnnnnnnnnnnnnnnnnnnnnnnnnnnnnnnnnnnnnnnnnnnnnnnnnnnnnnnnnnnnnnnnnnnnnnnnnnnnnnnnnnnnnnnnnnnnnnnnnnnnnnnnnnnnnnnnnnnnnnnnnnnnnnnnnnnnnnnnnnnnnnnnnnnnnnnnnnnnnnnnnnnnnnnnnnnnnnnnnnnnnnnnnnnnnnnnnnnnnnnnnnnnnnnnnnnnnnnnnnnnnnnnnnnnnnnnnnnnnnnnnnnnnnnnnnnnnnnnnnnnnnnnnnnnnnnnnnnnnnnnnnnnnnnnnnnnnnnnnnnnnnnnnnnnnnnnnnnnnnnnnnnnnnnnnnnnnnnnnnnnnnnnnnnnnnnnnnnnnnnnnnnnnnnnnnnnnnnnnnnnnnnnnnnnnnnnnnnnnnnnnnnnnnnnnnnnnnnnnnnnnnnnnnnnnnnnnnnnnnnnnnnnnnnnnnnnnnnnnnnnnnnnnnnnnnnnnnnnnnnnnnnnnnnnnnnnnnnnnnnnnnnnnnnnnnnnnnnnnnnnnnnnnnnnnnnnnnnnnnnnnnnnnnnnnnnnnnnnnnnnnnnnnnnnnnnnnnnnnnnnnnnnnnnnnnnnnnnnnnnnnnnnnnnnnnnnnnnnnnnnnnnnnnnnnnnnnnnnnnnnnnnnnnnnnnnnnnnnnnnnnnnnnnnnnnnnnnnnnnnnnnnnnnnnnnnnnnnnnnnnnnnnnnnnnnnnnnnnnnnnnnnnnnnnnnnnnnnnnnnnnnnnnnnnnnnnnnnnnnnnnnnnnnnnnnnnnnnnnnnnnnnnnnnnnnnnnnnnnnnnnnnnnnnnnnnnnnnnnnnnnnnnnnnnnnnnnnnnnnnnnnnnnnnnnnnnnnnnnnnnnnnnnnnnnnnnnnnnnnnnnnnnnnnnnnnnnnnnnnnnnnnnnnnnnnnnnnnnnnnnnnnnnnnnnnnnnnnnnnnnnnnnnnnnnnnnnnnnnnnnnnnnnnnnnnnnnnnnnnnnnnnnnnnnnnnnnnnnnnnnnnnnnnnnnnnnnnnnnnnnnnnnnnnnnnnnnnnnnnnnnnnnnnnnnnnnnnnnnnnnnnnnnnnnnnnnnnnnnnnnnnnnnnnnnnnnnnnnnnnnnnnnnnnnnnnnnnnnnnnnnnnnnnnnnnnnnnnnnnnnnnnnnnnnnnnnnnnnnnnnnnnnnnnnnnnnnnnnnnnnnnnnnnnnnnnnnnnnnnnnnnnnnnnnnnnnnnnnnnnnnnnnnnnnnnnnnnnnnnnnnnnnnnnnnnnnnnnnnnnnnnnnnnnnnnnnnnnnnnnnnnnnnnnnnnnnnnnnnnnnnnnnnnnnnnnnnnnnnnnnnnnnnnnnnnnnnnnnnnnnnnnnnnnnnnnnnnnnnnnnnnnnnnnnnnnnnnnnnnnnnnnnnnnnnnnnnnnnnnnnnnnnnnnnnnnnnnnnnnnnnnnnnnnnnnnnnnnnnnnnnnnnnnnnnnnnnnnnnnnnnnnnnnnnnnnnnnnnnnnnnnnnnnnnnnnnnnnnnnnnnnnnnnnnnnnnnnnnnnnnnnnnnnnnnnnnnnnnnnnnnnnnnnnnnnnnnnnnnnnnnnnnnnnnnnnnnnnnnnnnnnnnnnnnnnnnnnnnnnnnnnnnnnnnnnnnnnnnnnnnnnnnnnnnnnnnnnnnnnnnnnnnnnnnnnnnnnnnnnnnnnnnnnnnnnnnnnnnnnnnnnnnnnnnnnnnnnnnnnnnnnnnnnnnnnnnnnnnnnnnnnnnnnnnnnnnnnnnnnnnnnnnnnnnnnnnnnnnnnnnnnnnnnnnnnnnnnnnnnnnnnnnnnnnnnnnnnnnnnnnnnnnnnnnnnnnnnnnnnnnnnnnnnnnnnnnnnnnnnnnnnnnnnnnnnnnnnnnnnnnnnnnnnnnnnnnnnnnnnnnnnnnnnnnnnnnnnnnnnnnnnnnnnnnnnnnnnnnnnnnnnnnnnnnnnnnnnnnnnnnnnnnnnnnnnnnnnnnnnnnnnnnnnnnnnnnnnnnnnnnnnnnnnnnnnnnnnnnnnnnnnnnnnnnnnnnnnnnnnnnnnnnnnnnnnnnnnnnnnnnnnnnnnnnnnnnnnnnnnnnnnnnnnnnnnnnnnnnnnnnnnnnnnnnnnnnnnnnnnnnnnnnnnnnnnnnnnnnnnnnnnnnnnnnnnnnnnnnnnnnnnnnnnnnnnnnnnnnnnnnnnnnnnnnnnnnnnnnnnnnnnnnnnnnnnnnnnnnnnnnnnnnnnnnnnnnnnnnnnnnnnnnnnnnnnnnnnnnnnnnnnnnnnnnnnnnnnnnnnnnnnnnnnnnnnnnnnnnnnnnnnnnnnnnnnnnnnnnnnnnnnnnnnnnnnnnnnnnnnnnnnnnnnnnnnnnnnnnnnnnnnnnnnnnnnnnnnnnnnnnnnnnnnnnnnnnnnnnnnnnnnnnnnnnnnnnnnnnnnnnnnnnnnnnnnnnnnnnnnnnnnnnnnnnnnnnnnnnnnnnnnnnnnnnnnnnnnnnnnnnnnnnnnnnnnnnnnnnnnnnnnnnnnnnnnnnnnnnnnnnnnnnnnnnnnnnnnnnnnnnnnnnnnnnnnnnnnnnnnnnnnnnnnnnnnnnnnnnnnnnnnnnnnnnnnnnnnnnnnnnnnnnnnnnnnnnnnnnnnnnnnnnnnnnnnnnnnnnnnnnnnnnnnnnnnnnnnnnnnnnnnnnnnnnnnnnnnnnnnnnnnnnnnnnnnnnnnnnnnnnnnnnnnnnnnnnnnnnnnnnnnnnnnnnnnnnnnnnnnnnnnnnnnnnnnnnnnnnnnnnnnnnnnnnnnnnnnnnnnnnnnnnnnnnnnnnnnnnnnnnnnnnnnnnnnnnnnnnnnnnnnnnnnnnnnnnnnnnnnnnnnnnnnnnnnnnnnnnnnnnnnnnnnnnnnnnnnnnnnnnnnnnnnnnnnnnnnnnnnnnnnnnnnnnnnnnnnnnnnnnnnnnnnnnnnnnnnnnnnnnnnnnnnnnnnnnnnnnnnnnnnnnnnnnnnnnnnnnnnnnnnnnnnnnnnnnnnnnnnnnnnnnnnnnnnnnnnnnnnnnnnnnnnnnnnnnnnnnnnnnnnnnnnnnnnnnnnnnnnnnnnnnnnnnnnnnnnnnnnnnnnnnnnnnnnnnnnnnnnnnnnnnnnnnnnnnnnnnnnnnnnnnnnnnnnnnnnnnnnnnnnnnnnnnnnnnnnnnnnnnnnnnnnnnnnnnnnnnnnnnnnnnnnnnnnnnnnnnnnnnnnnnnnnnnnnnnnnnnnnnnnnnnnnnnnnnnnnnnnnnnnnnnnnnnnnnnnnnnnnnnnnnnnnnnnnnnnnnnnnnnnnnnnnnnnnnnnnnnnnnnnnnnnnnnnnnnnnnnnnnnnnnnnnnnnnnnnnnnnnnnnnnnnnnnnnnnnnnnnnnnnnnnnnnnnnnnnnnnnnnnnnnnnnnnnnnnnnnnnnnnnnnnnnnnnnnnnnnnnnnnnnnnnnnnnnnnnnnnnnnnnnnnnnnnnnnnnnnnnnnnnnnnnnnnnnnnnnnnnnnnnnnnnnnnnnnnnnnnnnnnnnnnnnnnnnnnnnnnnnnnnnnnnnnnnnnnnnnnnnnnnnnnnnnnnnnnnnnnnnnnnnnnnnnnnnnnnnnnnnnnnnnnnnnnnnnnnnnnnnnnnnnnnnnnnnnnnnnnnnnnnnnnnnnnnnnnnnnnnnnnnnnnnnnnnnnnnnnnnnnnnnnnnnnnnnnnnnnnnnnnnnnnnnnnnnnnnnnnnnnnnnnnnnnnnnnnnnnnnnnnnnnnnnnnnnnnnnnnnnnnnnnnnnnnnnnnnnnnnnnnnnnnnnnnnnnnnnnnnnnnnnnnnnnnnnnnnnnnnnnnnnnnnnnnnnnnnnnnnnnnnnnnnnnnnnnnnnnnnnnnnnnnnnnnnnnnnnnnnnnnnnnnnnnnnnnnnnnnnnnnnnnnnnnnnnnnnnnnnnnnnnnnnnnnnnnnnnnnnnnnnnnnnnnnnnnnnnnnnnnnnnnnnnnnnnnnnnnnnnnnnnnnnnnnnnnnnnnnnnnnnnnnnnnnnnnnnnnnnnnnnnnnnnnnnnnnnnnnnnnnnnnnnnnnnnnnnnnnnnnnnnnnnnnnnnnnnnnnnnnnnnnnnnnnnnnnnnnnnnnnnnnnnnnnnnnnnnnnnnnnnnnnnnnnnnnnnnnnnnnnnnnnnnnnnnnnnnnnnnnnnnnnnnnnnnnnnnnnnnnnnnnnnnnnnnnnnnnnnnnnnnnnnnnnnnnnnnnnnnnnnnnnnnnnnnnnnnnnnnnnnnnnnnnnnnnnnnnnnnnnnnnnnnnnnnnnnnnnnnnnnnnnnnnnnnnnnnnnnnnnnnnnnnnnnnnnnnnnnnnnnnnnnnnnnnnnnnnnnnnnnnnnnnnnnnnnnnnnnnnnnnnnnnnnnnnnnnnnnnnnnnnnnnnnnnnnnnnnnnnnnnnnnnnnnnnnnnnnnnnnnnnnnnnnnnnnnnnnnnnnnnnnnnnnnnnnnnnnnnnnnnnnnnnnnnnnnnnnnnnnnnnnnnnnnnnnnnnnnnnnnnnnnnnnnnnnnnnnnnnnnnnnnnnnnnnnnnnnnnnnnnnnnnnnnnnnnnnnnnnnnnnnnnnnnnnnnnnnnnnnnnnnnnnnnnnnnnnnnnnnnnnnnnnnnnnnnnnnnnnnnnnnnnnnnnnnnnnnnnnnnnnnnnnnnnnnnnnnnnnnnnnnnnnnnnnnnnnnnnnnnnnnnnnnnnnnnnnnnnnnnnnnnnnnnnnnnnnnnnnnnnnnnnnnnnnnnnnnnnnnnnnnnnnnnnnnnnnnnnnnnnnnnnnnnnnnnnnnnnnnnnnnnnnnnnnnnnnnnnnnnnnnnnnnnnnnnnnnnnnnnnnnnnnnnnnnnnnnnnnnnnnnnnnnnnnnnnnnnnnnnnnnnnnnnnnnnnnnnnnnnnnnnnnnnnnnnnnnnnnnnnnnnnnnnnnnnnnnnnnnnnnnnnnnnnnnnnnnnnnnnnnnnnnnnnnnnnnnnnnnnnnnnnnnnnnnnnnnnnnnnnnnnnnnnnnnnnnnnnnnnnnnnnnnnnnnnnnnnnnnnnnnnnnnnnnnnnnnnnnnnnnnnnnnnnnnnnnnnnnnnnnnnnnnnnnnnnnnnnnnnnnnnnnnnnnnnnnnnnnnnnnnnnnnnnnnnnnnnnnnnnnnnnnnnnnnnnnnnnnnnnnnnnnnnnnnnnnnnnnnnnnnnnnnnnnnnnnnnnnnnnnnnnnnnnnnnnnnnnnnnnnnnnnnnnnnnnnnnnnnnnnnnnnnnnnnnnnnnnnnnnnnnnnnnnnnnnnnnnnnnnnnnnnnnnnnnnnnnnnnnnnnnnnnnnnnnnnnnnnnnnnnnnnnnnnnnnnnnnnnnnnnnnnnnnnnnnnnnnnnnnnnnnnnnnnnnnnnnnnnnnnnnnnnnnnnnnnnnnnnnnnnnnnnnnnnnnnnnnnnnnnnnnnnnnnnnnnnnnnnnnnnnnnnnnnnnnnnnnnnnnnnnnnnnnnnnnnnnnnnnnnnnnnnnnnnnnnnnnnnnnnnnnnnnnnnnnnnnnnnnnnnnnnnnnnnnnnnnnnnnnnnnnnnnnnnnnnnnnnnnnnnnnnnnnnnnnnnnnnnnnnnnnnnnnnnnnnnnnnnnnnnnnnnnnnnnnnnnnnnnnnnnnnnnnnnnnnnnnnnnnnnnnnnnnnnnnnnnnnnnnnnnnnnnnnnnnnnnnnnnnnnnnnnnnnnnnnnnnnnnnnnnnnnnnnnnnnnnnnnnnnnnnnnnnnnnnnnnnnnnnnnnnnnnnnnnnnnnnnnnnnnnnnnnnnnnnnnnnnnnnnnnnnnnnnnnnnnnnnnnnnnnnnnnnnnnnnnnnnnnnnnnnnnnnnnnnnnnnnnnnnnnnnnnnnnnnnnnnnnnnnnnnnnnnnnnnnnnnnnnnnnnnnnnnnnnnnnnnnnnnnnnnnnnnnnnnnnnnnnnnnnnnnnnnnnnnnnnnnnnnnnnnnnnnnnnnnnnnnnnnnnnnnnnnnnnnnnnnnnnnnnnnnnnnnnnnnnnnnnnnnnnnnnnnnnnnnnnnnnnnnnnnnnnnnnnnnnnnnnnnnnnnnnnnnnnnnnnnnnnnnnnnnnnnnnnnnnnnnnnnnnnnnnnnnnnnnnnnnnnnnnnnnnnnnnnnnnnnnnnnnnnnnnnnnnnnnnnnnnnnnnnnnnnnnnnnnnnnnnnnnnnnnnnnnnnnnnnnnnnnnnnnnnnnnnnnnnnnnnnnnnnnnnnnnnnnnnnnnnnnnnnnnnnnnnnnnnnnnnnnnnnnnnnnnnnnnnnnnnnnnnnnnnnnnnnnnnnnnnnnnnnnnnnnnnnnnnnnnnnnnnnnnnnnnnnnnnnnnnnnnnnnnnnnnnnnnnnnnnnnnnnnnnnnnnnnnnnnnnnnnnnnnnnnnnnnnnnnnnnnnnnnnnnnnnnnnnnnnnnnnnnnnnnnnnnnnnnnnnnnnnnnnnnnnnnnnnnnnnnnnnnnnnnnnnnnnnnnnnnnnnnnnnnnnnnnnnnnnnnnnnnnnnnnnnnnnnnnnnnnnnnnnnnnnnnnnnnnnnnnnnnnnnnnnnnnnnnnnnnnnnnnnnnnnnnnnnnnnnnnnnnnnnnnnnnnnnnnnnnnnnnnnnnnnnnnnnnnnnnnnnnnnnnnnnnnnnnnnnnnnnnnnnnnnnnnnnnnnnnnnnnnnnnnnnnnnnnnnnnnnnnnnnnnnnnnnnnnnnnnnnnnnnnnnnnnnnnnnnnnnnnnnnnnnnnnnnnnnnnnnnnnnnnnnnnnnnnnnnnnnnnnnnnnnnnnnnnnnnnnnnnnnnnnnnnnnnnnnnnnnnnnnnnnnnnnnnnnnnnnnnnnnnnnnnnnnnnnnnnnnnnnnnnnnnnnnnnnnnnnnnnnnnnnnnnnnnnnnnnnnnnnnnnnnnnnnnnnnnnnnnnnnnnnnnnnnnnnnnnnnnnnnnnnnnnnnnnnnnnnnnnnnnnnnnnnnnnnnnnnnnnnnnnnnnnnnnnnnnnnnnnnnnnnnnnnnnnnnnnnnnnnnnnnnnnnnnnnnnnnnnnnnnnnnnnnnnnnnnnnnnnnnnnnnnnnnnnnnnnnnnnnnnnnnnnnnnnnnnnnnnnnnnnnnnnnnnnnnnnnnnnnnnnnnnnnnnnnnnnnnnnnnnnnnnnnnnnnnnnnnnnnnnnnnnnnnnnnnnnnnnnnnnnnnnnnnnnnnnnnnnnnnnnnnnnnnnnnnnnnnnnnnnnnnnnnnnnnnnnnnnnnnnnnnnnnnnnnnnnnnnnnnnnnnnnnnnnnnnnnnnnnnnnnnnnnnnnnnnnnnnnnnnnnnnnnnnnnnnnnnnnnnnnnnnnnnnnnnnnnnnnnnnnnnnnnnnnnnnnnnnnnnnnnnnnnnnnnnnnnnnnnnnnnnnnnnnnnnnnnnnnnnnnnnnnnnnnnnnnnnnnnnnnnnnnnnnnnnnnnnnnnnnnnnnnnnnnnnnnnnnnnnnnnnnnnnnnnnnnnnnnnnnnnnnnnnnnnnnnnnnnnnnnnnnnnnnnnnnnnnnnnnnnnnnnnnnnnnnnnnnnnnnnnnnnnnnnnnnnnnnnnnnnnnnnnnnnnnnnnnnnnnnnnnnnnnnnnnnnnnnnnnnnnnnnnnnnnnnnnnnnnnnnnnnnnnnnnnnnnnnnnnnnnnnnnnnnnnnnnnnnnnnnnnnnnnnnnnnnnnnnnnnnnnnnnnnnnnnnnnnnnnnnnnnnnnnnnnnnnnnnnnnnnnnnnnnnnnnnnnnnnnnnnnnnnnnnnnnnnnnnnnnnnnnnnnnnnnnnnnnnnnnnnnnnnnnnnnnnnnnnnnnnnnnnnnnnnnnnnnnnnnnnnnnnnnnnnnnnnnnnnnnnnnnnnnnnnnnnnnnnnnnnnnnnnnnnnnnnnnnnnnnnnnnnnnnnnnnnnnnnnnnnnnnnnnnnnnnnnnnnnnnnnnnnnnnnnnnnnnnnnnnnnnnnnnnnnnnnnnnnnnnnnnnnnnnnnnnnnnnnnnnnnnnnnnnnnnnnnnnnnnnnnnnnnnnnnnnnnnnnnnnnnnnnnnnnnnnnnnnnnnnnnnnnnnnnnnnnnnnnnnnnnnnnnnnnnnnnnnnnnnnnnnnnnnnnnnnnnnnnnnnnnnnnnnnnnnnnnnnnnnnnnnnnnnnnnnnnnnnnnnnnnnnnnnnnnnnnnnnnnnnnnnnnnnnnnnnnnnnnnnnnnnnnnnnnnnnnnnnnnnnnnnnnnnnnnnnnnnnnnnnnnnnnnnnnnnnnnnnnnnnnnnnnnnnnnnnnnnnnnnnnnnnnnnnnnnnnnnnnnnnnnnnnnnnnnnnnnnnnnnnnnnnnnnnnnnnnnnnnnnnnnnnnnnnnnnnnnnnnnnnnnnnnnnnnnnnnnnnnnnnnnnnnnnnnnnnnnnnnnnnnnnnnnnnnnnnnnnnnnnnnnnnnnnnnnnnnnnnnnnnnnnnnnnnnnnnnnnnnnnnnnnnnnnnnnnnnnnnnnnnnnnnnnnnnnnnnnnnnnnnnnnnnnnnnnnnnnnnnnnnnnnnnnnnnnnnnnnnnnnnnnnnnnnnnnnnnnnnnnnnnnnnnnnnnnnnnnnnnnnnnnnnnnnnnnnnnnnnnnnnnnnnnnnnnnnnnnnnnnnnnnnnnnnnnnnnnnnnnnnnnnnnnnnnnnnnnnnnnnnnnnnnnnnnnnnnnnnnnnnnnnnnnnnnnnnnnnnnnnnnnnnnnnnnnnnnnnnnnnnnnnnnnnnnnnnnnnnnnnnnnnnnnnnnnnnnnnnnnnnnnnnnnnnnnnnnnnnnnnnnnnnnnnnnnnnnnnnnnnnnnnnnnnnnnnnnnnnnnnnnnnnnnnnnnnnnnnnnnnnnnnnnnnnnnnnnnnnnnnnnnnnnnnnnnnnnnnnnnnnnnnnnnnnnnnnnnnnnnnnnnnnnnnnnnnnnnnnnnnnnnnnnnnnnnnnnnnnnnnnnnnnnnnnnnnnnnnnnnnnnnnnnnnnnnnnnnnnnnnnnnnnnnnnnnnnnnnnnnnnnnnnnnnnnnnnnnnnnnnnnnnnnnnnnnnnnnnnnnnnnnnnnnnnnnnnnnnnnnnnnnnnnnnnnnnnnnnnnnnnnnnnnnnnnnnnnnnnnnnnnnnnnnnnnnnnnnnnnnnnnnnnnnnnnnnnnnnnnnnnnnnnnnnnnnnnnnnnnnnnnnnnnnnnnnnnnnnnnnnnnnnnnnnnnnnnnnnnnnnnnnnnnnnnnnnnnnnnnnnnnnnnnnnnnnnnnnnnnnnnnnnnnnnnnnnnnnnnnnnnnnnnnnnnnnnnnnnnnnnnnnnnnnnnnnnnnnnnnnnnnnnnnnnnnnnnnnnnnnnnnnnnnnnnnnnnnnnnnnnnnnnnnnnnnnnnnnnnnnnnnnnnnnnnnnnnnnnnnnnnnnnnnnnnnnnnnnnnnnnnnnnnnnnnnnnnnnnnnnnnnnnnnnnnnnnnnnnnnnnnnnnnnnnnnnnnnnnnnnnnnnnnnnnnnnnnnnnnnnnnnnnnnnnnnnnnnnnnnnnnnnnnnnnnnnnnnnnnnnnnnnnnnnnnnnnnnnnnnnnnnnnnnnnnnnnnnnnnnnnnnnnnnnnnnnnnnnnnnnnnnnnnnnnnnnnnnnnnnnnnnnnnnnnnnnnnnnnnnnnnnnnnnnnnnnnnnnnnnnnnnnnnnnnnnnnnnnnnnnnnnnnnnnnnnnnnnnnnnnnnnnnnnnnnnnnnnnnnnnnnnnnnnnnnnnnnnnnnnnnnnnnnnnnnnnnnnnnnnnnnnnnnnnnnnnnnnnnnnnnnnnnnnnnnnnnnnnnnnnnnnnnnnnnnnnnnnnnnnnnnnnnnnnnnnnnnnnnnnnnnnnnnnnnnnnnnnnnnnnnnnnnnnnnnnnnnnnnnnnnnnnnnnnnnnnnnnnnnnnnnnnnnnnnnnnnnnnnnnnnnnnnnnnnnnnnnnnnnnnnnnnnnnnnnnnnnnnnnnnnnnnnnnnnnnnnnnnnnnnnnnnnnnnnnnnnnnnnnnnnnnnnnnnnnnnnnnnnnnnnnnnnnnnnnnnnnnnnnnnnnnnnnnnnnnnnnnnnnnnnnnnnnnnnnnnnnnnnnnnnnnnnnnnnnnnnnnnnnnnnnnnnnnnnnnnnnnnnnnnnnnnnnnnnnnnnnnnnnnnnnnnnnnnnnnnnnnnnnnnnnnnnnnnnnnnnnnnnnnnnnnnnnnnnnnnnnnnnnnnnnnnnnnnnnnnnnnnnnnnnnnnnnnnnnnnnnnnnnnnnnnnnnnnnnnnnnnnnnnnnnnnnnnnnnnnnnnnnnnnnnnnnnnnnnnnnnnnnnnnnnnnnnnnnnnnnnnnnnnnnnnnnnnnnnnnnnnnnnnnnnnnnnnnnnnnnnnnnnnnnnnnnnnnnnnnnnnnnnnnnnnnnnnnnnnnnnnnnnnnnnnnnnnnnnnnnnnnnnnnnnnnnnnnnnnnnnnnnnnnnnnnnnnnnnnnnnnnnnnnnnnnnnnnnnnnnnnnnnnnnnnnnnnnnnnnnnnnnnnnnnnnnnnnnnnnnnnnnnnnnnnnnnnnnnnnnnnnnnnnnnnnnnnnnnnnnnnnnnnnnnnnnnnnnnnnnnnnnnnnnnnnnnnnnnnnnnnnnnnnnnnnnnnnnnnnnnnnnnnnnnnnnnnnnnnnnnnnnnnnnnnnnnnnnnnnnnnnnnnnnnnnnnnnnnnnnnnnnnnnnnnnnnnnnnnnnnnnnnnnnnnnnnnnnnnnnnnnnnnnnnnnnnnnnnnnnnnnnnnnnnnnnnnnnnnnnnnnnnnnnnnnnnnnnnnnnnnnnnnnnnnnnnnnnnnnnnnnnnnnnnnnnnnnnnnnnnnnnnnnnnnnnnnnnnnnnnnnnnnnnnnnnnnnnnnnnnnnnnnnnnnnnnnnnnnnnnnnnnnnnnnnnnnnnnnnnnnnnnnnnnnnnnnnnnnnnnnnnnnnnnnnnnnnnnnnnnnnnnnnnnnnnnnnnnnnnnnnnnnnnnnnnnnnnnnnnnnnnnnnnnnnnnnnnnnnnnnnnnnnnnnnnnnnnnnnnnnnnnnnnnnnnnnnnnnnnnnnnnnnnnnnnnnnnnnnnnnnnnnnnnnnnnnnnnnnnnnnnnnnnnnnnnnnnnnnnnnnnnnnnnnnnnnnnnnnnnnnnnnnnnnnnnnnnnnnnnnnnnnnnnnnnnnnnnnnnnnnnnnnnnnnnnnnnnnnnnnnnnnnnnnnnnnnnnnnnnnnnnnnnnnnnnnnnnnnnnnnnnnnnnnnnnnnnnnnnnnnnnnnnnnnnnnnnnnnnnnnnnnnnnnnnnnnnnnnnnnnnnnnnnnnnnnnnnnnnnnnnnnnnnnnnnnnnnnnnnnnnnnnnnnnnnnnnnnnnnnnnnnnnnnnnnnnnnnnnnnnnnnnnnnnnnnnnnnnnnnnnnnnnnnnnnnnnnnnnnnnnnnnnnnnnnnnnnnnnnnnnnnnnnnnnnnnnnnnnnnnnnnnnnnnnnnnnnnnnnnnnnnnnnnnnnnnnnnnnnnnnnnnnnnnnnnnnnnnnnnnnnnnnnnnnnnnnnnnnnnnnnnnnnnnnnnnnnnnnnnnnnnnnnnnnnnnnnnnnnnnnnnnnnnnnnnnnnnnnnnnnnnnnnnnnnnnnnnnnnnnnnnnnnnnnnnnnnnnnnnnnnnnnnnnnnnnnnnnnnnnnnnnnnnnnnnnnnnnnnnnnnnnnnnnnnnnnnnnnnnnnnnnnnnnnnnnnnnnnnnnnnnnnnnnnnnnnnnnnnnnnnnnnnnnnnnnnnnnnnnnnnnnnnnnnnnnnnnnnnnnnnnnnnnnnnnnnnnnnnnnnnnnnnnnnnnnnnnnnnnnnnnnnnnnnnnnnnnnnnnnnnnnnnnnnnnnnnnnnnnnnnnnnnnnnnnnnnnnnnnnnnnnnnnnnnnnnnnnnnnnnnnnnnnnnnnnnnnnnnnnnnnnnnnnnnnnnnnnnnnnnnnnnnnnnnnnnnnnnnnnnnnnnnnnnnnnnnnnnnnnnnnnnnnnnnnnnnnnnnnnnnnnnnnnnnnnnnnnnnnnnnnnnnnnnnnnnnnnnnnnnnnnnnnnnnnnnnnnnnnnnnnnnnnnnnnnnnnnnnnnnnnnnnnnnnnnnnnnnnnnnnnnnnnnnnnnnnnnnnnnnnnnnnnnnnnnnnnnnnnnnnnnnnnnnnnnnnnnnnnnnnnnnnnnnnnnnnnnnnnnnnnnnnnnnnnnnnnnnnnnnnnnnnnnnnnnnnnnnnnnnnnnnnnnnnnnnnnnnnnnnnnnnnnnnnnnnnnnnnnnnnnnnnnnnnnnnnnnnnnnnnnnnnnnnnnnnnnnnnnnnnnnnnnnnnnnnnnnnnnnnnnnnnnnnnnnnnnnnnnnnnnnnnnnnnnnnnnnnnnnnnnnnnnnnnnnnnnnnnnnnnnnnnnnnnnnnnnnnnnnnnnnnnnnnnnnnnnnnnnnnnnnnnnnnnnnnnnnnnnnnnnnnnnnnnnnnnnnnnnnnnnnnnnnnnnnnnnnnnnnnnnnnnnnnnnnnnnnnnnnnnnnnnnnnnnnnnnnnnnnnnnnnnnnnnnnnnnnnnnnnnnnnnnnnnnnnnnnnnnnnnnnnnnnnnnnnnnnnnnnnnnnnnnnnnnnnnnnnnnnnnnnnnnnnnnnnnnnnnnnnnnnnnnnnnnnnnnnnnnnnnnnnnnnnnnnnnnnnnnnnnnnnnnnnnnnnnnnnnnnnnnnnnnnnnnnnnnnnnnnnnnnnnnnnnnnnnnnnnnnnnnnnnnnnnnnnnnnnnnnnnnnnnnnnnnnnnnnnnnnnnnnnnnnnnnnnnnnnnnnnnnnnnnnnnnnnnnnnnnnnnnnnnnnnnnnnnnnnnnnnnnnnnnnnnnnnnnnnnnnnnnnnnnnnnnnnnnnnnnnnnnnnnnnnnnnnnnnnnnnnnnnnnnnnnnnnnnnnnnnnnnnnnnnnnnnnnnnnnnnnnnnnnnnnnnnnnnnnnnnnnnnnnnnnnnnnnnnnnnnnnnnnnnnnnnnnnnnnnnnnnnnnnnnnnnnnnnnnnnnnnnnnnnnnnnnnnnnnnnnnnnnnnnnnnnnnnnnnnnnnnnnnnnnnnnnnnnnnnnnnnnnnnnnnnnnnnnnnnnnnnnnnnnnnnnnnnnnnnnnnnnaacggtgcaaaagcgcaggatatagccggtgatctgcccctgcaggatgttttgctcatactgctgcaggatgtagctgggcaccacgcggttcatatctggctacctgccttgcctggcttaactataatctcctttctgcctacttatcccccaggctcagattggcgaaggcggtgagggtgatctccgcgtccgcgctttccagatagctgacgcgtgcccggtcgcccgcgcgggtgatgggcagacggctgctcaggttgctggaggcgataaagattatatccggcgcttcggtcagggtaaggtagtagtaggtgcgtccatccgtggtgtccgagccaaagcgggcgatggagcctgtgagggtggcctgcttgtccgctgcctccggggatatccccatccggcttccggccagggccatctgatagttgtcgcgcgcgctgcgcacgctttcacccactcccaccagggaaaagtcgcgcactgaaacgaagctgaacatcttgattagcccggcgctgtccttgagggtcataaaataggtcggcttgccgttcatgttcaccaggatggggaaggtggcatagtatttgaagttttgcaccttgccttcggcggagcgcatggcggcagtctcggtggcaccggagaccaggtagaggtggctgcttttggtgcgggtgtccgtgagcgcaaagcccaccgttccctcgtccgaacccacgctggtgaggccggagtagaaatagctgcgctgatcgcggccatagatcacgttgtaaccgggcgtcacccgcagcaggtcgcgtttgccgaacacgctgttccaaaagccgtgcacatatttgccccaccaggaaagctggggaagcacaaagtaggagggctggatgcggtcaacccaggcgggaatcttgctgtcgtcatagatgccgccgctttttttgaggggaaagtatttgatctcacccgtgccggcatgcacgatggcgagtccggtggcttccggggcactcactccgatcttgtgggtgtaggtggtgatggtccagtagggttcgccattgtcgtccagttcaaaggtatcgcctgccaggccgatgcccgcgaagccgttccaccagagatggcggtagaggtcttgtccaaagtaggcgttgcgctgatagcggatttggatgggtttgcctttcagctcgcgcacaaaggtgatatcctgcggattggtggccgagaccttgatgtagcccggggtgcctttgcttgtgttggtgatccacttccagaagccgctgtgcagcaggggacagacccagaaaagcttgccatccaccatctggatggtcgggttgccgagcaccacccggctgccgagggcgaagtcctcgcccagtttcttggctgccaaatccttggcgaaagcggaatccaggatcggcacctgatccagattgaccggcgccaccaggtcggaaaactcggtcttttccacctcgccgatcatgcggcggtagctgccggaattgaagatgccggaagagaagaagggcgccaagatcagccacagcgccagaaggggatagaccacatagaggatcttgcgcaggcgccggattgccagcagcggagccaggcagatcatcagggggacgatccagtccaaaaagcggatatgcagcaccggaagcacaaagtaaagcataaaacccagcagcaggacggacagcactatggcaggcagggctttgatcctgaacttgggaaacttgatcacgacaggtttgggcgtttgttgttgaaacatggtaacctccctgaactaagctttgtttttatactctaccagatggcggcggatttgtcaagccggaatcgctgcccgcctccaatacagaatggaaaaaagtggactcggctcgaagaccgctcctatccttgcggatacagaggcgcgaccgcccgctcaaacactccctgaaccttggaaatggccagcccgtaattggtgatcggcactccgcgccgctgggcttccacgatgcggcggctcatctccatctggttgagcatgcaggctccgcagtggatcaccagcgcgaagtcctccagattgggcggaaagtcgtgtcccgcgtacacttcatataccagttccttgcccgtgaactggctcagccagcgcggaatcttcacccgtccgatgtcatccgcctgcacgtggtgggaacaggcttcggcgatcaggatcttgtcgccgtcgcgcagcttgtcgatctgcctcaccccttccgccaggacgtccagatcgcctttgtagcgggcaaagaggatggaaaaggtggtcatcttcacctctgggggcaggtcattcaccaccttcagcaccacctgcgaatccgtgatcaccagatcaggcggttccttcagggtttgcagggcataggccagttcccgctctttcaccaccgtcaccaccgcgtcgtgatccagcagttcgcgaatcacctgcacctgcggcaggatcaggcgtcccttgggcgcggcgaggtcgatgggagtcaccagcagcaccctgtccccggccttcaccaagtcacccgccagggggcgctcctccagcagatgggcgggcgccagcttgatcagcagttccttggcggcatcgatgttttcccccttgagggcggagacggagacccagggcagtccccgttcctcgcaccaggcgatattggcgggggcaggctcgcgcaaatccctgtggttaaagaccattaacagcggtatcttcatctcgcggatgcgtttcagggaggacagctcgctctccgcgaaggggcggccatcgttcacaaacacggctatgtccgtgcggtaaagtatcttataggtggcgagtacccgtttttcgcccagttcgccgctgtcgtccagtccagcggtgtcaaagaaggtcaccgggcccaggggcagaagttcatagcgtttgtccaccgggtctgtggtggtgcccggggtgctggaaacgatggctatctcctgtcctgccagggcgttgatcaaggacgattttccagcgttgcggttacccagcagggtgatgtttacgcgttctccgcggggtgtgctcatctatcttctcccaaaaagtcttgcggcttgcggccgctaatagcttttattatcagttctttcatgtttctttccttgtcggactggataccagcccatgtaaaaataatatatgtgaaaagcgcgaatctgtcaagcaaagagaattctggcagacaggggcctgtgtttttgatatatccacaaattacacaaattaacacggattaaaagaacagaataaggacaagtgtccagcctaaaaacaacaaccagaccctgaaacaaaccgccaccaagccctaaagccgtgtcatcccgggctgtcggggtcaccgccaaagcgcgaagcggtttggtggggtggcttgacccgggatccagtcttttaaaaacaaccagcaagccccgaaacaaagcacaacagactaaaaaccgtgtcatcccgggctgtcggggtccccgccaaagcgcgaagcggtttggtggggtggcttgacccgggatccagtcttttagaaacaaacgcgtaaggttttaaaaaagcaggcacctttccacctcaaaacacctttccacaaattctccccccatatatataggtgctacgaccccttcatgccaggcgggaagcggatcccagggcaagtatatatatacttgcccgtaattgcgcggccatgggctggctgccctccctttcccctcgcgcgcgggtggctctcatttgcatccagcgttttggcgtgagtcttccttaggtcatccttataatttataaggttgacctaaggatgatggcatcaaatccagtagcagcaaaggagggcggtatgaaggattatgcggaaggttgtggtatttttgtggaaaggtggaaaggtgcccccgaaacaagtccaccaagttatattttgtgtcatcacgggaagtcggggccccctctggggtggcttacccgtgatccagtctttttaaaagaaacatccacaaattacacaaattaacacgaattaaaagaacattaaagagtcaacacacccgactccggaacaaaaccctccagactaaaaaccgtgtcatcacagcctgcgagccgtgatccagtgcccaggtgtggcaaagtccgtttgccacagagaccggaggtctcttccaaacaggcaactccgttgcctctgccgaacggacttcggcaacccttatattacaccaatccgtgtcaatctgcgccctttatccgcgtttatctgcgtgaaccgtggaacccgggatccagtcttttggaatgtttgaacttcgctgaaaacatttttcgctaccaggaatgaaaactggacaacaaacgcagcttgggatatctgacactaagagtgtaattcacacgatcaataagaacatagcgtgctgtgcatacaaaacatattaccgacggacttctgttctgaaatatggacgttttgaacttggtaaacagtccgtatatggactaccagctgggacttgccattaggcatatgcccgaatgtaaagctatattcttatataacgcattgtagacagcacaggttgttctctgctctttccatattacactagtggtcatcatttcaccagtaggggtttttttacgcttttttcccgggagttttcatgtaaagcaccctactggacaaagagatgggagccggaaaacacagcctgaactgggacggcaccgactccaacggcgcccaactggcaagcggagtctatatctaccgcctcagcaccggaaagacgagcgccagccgcaaaatgatattgctgaagtgacggacagccgcccttccaagtccgataattaacttgaaccgccgcgcattacacacggcggttctttccaacaagccaagtatcagcagcgggaaaactgcgctgaaaaagccgctggtggggctccgtaaaatgggagtggaagccgccgcatggaacaccttgaaagtaacaagataccgccccaaattgatctttcctaacccaaaatccgcaaagcaaatttcttgacaatgatctttggcttaaatataaggttcctatcgaacaaaaggagcatgttatgtacaatcttctttgtgataattgggtaaacgtggtctatctttcgggcaaaccagatagaatatctttagttcaaactcttgaagacgcacactgtctgcaactggcatacagcaatcctatggaccggttcgctgttttcagattcctgcttgctcttggctactggtgtttcgccaacaccaacggggagcctgaacctgataagccgcttccgacctcctggatatcctggctggaagaaaacaaggggtatttcgagctttttggggatggacagagatttttccaagccgatcccagttccaggatcagagccattaccgaccttattcatgagataccaacagctcacaacctatgccatttcaatcatgtcaccgactatatcgatgggctctgcgaagcttgctgcatcaagggactgctgagattacctgtctttaccactgtcggtggcagagggataggcgcgggaatcaacaacactcctccattttacctgctctggcatgcaaatgacctcgctggcatgctggttcaaaattggcaaccctgggataatatggggattccggcatggttgggttcttttcaaaaagaaagcaggaaagtgggcttacttgccggaatgacctggctgccgcgcaaggtgcatctgcatgatcctgtctcaggtcaggcagcatgttgttcctgcggcttaccctccaaagctctcgtctattcctgcagcataaaacctgaaccagtgccggaaggccttaaatggaaagaccctcatggtgtttacaccgatcagggaaaaagtctccagtccaaaatcaaactgatgtccaatgatagatacactttcgcggaccgggattggtatagcccgttgttcagctatttgcacgcggaaggaaactccagacaaggaaaactatggttggttggatttgccagcgataaagcaaaaagcatagacatctgggacaagatcatcgagcttgagggaactgatacaaatgatgagctactggctcaattggcaaacagggctactgcccttaatgccatgcgcaagaagcctctcagaggtgatttcaaaaagtcagtgggcactccccagattgctgacattatcccccacgccgaaagcagaattgccatcaatgcgggtaaaatgactgagaacaggggctattcctggcaggatgccgatactgaatacggagaactgctcaccaaggttgcatgctctttggagccggctcaaacagtggacgccaggctcaagagaggtaaattcatttcccgcaagccctggccagttataccagaatccaaaacaaaacccgcagaggaggaccagaatgaatagaggaaccgttgacttcattgcaagcctggagaacctcaaagaaggcgatttgggcattcttagaaaactcaggggagcccggcttgatgaaaagcttcccggatttgacctgttttccgccctatggtggcctttgcggcaaaagaatcaacgcgctcccaagcgtgaagtggcttggttgatcgccaaactttttgctgaattccgctttgaacagcgcgagggagccacattgcccattcttatgggaggcatctgccggaagttggaacccaaaaaggaattaccccgggtattggcacgctttgatcaactcgcatcgcttgacattatgcagatggaagagccgctgtcggtcatcatgggtattttgcgcaagcaccagcaggtctgcctggactgggtagggcttactgatgttctgtcattttgggagcaggaacctgtcaaaagagaatggtcggattcatttattaaagcatacaagatcaacaaggaggattcagatgttgattgaaattcatatgattcagaatcacagcccggcaaatcttaaccgggacgacttgggcgcccccaagacctgttatttcggtggagtattacgttctcgcatctccagccagtgcatcaagcgcagcatccgttttgccccggaattcgcggaccttagaggaggtatccgaacaaggcgtctggcagagaaactcgaggaaatgctggaaaacaaagataagaagctggttgccaagtttcttgaagcctgcggaatcaaaaccaaatcttccaagaaagctgcaaaaaagtccgaaaagatacccgcggaagccgatgaagatcaggatgagcagcaggcggctgatacatctgacatgctggtttttaccacttatgatgccctgcgccaaatggcaaagctgctttccgactccaaactaagtgaaagcgaaaaactgctgcagttcaaagatctgctcacaaactgcgtccattctccggatatagcactttgcggcaggatgctggagaccaaagagcttaaaaacactggcgttgaaggcgccctacaggttgcacatgcgatctccacccacattgccagacctgagatagactattttgtggcggccgatgatgttcccggtgaagacgccggagcgggtcatattggcgaatccatgtttgcctcagcctgtttctacaaatacttctccattgattgggaacagttggtcaagaacctgaaaggggacacgaatctggcagcccacaccgtgggtgcctttctcctcgccgcagccaaaaccaaccccagtggcaaacagaacagcttcgccgctcataactatcccgatggcatccttgttgagttcaagaattcccctattagctacgccaacgcattcgtcaggccagtttccgtggtcaaggaatcggacctggtggaacaaagcatcggccagctttccaactacgtgaacgacatcaggcttggctattatgatgagcaatccccagttatcagcttctggttttctccaaacaatcgctattcccttggcaatgagcattccaaactggcttccagaaacattggcaacctcaatgagcttgtaggcgctgtgttggattatattggcggcttcaagtgggaagaagttcagaaaagcaaggcttatgttggcggctgacatgagtgcgccacccaacaccttattcttgcgcttggagggggctttgcagtcttggggcagcaacgaggctaagtttgctttgcgcaggactaccgacgctcccacaaaatcaggtgtcctggggctgctttgcgcggccatgggaattgggcgcgcggaggctgctgattcatggctcccaaaactcgccaacctgcgcatgggcgtgcggatagaccgccccggcatacgctggtgggacttccatactgttggagcgggacaaagaatgcgcatggcagagctgaaggcacccaaaaaaccttccatggttggagctgccctggctgataccctgacaccaagcaaagtaaaaaccagggcagagaccttgctctcacgccgcgaatatcttgccgacgccagttttctggtcgccttgcagggtgagccggaacttgtggaaaagctctccgccgctctggccaagccggtctgggcaatttatctggggcgcaaatcctgtcccccttcacgtcccgtgggcgagcatgctccgggcttttataacactttggaggaggcgctgtccgcggttcccctgcaaaagcgctggcacaatgaacccctgccgcaaatactgccttgcgtcatggactggatccccagccaggacggagaacatgcgcctgatgacgcggagattcattacgatctgccggtttcttttcagccgccccgccatttgccgcgcttcgtgatcaggcgtgagctggttgtgggagaggatgtgcaagtgagcagggaaaccggaaccagcgtttggaggcccaaaggaacccgggcggattataacaattccgagtataagaaggtcagggcggagcggcttgtgatggaccatgccgcgtgcatggtatgcaaagctcccgccacgactgttcaacacgtgaattaccgcagggcgggaggcaaggaaataccggaagacctgcgggcgctgtgccgcctctgccacgacgcctgcaccatgctggaatacggttccggcatgaccaccgaccgcatcgacccctgcgaccccatatggcgggagcgaatactggcaaagcgcaaagatatagtcgagttccgttcgcgcgggcagcgtttccgcaaaatgaagccagaggaggaaaacggatgatctacttgtccaagctattgatcgatactggaggcaatccagaccgtccccgccccggcagaaagtggctggacaatatctataacgtccaccgccgcctttccatggcgttcccttcaggtttgcgccgggagcaggatccgcatttcctgaagcccttttcgccaaacgacttccaaaaaactcccttccttttccgggtcgataacaacatcgacggaaacgataaaagggcgattattatcgtccagtccgttcttgagccggattgggattattgcttccaaaacgcgcttgatttcctggcagcgccaccggaaacaaaggagtataatccagagtttcaagcgggacaactgctccggttcaggctgcgggtaaacgccagcgtacgccgtcatattcctgagaaggtgcaacaggacggtcaaaccatagaaactggcaacatcctgcacaaaagggtttctctcacctgggatccctcttccaccccggatcaggcccttgccgactggctggctgccaaaagcccaaagctgggcttcacccttcagcgctgtgagcttcttcaactgggttgggtttatggctccaagcctgaacctaaaaatgtcaaagcaaaggaacagggacagggctactggcgtgaacacacatacaatcctctgcgcttccgttcggctctactggagggaattctcaaagtggatgacccgaaactgttcctggaaacgcttagaagcggcattggaaaagcgaaaagcttcggctttggcctgctgtccgttctgccaatcaggaatgatgaataaagacctgcactctatcccccggatcagagatcggcttagctatctctatgtggagcatgccaaaattgatcagaacgggcaagccatcgccattcacgatgccctgggagaaaccccggttccttgtgccggcttggctatgctgatgctgggaccgggcataaccatcacccatgcggcaatactttcactggctgcctgtggctgtctggtagcctgggtgggggaacatggcgtcaggttctatgccgcaggcacaggtacaacccgtagcgccgtcaatcttatgaaacaggcaaagtactgggcagacccggttttgcatttacgggttgtgcgctccatgtatcagttgaggttccaggatgagctttctcctgatttaactttgaaccagatcaggggcaaggaaggtgcccgggtgcgcgatacatatttccaactctcccaaaagtatggtgtgcccatgcagggcagaaactatcaaagagacaactggaataaagcggatcccataaaccgggcattatctgtggcaaactcctgcctctacggcatatcgcacgctgccattgttgctgcaggattctctcccggattgggctttgtccacactggcaagcaactgtcatttgtctatgatatcgcggatctatacaaaatggaaatggctgctcccgccgcattccgggcgaccgctgaagggatcggcgaactcgaccgcagagtcaggcttgcctgccgtgatgaattccacaggcagaatctactcaaacgcattgtcgcggatattagttctctcttcggtgatattatgccagaggatagcccggatgactgttttgccgaagaaccagccttgcctggaggactctggtctccagatggagaagtttccccaggcggcatatcttacgggcaggatgatctgccaaaggaagattgatggtggttttagtattggaaaatgtgccaagctccctgaggggtaagatcacacgttggctgctggaagtaaaagccggggtgtttgtgggtaaagtctcagcaatggttagagataaactgtgggataaggttagaagcaattgcagcggtggaacttgcctgatgatctggagtagtcagaccgagcaagggtttgatatcgaattctggggtgccgcatcaagagtcgttacggaatgggagggtatcaaacttatgaccaagcatccttaaactaaggcttgaaggagttcaatgacctcttagacctctattgatcaagtgtattccccatgcatgtgggggtgaaccggatacacacgcatcggttgcataggctgtccggtattccccatgcatgtgggggtgaaccggatcacgtcaccaagatctggcttcggcacaggtattccccatgcatgtgggggtgaaccgcttatccgaatgctacaagctgcacgtgacctgtattccccatgcatgtgggggtgaaccgagacccttcaacctatcgcaaaagaattcaatgtattccccatgcatgtgggggtgaaccgactacaaaacgaggtgatcatatgagtgtcaagtattccccatgcatgtgggggtgaaccgcatctgttttgccttctgcattgccttgtatcgtattccccatgcatgtgggggtgaaccgaacgcccgccagccggcggcactgctggctatgtattccccatgcatgtgggggtgaaccgacgaatcccgtctatgccgcccaggccaacgcgtattccccatgcatgtgggggtgaaccgaaaccaggaattaacgtagtgccaggcaagacgtattccccatgcatgtgggggtgaaccgactttgacaaagccatccaggtaggtgatgccgtattccccatgcatgtgggggtgaaccgccgacgaaatagcgatgaagggactggtaacgtattccccatgcatgtgggggtgaaccggcggcggcggctttgtcggtatcctggtagaggtattccccatgcatgtgggggtgaaccgaggacgtagcgaggcggcttggtgacctgatggtattccccatgcatgtgggggtgaaccgcgcggagctttccttgttgtcaccggaaagaggtattccccatgcatgtgggggtgaaccgaattatcggaaataacaaagagtcttcaaggggtattccccatgcatgtgggggtgaaccgtcaacgaaaccagcaacctgctgatcgttggggtattccccatgcatgtgggggtgaaccgaggacgtagcgaggcggcttggtgacctgatggtattccccatgcatgtgggggtgaaccgcctgaatctatcaccctactgagacaggcaatgtattccccatgcatgtgggggtgaaccgatcgtccagattctcacgatcatcctggacatgtattccccatgcatgtgggggtgaaccgttataaagggcagtccagtgagcaatagcaaggtattccccatgcatgtgggggtgaaccgatggcaacaattagcaggaattaaacaagaaggtattccccatgcatgtgggggtgaaccgttccggatgcagtcatccgctgtcgatgtggagtattccccatgcatgtgggggtgaaccgttcatagcgccgcttttcagcctggctacggcgtattccccatgcatgtgggggtgaaccgacgcggcataaccgcatgggcagcgcgtattggtattccccacgcatgtgggggtgaaccgatcgacgccggcatcatcgaggatctgatcctgtattccccacgcatgtgggggtgttgcgatttcctcgcgcgcgggcgactctcatttgcatctggcgctcagaccttggtcttcctggggtcaaccttaacctttatatggatgacctaaggatgatggcaccaaagccagtagcagcaagggagagcggtatgaagtaatatgaggattatcgcgggaattattttgaggggacaagcatccaatctgggtagtttgttggtattttatcgtttggctaaagtggtggttttgtaattgacctgaaatcggggtgacggggttttatggttttttgtagttcttttttgtgtcgtgttgtaaaatattcaccctctttctatctgtgtattatgtggtttttaaaaaactggatcccgggtcaagccaccccgacagcccgggatgacacaattttagtgtctgtcgtggtctgtttcggggctgatgcttgtttttgggttggacgtttgtccttattctgttcttttaatccgtataatttgtgtaatttgtggatatttttaaaagactggatcccggctcgcaggccgatatagcttggtggacttgtttcggggctggatgactgtcccaaacggcgctatagcaagcgccactacagtaaaggcggtcgctgaaccgccttcagggcagattcttttgtcctttaccttatccggcaaaattaacttgacataatttattataggtgattatctggtaattgtcattaagtttcgttttgaaatctccaaggaggcagatatgaaacgatcgcttcttatattggcgctgcttgccgtcacggcatcagccttcgccgctggagtacttatcaacaagcaaaacactcagtttcagattgctcaattgcggagctgcagctatgaggttcaaatcaccaatcaggttgcggaagtgcaagtgaacgaaacatttgtcaacaacagcaacggttttttctatccccgctactattttcccatcccgcgaggcgccaacgcgacccgcttgagatggagctatggcgacacctggcaggaagcgtcaatttcaccggtgccgcaaaacccacagggcggcccgtcctcttttccggatgaatttgtcgtttatatccagttgatgccggtagttttcgacgtggcagactccatggccgtgaatgactccctgcggctggaactctcctacgtgatgatgttgagttacaatttcggcagcgtaaccctcaacctcaagaacgactacagcctgttgcagaacactcctctggatttgcaatccctggatgtgaacgtctcgtccgacaaggagattttggatttcaacatcctgaatgtgacagccagcacccaacacacggggcacaacgccagcgggcattactccctcgccaatcaacccgccaccgccaactatgcctgccagatactgctatcgaccgccgaactgggctcctggggcttgagtaccttactggatgaagtccccgatgagggagcgccggggtttttcgtcttcaatcttgaggaggaaagccttccggcggattccaccttattcctgcggctgaatatcgtgatcgacgtatccggctccatgacctttgaaaaccgcctggaaaacgccaagaccgccgcgatctatgtgctaaaccatctggaacccgaggattacttcaatatcatcctctttgaccaccgggtgcgccctctctgggattatctccactccaatacagacagcaaccgccaagccgccatttcctatatccagaattatgagattaccggtttgaacggaaccaacctctccggtggtttgcaaaacgcgctgtatcagttttccccaactcccccgggagtcaaaaactgtgtgctgctcctttccgacggccaaccgactgtcgggatgacggatacctaccaaataatcaacaatgttaaccaacacatcaccaactatcacatcgatccccgcatcttctgctttggagtcggcaccgaggtcaactatcatctgttaagcgcgctgtcacaatacacagacggcgtcaccatctttctggagagctccgagatcgtcaatacggtcagcagcttctacgacgtcatgcgcaatcctctgctcctcgatcccgaactggccgtcgtcccgcccgggatcacggaggtgtatccctatcccataccctccatttatggaggaatccagtatcgcatcgtgggcaggtatgcgactccgggaacctatcagatgacgatcagcggcgcgcaccagggcacccagttgaacctgaactattcccaaaaccttagcggagaggaagcccccggtttgagcttcattcccaagatctgggctgcttccaagatcgacaacctgatggtggagtattattcctatccgcccaattcggcggaagcgatcgccctgcgtgatcaaatcaccgagatcagccagagtttcggggtggtctgcgtcttcaccagtttcacttccgatccgcccgacacggatttggatgacgtggtccaacccgtggtaaaaatgcccctccgcctgctgcccaaccagcccaatcccttcaatccctccaccctgctctgttttgaagtgtccgctgaactggagggactggcagagatcagaatctataacctgaaaggacaactggtgaagatcctcacggtgaaggttgacggcaaaggcaggtacaacgtgccctggaacggcaccgatctgactgagcggtcggtttccagcggggtttatgtctatactatcagatttggtaaatacctgctccacggcaagatgacacttgccaaatagagccggtcgagatgccctttgcggcgctatggcaagcgccggtactttgaaaaggcggtcaccgcaccgccttttttctatccctttttaagatcttttacttcgtgttaacttgtgtaatttgtggatgattattctaaaagactggatcatggctcaagccaccccaccggattgttaccggtccggcgaggaccccggtaggccgtgatgacacgatgtttagcttggtggacttgtttaagggaaacctttccacctcaaaaacacttttccacctttccacgacctaataattcgtgtaaatttgtgtaatttgtggataactctaaaagtccaacctgcttcagccccagtatttgcggtccaggctgcggtattggatggcttcggagatgtggtcggatttgatggcggccaggccttccaggtcggcgatggtgcgcgccaccttgag

SEQ ID NO: 1000 - DNA, 109834 bp, Artificial Sequence
  Synthetic Oligonucleotide
  misc_feature (1)..(94006): n is a, c, g, or t
nnnnnnnnnnnnnnnnnnnnnnnnnnnnnnnnnnnnnnnnnnnnnnnnnnnnnnnnnnnnnnnnnnnnnnnnnnnnnnnnnnnnnnnnnnnnnnnnnnnnnnnnnnnnnnnnnnnnnnnnnnnnnnnnnnnnnnnnnnnnnnnnnnnnnnnnnnnnnnnnnnnnnnnnnnnnnnnnnnnnnnnnnnnnnnnnnnnnnnnnnnnnnnnnnnnnnnnnnnnnnnnnnnnnnnnnnnnnnnnnnnnnnnnnnnnnnnnnnnnnnnnnnnnnnnnnnnnnnnnnnnnnnnnnnnnnnnnnnnnnnnnnnnnnnnnnnnnnnnnnnnnnnnnnnnnnnnnnnnnnnnnnnnnnnnnnnnnnnnnnnnnnnnnnnnnnnnnnnnnnnnnnnnnnnnnnnnnnnnnnnnnnnnnnnnnnnnnnnnnnnnnnnnnnnnnnnnnnnnnnnnnnnnnnnnnnnnnnnnnnnnnnnnnnnnnnnnnnnnnnnnnnnnnnnnnnnnnnnnnnnnnnnnnnnnnnnnnnnnnnnnnnnnnnnnnnnnnnnnnnnnnnnnnnnnnnnnnnnnnnnnnnnnnnnnnnnnnnnnnnnnnnnnnnnnnnnnnnnnnnnnnnnnnnnnnnnnnnnnnnnnnnnnnnnnnnnnnnnnnnnnnnnnnnnnnnnnnnnnnnnnnnnnnnnnnnnnnnnnnnnnnnnnnnnnnnnnnnnnnnnnnnnnnnnnnnnnnnnnnnnnnnnnnnnnnnnnnnnnnnnnnnnnnnnnnnnnnnnnnnnnnnnnnnnnnnnnnnnnnnnnnnnnnnnnnnnnnnnnnnnnnnnnnnnnnnnnnnnnnnnnnnnnnnnnnnnnnnnnnnnnnnnnnnnnnnnnnnnnnnnnnnnnnnnnnnnnnnnnnnnnnnnnnnnnnnnnnnnnnnnnnnnnnnnnnnnnnnnnnnnnnnnnnnnnnnnnnnnnnnnnnnnnnnnnnnnnnnnnnnnnnnnnnnnnnnnnnnnnnnnnnnnnnnnnnnnnnnnnnnnnnnnnnnnnnnnnnnnnnnnnnnnnnnnnnnnnnnnnnnnnnnnnnnnnnnnnnnnnnnnnnnnnnnnnnnnnnnnnnnnnnnnnnnnnnnnnnnnnnnnnnnnnnnnnnnnnnnnnnnnnnnnnnnnnnnnnnnnnnnnnnnnnnnnnnnnnnnnnnnnnnnnnnnnnnnnnnnnnnnnnnnnnnnnnnnnnnnnnnnnnnnnnnnnnnnnnnnnnnnnnnnnnnnnnnnnnnnnnnnnnnnnnnnnnnnnnnnnnnnnnnnnnnnnnnnnnnnnnnnnnnnnnnnnnnnnnnnnnnnnnnnnnnnnnnnnnnnnnnnnnnnnnnnnnnnnnnnnnnnnnnnnnnnnnnnnnnnnnnnnnnnnnnnnnnnnnnnnnnnnnnnnnnnnnnnnnnnnnnnnnnnnnnnnnnnnnnnnnnnnnnnnnnnnnnnnnnnnnnnnnnnnnnnnnnnnnnnnnnnnnnnnnnnnnnnnnnnnnnnnnnnnnnnnnnnnnnnnnnnnnnnnnnnnnnnnnnnnnnnnnnnnnnnnnnnnnnnnnnnnnnnnnnnnnnnnnnnnnnnnnnnnnnnnnnnnnnnnnnnnnnnnnnnnnnnnnnnnnnnnnnnnnnnnnnnnnnnnnnnnnnnnnnnnnnnnnnnnnnnnnnnnnnnnnnnnnnnnnnnnnnnnnnnnnnnnnnnnnnnnnnnnnnnnnnnnnnnnnnnnnnnnnnnnnnnnnnnnnnnnnnnnnnnnnnnnnnnnnnnnnnnnnnnnnnnnnnnnnnnnnnnnnnnnnnnnnnnnnnnnnnnnnnnnnnnnnnnnnnnnnnnnnnnnnnnnnnnnnnnnnnnnnnnnnnnnnnnnnnnnnnnnnnnnnnnnnnnnnnnnnnnnnnnnnnnnnnnnnnnnnnnnnnnnnnnnnnnnnnnnnnnnnnnnnnnnnnnnnnnnnnnnnnnnnnnnnnnnnnnnnnnnnnnnnnnnnnnnnnnnnnnnnnnnnnnnnnnnnnnnnnnnnnnnnnnnnnnnnnnnnnnnnnnnnnnnnnnnnnnnnnnnnnnnnnnnnnnnnnnnnnnnnnnnnnnnnnnnnnnnnnnnnnnnnnnnnnnnnnnnnnnnnnnnnnnnnnnnnnnnnnnnnnnnnnnnnnnnnnnnnnnnnnnnnnnnnnnnnnnnnnnnnnnnnnnnnnnnnnnnnnnnnnnnnnnnnnnnnnnnnnnnnnnnnnnnnnnnnnnnnnnnnnnnnnnnnnnnnnnnnnnnnnnnnnnnnnnnnnnnnnnnnnnnnnnnnnnnnnnnnnnnnnnnnnnnnnnnnnnnnnnnnnnnnnnnnnnnnnnnnnnnnnnnnnnnnnnnnnnnnnnnnnnnnnnnnnnnnnnnnnnnnnnnnnnnnnnnnnnnnnnnnnnnnnnnnnnnnnnnnnnnnnnnnnnnnnnnnnnnnnnnnnnnnnnnnnnnnnnnnnnnnnnnnnnnnnnnnnnnnnnnnnnnnnnnnnnnnnnnnnnnnnnnnnnnnnnnnnnnnnnnnnnnnnnnnnnnnnnnnnnnnnnnnnnnnnnnnnnnnnnnnnnnnnnnnnnnnnnnnnnnnnnnnnnnnnnnnnnnnnnnnnnnnnnnnnnnnnnnnnnnnnnnnnnnnnnnnnnnnnnnnnnnnnnnnnnnnnnnnnnnnnnnnnnnnnnnnnnnnnnnnnnnnnnnnnnnnnnnnnnnnnnnnnnnnnnnnnnnnnnnnnnnnnnnnnnnnnnnnnnnnnnnnnnnnnnnnnnnnnnnnnnnnnnnnnnnnnnnnnnnnnnnnnnnnnnnnnnnnnnnnnnnnnnnnnnnnnnnnnnnnnnnnnnnnnnnnnnnnnnnnnnnnnnnnnnnnnnnnnnnnnnnnnnnnnnnnnnnnnnnnnnnnnnnnnnnnnnnnnnnnnnnnnnnnnnnnnnnnnnnnnnnnnnnnnnnnnnnnnnnnnnnnnnnnnnnnnnnnnnnnnnnnnnnnnnnnnnnnnnnnnnnnnnnnnnnnnnnnnnnnnnnnnnnnnnnnnnnnnnnnnnnnnnnnnnnnnnnnnnnnnnnnnnnnnnnnnnnnnnnnnnnnnnnnnnnnnnnnnnnnnnnnnnnnnnnnnnnnnnnnnnnnnnnnnnnnnnnnnnnnnnnnnnnnnnnnnnnnnnnnnnnnnnnnnnnnnnnnnnnnnnnnnnnnnnnnnnnnnnnnnnnnnnnnnnnnnnnnnnnnnnnnnnnnnnnnnnnnnnnnnnnnnnnnnnnnnnnnnnnnnnnnnnnnnnnnnnnnnnnnnnnnnnnnnnnnnnnnnnnnnnnnnnnnnnnnnnnnnnnnnnnnnnnnnnnnnnnnnnnnnnnnnnnnnnnnnnnnnnnnnnnnnnnnnnnnnnnnnnnnnnnnnnnnnnnnnnnnnnnnnnnnnnnnnnnnnnnnnnnnnnnnnnnnnnnnnnnnnnnnnnnnnnnnnnnnnnnnnnnnnnnnnnnnnnnnnnnnnnnnnnnnnnnnnnnnnnnnnnnnnnnnnnnnnnnnnnnnnnnnnnnnnnnnnnnnnnnnnnnnnnnnnnnnnnnnnnnnnnnnnnnnnnnnnnnnnnnnnnnnnnnnnnnnnnnnnnnnnnnnnnnnnnnnnnnnnnnnnnnnnnnnnnnnnnnnnnnnnnnnnnnnnnnnnnnnnnnnnnnnnnnnnnnnnnnnnnnnnnnnnnnnnnnnnnnnnnnnnnnnnnnnnnnnnnnnnnnnnnnnnnnnnnnnnnnnnnnnnnnnnnnnnnnnnnnnnnnnnnnnnnnnnnnnnnnnnnnnnnnnnnnnnnnnnnnnnnnnnnnnnnnnnnnnnnnnnnnnnnnnnnnnnnnnnnnnnnnnnnnnnnnnnnnnnnnnnnnnnnnnnnnnnnnnnnnnnnnnnnnnnnnnnnnnnnnnnnnnnnnnnnnnnnnnnnnnnnnnnnnnnnnnnnnnnnnnnnnnnnnnnnnnnnnnnnnnnnnnnnnnnnnnnnnnnnnnnnnnnnnnnnnnnnnnnnnnnnnnnnnnnnnnnnnnnnnnnnnnnnnnnnnnnnnnnnnnnnnnnnnnnnnnnnnnnnnnnnnnnnnnnnnnnnnnnnnnnnnnnnnnnnnnnnnnnnnnnnnnnnnnnnnnnnnnnnnnnnnnnnnnnnnnnnnnnnnnnnnnnnnnnnnnnnnnnnnnnnnnnnnnnnnnnnnnnnnnnnnnnnnnnnnnnnnnnnnnnnnnnnnnnnnnnnnnnnnnnnnnnnnnnnnnnnnnnnnnnnnnnnnnnnnnnnnnnnnnnnnnnnnnnnnnnnnnnnnnnnnnnnnnnnnnnnnnnnnnnnnnnnnnnnnnnnnnnnnnnnnnnnnnnnnnnnnnnnnnnnnnnnnnnnnnnnnnnnnnnnnnnnnnnnnnnnnnnnnnnnnnnnnnnnnnnnnnnnnnnnnnnnnnnnnnnnnnnnnnnnnnnnnnnnnnnnnnnnnnnnnnnnnnnnnnnnnnnnnnnnnnnnnnnnnnnnnnnnnnnnnnnnnnnnnnnnnnnnnnnnnnnnnnnnnnnnnnnnnnnnnnnnnnnnnnnnnnnnnnnnnnnnnnnnnnnnnnnnnnnnnnnnnnnnnnnnnnnnnnnnnnnnnnnnnnnnnnnnnnnnnnnnnnnnnnnnnnnnnnnnnnnnnnnnnnnnnnnnnnnnnnnnnnnnnnnnnnnnnnnnnnnnnnnnnnnnnnnnnnnnnnnnnnnnnnnnnnnnnnnnnnnnnnnnnnnnnnnnnnnnnnnnnnnnnnnnnnnnnnnnnnnnnnnnnnnnnnnnnnnnnnnnnnnnnnnnnnnnnnnnnnnnnnnnnnnnnnnnnnnnnnnnnnnnnnnnnnnnnnnnnnnnnnnnnnnnnnnnnnnnnnnnnnnnnnnnnnnnnnnnnnnnnnnnnnnnnnnnnnnnnnnnnnnnnnnnnnnnnnnnnnnnnnnnnnnnnnnnnnnnnnnnnnnnnnnnnnnnnnnnnnnnnnnnnnnnnnnnnnnnnnnnnnnnnnnnnnnnnnnnnnnnnnnnnnnnnnnnnnnnnnnnnnnnnnnnnnnnnnnnnnnnnnnnnnnnnnnnnnnnnnnnnnnnnnnnnnnnnnnnnnnnnnnnnnnnnnnnnnnnnnnnnnnnnnnnnnnnnnnnnnnnnnnnnnnnnnnnnnnnnnnnnnnnnnnnnnnnnnnnnnnnnnnnnnnnnnnnnnnnnnnnnnnnnnnnnnnnnnnnnnnnnnnnnnnnnnnnnnnnnnnnnnnnnnnnnnnnnnnnnnnnnnnnnnnnnnnnnnnnnnnnnnnnnnnnnnnnnnnnnnnnnnnnnnnnnnnnnnnnnnnnnnnnnnnnnnnnnnnnnnnnnnnnnnnnnnnnnnnnnnnnnnnnnnnnnnnnnnnnnnnnnnnnnnnnnnnnnnnnnnnnnnnnnnnnnnnnnnnnnnnnnnnnnnnnnnnnnnnnnnnnnnnnnnnnnnnnnnnnnnnnnnnnnnnnnnnnnnnnnnnnnnnnnnnnnnnnnnnnnnnnnnnnnnnnnnnnnnnnnnnnnnnnnnnnnnnnnnnnnnnnnnnnnnnnnnnnnnnnnnnnnnnnnnnnnnnnnnnnnnnnnnnnnnnnnnnnnnnnnnnnnnnnnnnnnnnnnnnnnnnnnnnnnnnnnnnnnnnnnnnnnnnnnnnnnnnnnnnnnnnnnnnnnnnnnnnnnnnnnnnnnnnnnnnnnnnnnnnnnnnnnnnnnnnnnnnnnnnnnnnnnnnnnnnnnnnnnnnnnnnnnnnnnnnnnnnnnnnnnnnnnnnnnnnnnnnnnnnnnnnnnnnnnnnnnnnnnnnnnnnnnnnnnnnnnnnnnnnnnnnnnnnnnnnnnnnnnnnnnnnnnnnnnnnnnnnnnnnnnnnnnnnnnnnnnnnnnnnnnnnnnnnnnnnnnnnnnnnnnnnnnnnnnnnnnnnnnnnnnnnnnnnnnnnnnnnnnnnnnnnnnnnnnnnnnnnnnnnnnnnnnnnnnnnnnnnnnnnnnnnnnnnnnnnnnnnnnnnnnnnnnnnnnnnnnnnnnnnnnnnnnnnnnnnnnnnnnnnnnnnnnnnnnnnnnnnnnnnnnnnnnnnnnnnnnnnnnnnnnnnnnnnnnnnnnnnnnnnnnnnnnnnnnnnnnnnnnnnnnnnnnnnnnnnnnnnnnnnnnnnnnnnnnnnnnnnnnnnnnnnnnnnnnnnnnnnnnnnnnnnnnnnnnnnnnnnnnnnnnnnnnnnnnnnnnnnnnnnnnnnnnnnnnnnnnnnnnnnnnnnnnnnnnnnnnnnnnnnnnnnnnnnnnnnnnnnnnnnnnnnnnnnnnnnnnnnnnnnnnnnnnnnnnnnnnnnnnnnnnnnnnnnnnnnnnnnnnnnnnnnnnnnnnnnnnnnnnnnnnnnnnnnnnnnnnnnnnnnnnnnnnnnnnnnnnnnnnnnnnnnnnnnnnnnnnnnnnnnnnnnnnnnnnnnnnnnnnnnnnnnnnnnnnnnnnnnnnnnnnnnnnnnnnnnnnnnnnnnnnnnnnnnnnnnnnnnnnnnnnnnnnnnnnnnnnnnnnnnnnnnnnnnnnnnnnnnnnnnnnnnnnnnnnnnnnnnnnnnnnnnnnnnnnnnnnnnnnnnnnnnnnnnnnnnnnnnnnnnnnnnnnnnnnnnnnnnnnnnnnnnnnnnnnnnnnnnnnnnnnnnnnnnnnnnnnnnnnnnnnnnnnnnnnnnnnnnnnnnnnnnnnnnnnnnnnnnnnnnnnnnnnnnnnnnnnnnnnnnnnnnnnnnnnnnnnnnnnnnnnnnnnnnnnnnnnnnnnnnnnnnnnnnnnnnnnnnnnnnnnnnnnnnnnnnnnnnnnnnnnnnnnnnnnnnnnnnnnnnnnnnnnnnnnnnnnnnnnnnnnnnnnnnnnnnnnnnnnnnnnnnnnnnnnnnnnnnnnnnnnnnnnnnnnnnnnnnnnnnnnnnnnnnnnnnnnnnnnnnnnnnnnnnnnnnnnnnnnnnnnnnnnnnnnnnnnnnnnnnnnnnnnnnnnnnnnnnnnnnnnnnnnnnnnnnnnnnnnnnnnnnnnnnnnnnnnnnnnnnnnnnnnnnnnnnnnnnnnnnnnnnnnnnnnnnnnnnnnnnnnnnnnnnnnnnnnnnnnnnnnnnnnnnnnnnnnnnnnnnnnnnnnnnnnnnnnnnnnnnnnnnnnnnnnnnnnnnnnnnnnnnnnnnnnnnnnnnnnnnnnnnnnnnnnnnnnnnnnnnnnnnnnnnnnnnnnnnnnnnnnnnnnnnnnnnnnnnnnnnnnnnnnnnnnnnnnnnnnnnnnnnnnnnnnnnnnnnnnnnnnnnnnnnnnnnnnnnnnnnnnnnnnnnnnnnnnnnnnnnnnnnnnnnnnnnnnnnnnnnnnnnnnnnnnnnnnnnnnnnnnnnnnnnnnnnnnnnnnnnnnnnnnnnnnnnnnnnnnnnnnnnnnnnnnnnnnnnnnnnnnnnnnnnnnnnnnnnnnnnnnnnnnnnnnnnnnnnnnnnnnnnnnnnnnnnnnnnnnnnnnnnnnnnnnnnnnnnnnnnnnnnnnnnnnnnnnnnnnnnnnnnnnnnnnnnnnnnnnnnnnnnnnnnnnnnnnnnnnnnnnnnnnnnnnnnnnnnnnnnnnnnnnnnnnnnnnnnnnnnnnnnnnnnnnnnnnnnnnnnnnnnnnnnnnnnnnnnnnnnnnnnnnnnnnnnnnnnnnnnnnnnnnnnnnnnnnnnnnnnnnnnnnnnnnnnnnnnnnnnnnnnnnnnnnnnnnnnnnnnnnnnnnnnnnnnnnnnnnnnnnnnnnnnnnnnnnnnnnnnnnnnnnnnnnnnnnnnnnnnnnnnnnnnnnnnnnnnnnnnnnnnnnnnnnnnnnnnnnnnnnnnnnnnnnnnnnnnnnnnnnnnnnnnnnnnnnnnnnnnnnnnnnnnnnnnnnnnnnnnnnnnnnnnnnnnnnnnnnnnnnnnnnnnnnnnnnnnnnnnnnnnnnnnnnnnnnnnnnnnnnnnnnnnnnnnnnnnnnnnnnnnnnnnnnnnnnnnnnnnnnnnnnnnnnnnnnnnnnnnnnnnnnnnnnnnnnnnnnnnnnnnnnnnnnnnnnnnnnnnnnnnnnnnnnnnnnnnnnnnnnnnnnnnnnnnnnnnnnnnnnnnnnnnnnnnnnnnnnnnnnnnnnnnnnnnnnnnnnnnnnnnnnnnnnnnnnnnnnnnnnnnnnnnnnnnnnnnnnnnnnnnnnnnnnnnnnnnnnnnnnnnnnnnnnnnnnnnnnnnnnnnnnnnnnnnnnnnnnnnnnnnnnnnnnnnnnnnnnnnnnnnnnnnnnnnnnnnnnnnnnnnnnnnnnnnnnnnnnnnnnnnnnnnnnnnnnnnnnnnnnnnnnnnnnnnnnnnnnnnnnnnnnnnnnnnnnnnnnnnnnnnnnnnnnnnnnnnnnnnnnnnnnnnnnnnnnnnnnnnnnnnnnnnnnnnnnnnnnnnnnnnnnnnnnnnnnnnnnnnnnnnnnnnnnnnnnnnnnnnnnnnnnnnnnnnnnnnnnnnnnnnnnnnnnnnnnnnnnnnnnnnnnnnnnnnnnnnnnnnnnnnnnnnnnnnnnnnnnnnnnnnnnnnnnnnnnnnnnnnnnnnnnnnnnnnnnnnnnnnnnnnnnnnnnnnnnnnnnnnnnnnnnnnnnnnnnnnnnnnnnnnnnnnnnnnnnnnnnnnnnnnnnnnnnnnnnnnnnnnnnnnnnnnnnnnnnnnnnnnnnnnnnnnnnnnnnnnnnnnnnnnnnnnnnnnnnnnnnnnnnnnnnnnnnnnnnnnnnnnnnnnnnnnnnnnnnnnnnnnnnnnnnnnnnnnnnnnnnnnnnnnnnnnnnnnnnnnnnnnnnnnnnnnnnnnnnnnnnnnnnnnnnnnnnnnnnnnnnnnnnnnnnnnnnnnnnnnnnnnnnnnnnnnnnnnnnnnnnnnnnnnnnnnnnnnnnnnnnnnnnnnnnnnnnnnnnnnnnnnnnnnnnnnnnnnnnnnnnnnnnnnnnnnnnnnnnnnnnnnnnnnnnnnnnnnnnnnnnnnnnnnnnnnnnnnnnnnnnnnnnnnnnnnnnnnnnnnnnnnnnnnnnnnnnnnnnnnnnnnnnnnnnnnnnnnnnnnnnnnnnnnnnnnnnnnnnnnnnnnnnnnnnnnnnnnnnnnnnnnnnnnnnnnnnnnnnnnnnnnnnnnnnnnnnnnnnnnnnnnnnnnnnnnnnnnnnnnnnnnnnnnnnnnnnnnnnnnnnnnnnnnnnnnnnnnnnnnnnnnnnnnnnnnnnnnnnnnnnnnnnnnnnnnnnnnnnnnnnnnnnnnnnnnnnnnnnnnnnnnnnnnnnnnnnnnnnnnnnnnnnnnnnnnnnnnnnnnnnnnnnnnnnnnnnnnnnnnnnnnnnnnnnnnnnnnnnnnnnnnnnnnnnnnnnnnnnnnnnnnnnnnnnnnnnnnnnnnnnnnnnnnnnnnnnnnnnnnnnnnnnnnnnnnnnnnnnnnnnnnnnnnnnnnnnnnnnnnnnnnnnnnnnnnnnnnnnnnnnnnnnnnnnnnnnnnnnnnnnnnnnnnnnnnnnnnnnnnnnnnnnnnnnnnnnnnnnnnnnnnnnnnnnnnnnnnnnnnnnnnnnnnnnnnnnnnnnnnnnnnnnnnnnnnnnnnnnnnnnnnnnnnnnnnnnnnnnnnnnnnnnnnnnnnnnnnnnnnnnnnnnnnnnnnnnnnnnnnnnnnnnnnnnnnnnnnnnnnnnnnnnnnnnnnnnnnnnnnnnnnnnnnnnnnnnnnnnnnnnnnnnnnnnnnnnnnnnnnnnnnnnnnnnnnnnnnnnnnnnnnnnnnnnnnnnnnnnnnnnnnnnnnnnnnnnnnnnnnnnnnnnnnnnnnnnnnnnnnnnnnnnnnnnnnnnnnnnnnnnnnnnnnnnnnnnnnnnnnnnnnnnnnnnnnnnnnnnnnnnnnnnnnnnnnnnnnnnnnnnnnnnnnnnnnnnnnnnnnnnnnnnnnnnnnnnnnnnnnnnnnnnnnnnnnnnnnnnnnnnnnnnnnnnnnnnnnnnnnnnnnnnnnnnnnnnnnnnnnnnnnnnnnnnnnnnnnnnnnnnnnnnnnnnnnnnnnnnnnnnnnnnnnnnnnnnnnnnnnnnnnnnnnnnnnnnnnnnnnnnnnnnnnnnnnnnnnnnnnnnnnnnnnnnnnnnnnnnnnnnnnnnnnnnnnnnnnnnnnnnnnnnnnnnnnnnnnnnnnnnnnnnnnnnnnnnnnnnnnnnnnnnnnnnnnnnnnnnnnnnnnnnnnnnnnnnnnnnnnnnnnnnnnnnnnnnnnnnnnnnnnnnnnnnnnnnnnnnnnnnnnnnnnnnnnnnnnnnnnnnnnnnnnnnnnnnnnnnnnnnnnnnnnnnnnnnnnnnnnnnnnnnnnnnnnnnnnnnnnnnnnnnnnnnnnnnnnnnnnnnnnnnnnnnnnnnnnnnnnnnnnnnnnnnnnnnnnnnnnnnnnnnnnnnnnnnnnnnnnnnnnnnnnnnnnnnnnnnnnnnnnnnnnnnnnnnnnnnnnnnnnnnnnnnnnnnnnnnnnnnnnnnnnnnnnnnnnnnnnnnnnnnnnnnnnnnnnnnnnnnnnnnnnnnnnnnnnnnnnnnnnnnnnnnnnnnnnnnnnnnnnnnnnnnnnnnnnnnnnnnnnnnnnnnnnnnnnnnnnnnnnnnnnnnnnnnnnnnnnnnnnnnnnnnnnnnnnnnnnnnnnnnnnnnnnnnnnnnnnnnnnnnnnnnnnnnnnnnnnnnnnnnnnnnnnnnnnnnnnnnnnnnnnnnnnnnnnnnnnnnnnnnnnnnnnnnnnnnnnnnnnnnnnnnnnnnnnnnnnnnnnnnnnnnnnnnnnnnnnnnnnnnnnnnnnnnnnnnnnnnnnnnnnnnnnnnnnnnnnnnnnnnnnnnnnnnnnnnnnnnnnnnnnnnnnnnnnnnnnnnnnnnnnnnnnnnnnnnnnnnnnnnnnnnnnnnnnnnnnnnnnnnnnnnnnnnnnnnnnnnnnnnnnnnnnnnnnnnnnnnnnnnnnnnnnnnnnnnnnnnnnnnnnnnnnnnnnnnnnnnnnnnnnnnnnnnnnnnnnnnnnnnnnnnnnnnnnnnnnnnnnnnnnnnnnnnnnnnnnnnnnnnnnnnnnnnnnnnnnnnnnnnnnnnnnnnnnnnnnnnnnnnnnnnnnnnnnnnnnnnnnnnnnnnnnnnnnnnnnnnnnnnnnnnnnnnnnnnnnnnnnnnnnnnnnnnnnnnnnnnnnnnnnnnnnnnnnnnnnnnnnnnnnnnnnnnnnnnnnnnnnnnnnnnnnnnnnnnnnnnnnnnnnnnnnnnnnnnnnnnnnnnnnnnnnnnnnnnnnnnnnnnnnnnnnnnnnnnnnnnnnnnnnnnnnnnnnnnnnnnnnnnnnnnnnnnnnnnnnnnnnnnnnnnnnnnnnnnnnnnnnnnnnnnnnnnnnnnnnnnnnnnnnnnnnnnnnnnnnnnnnnnnnnnnnnnnnnnnnnnnnnnnnnnnnnnnnnnnnnnnnnnnnnnnnnnnnnnnnnnnnnnnnnnnnnnnnnnnnnnnnnnnnnnnnnnnnnnnnnnnnnnnnnnnnnnnnnnnnnnnnnnnnnnnnnnnnnnnnnnnnnnnnnnnnnnnnnnnnnnnnnnnnnnnnnnnnnnnnnnnnnnnnnnnnnnnnnnnnnnnnnnnnnnnnnnnnnnnnnnnnnnnnnnnnnnnnnnnnnnnnnnnnnnnnnnnnnnnnnnnnnnnnnnnnnnnnnnnnnnnnnnnnnnnnnnnnnnnnnnnnnnnnnnnnnnnnnnnnnnnnnnnnnnnnnnnnnnnnnnnnnnnnnnnnnnnnnnnnnnnnnnnnnnnnnnnnnnnnnnnnnnnnnnnnnnnnnnnnnnnnnnnnnnnnnnnnnnnnnnnnnnnnnnnnnnnnnnnnnnnnnnnnnnnnnnnnnnnnnnnnnnnnnnnnnnnnnnnnnnnnnnnnnnnnnnnnnnnnnnnnnnnnnnnnnnnnnnnnnnnnnnnnnnnnnnnnnnnnnnnnnnnnnnnnnnnnnnnnnnnnnnnnnnnnnnnnnnnnnnnnnnnnnnnnnnnnnnnnnnnnnnnnnnnnnnnnnnnnnnnnnnnnnnnnnnnnnnnnnnnnnnnnnnnnnnnnnnnnnnnnnnnnnnnnnnnnnnnnnnnnnnnnnnnnnnnnnnnnnnnnnnnnnnnnnnnnnnnnnnnnnnnnnnnnnnnnnnnnnnnnnnnnnnnnnnnnnnnnnnnnnnnnnnnnnnnnnnnnnnnnnnnnnnnnnnnnnnnnnnnnnnnnnnnnnnnnnnnnnnnnnnnnnnnnnnnnnnnnnnnnnnnnnnnnnnnnnnnnnnnnnnnnnnnnnnnnnnnnnnnnnnnnnnnnnnnnnnnnnnnnnnnnnnnnnnnnnnnnnnnnnnnnnnnnnnnnnnnnnnnnnnnnnnnnnnnnnnnnnnnnnnnnnnnnnnnnnnnnnnnnnnnnnnnnnnnnnnnnnnnnnnnnnnnnnnnnnnnnnnnnnnnnnnnnnnnnnnnnnnnnnnnnnnnnnnnnnnnnnnnnnnnnnnnnnnnnnnnnnnnnnnnnnnnnnnnnnnnnnnnnnnnnnnnnnnnnnnnnnnnnnnnnnnnnnnnnnnnnnnnnnnnnnnnnnnnnnnnnnnnnnnnnnnnnnnnnnnnnnnnnnnnnnnnnnnnnnnnnnnnnnnnnnnnnnnnnnnnnnnnnnnnnnnnnnnnnnnnnnnnnnnnnnnnnnnnnnnnnnnnnnnnnnnnnnnnnnnnnnnnnnnnnnnnnnnnnnnnnnnnnnnnnnnnnnnnnnnnnnnnnnnnnnnnnnnnnnnnnnnnnnnnnnnnnnnnnnnnnnnnnnnnnnnnnnnnnnnnnnnnnnnnnnnnnnnnnnnnnnnnnnnnnnnnnnnnnnnnnnnnnnnnnnnnnnnnnnnnnnnnnnnnnnnnnnnnnnnnnnnnnnnnnnnnnnnnnnnnnnnnnnnnnnnnnnnnnnnnnnnnnnnnnnnnnnnnnnnnnnnnnnnnnnnnnnnnnnnnnnnnnnnnnnnnnnnnnnnnnnnnnnnnnnnnnnnnnnnnnnnnnnnnnnnnnnnnnnnnnnnnnnnnnnnnnnnnnnnnnnnnnnnnnnnnnnnnnnnnnnnnnnnnnnnnnnnnnnnnnnnnnnnnnnnnnnnnnnnnnnnnnnnnnnnnnnnnnnnnnnnnnnnnnnnnnnnnnnnnnnnnnnnnnnnnnnnnnnnnnnnnnnnnnnnnnnnnnnnnnnnnnnnnnnnnnnnnnnnnnnnnnnnnnnnnnnnnnnnnnnnnnnnnnnnnnnnnnnnnnnnnnnnnnnnnnnnnnnnnnnnnnnnnnnnnnnnnnnnnnnnnnnnnnnnnnnnnnnnnnnnnnnnnnnnnnnnnnnnnnnnnnnnnnnnnnnnnnnnnnnnnnnnnnnnnnnnnnnnnnnnnnnnnnnnnnnnnnnnnnnnnnnnnnnnnnnnnnnnnnnnnnnnnnnnnnnnnnnnnnnnnnnnnnnnnnnnnnnnnnnnnnnnnnnnnnnnnnnnnnnnnnnnnnnnnnnnnnnnnnnnnnnnnnnnnnnnnnnnnnnnnnnnnnnnnnnnnnnnnnnnnnnnnnnnnnnnnnnnnnnnnnnnnnnnnnnnnnnnnnnnnnnnnnnnnnnnnnnnnnnnnnnnnnnnnnnnnnnnnnnnnnnnnnnnnnnnnnnnnnnnnnnnnnnnnnnnnnnnnnnnnnnnnnnnnnnnnnnnnnnnnnnnnnnnnnnnnnnnnnnnnnnnnnnnnnnnnnnnnnnnnnnnnnnnnnnnnnnnnnnnnnnnnnnnnnnnnnnnnnnnnnnnnnnnnnnnnnnnnnnnnnnnnnnnnnnnnnnnnnnnnnnnnnnnnnnnnnnnnnnnnnnnnnnnnnnnnnnnnnnnnnnnnnnnnnnnnnnnnnnnnnnnnnnnnnnnnnnnnnnnnnnnnnnnnnnnnnnnnnnnnnnnnnnnnnnnnnnnnnnnnnnnnnnnnnnnnnnnnnnnnnnnnnnnnnnnnnnnnnnnnnnnnnnnnnnnnnnnnnnnnnnnnnnnnnnnnnnnnnnnnnnnnnnnnnnnnnnnnnnnnnnnnnnnnnnnnnnnnnnnnnnnnnnnnnnnnnnnnnnnnnnnnnnnnnnnnnnnnnnnnnnnnnnnnnnnnnnnnnnnnnnnnnnnnnnnnnnnnnnnnnnnnnnnnnnnnnnnnnnnnnnnnnnnnnnnnnnnnnnnnnnnnnnnnnnnnnnnnnnnnnnnnnnnnnnnnnnnnnnnnnnnnnnnnnnnnnnnnnnnnnnnnnnnnnnnnnnnnnnnnnnnnnnnnnnnnnnnnnnnnnnnnnnnnnnnnnnnnnnnnnnnnnnnnnnnnnnnnnnnnnnnnnnnnnnnnnnnnnnnnnnnnnnnnnnnnnnnnnnnnnnnnnnnnnnnnnnnnnnnnnnnnnnnnnnnnnnnnnnnnnnnnnnnnnnnnnnnnnnnnnnnnnnnnnnnnnnnnnnnnnnnnnnnnnnnnnnnnnnnnnnnnnnnnnnnnnnnnnnnnnnnnnnnnnnnnnnnnnnnnnnnnnnnnnnnnnnnnnnnnnnnnnnnnnnnnnnnnnnnnnnnnnnnnnnnnnnnnnnnnnnnnnnnnnnnnnnnnnnnnnnnnnnnnnnnnnnnnnnnnnnnnnnnnnnnnnnnnnnnnnnnnnnnnnnnnnnnnnnnnnnnnnnnnnnnnnnnnnnnnnnnnnnnnnnnnnnnnnnnnnnnnnnnnnnnnnnnnnnnnnnnnnnnnnnnnnnnnnnnnnnnnnnnnnnnnnnnnnnnnnnnnnnnnnnnnnnnnnnnnnnnnnnnnnnnnnnnnnnnnnnnnnnnnnnnnnnnnnnnnnnnnnnnnnnnnnnnnnnnnnnnnnnnnnnnnnnnnnnnnnnnnnnnnnnnnnnnnnnnnnnnnnnnnnnnnnnnnnnnnnnnnnnnnnnnnnnnnnnnnnnnnnnnnnnnnnnnnnnnnnnnnnnnnnnnnnnnnnnnnnnnnnnnnnnnnnnnnnnnnnnnnnnnnnnnnnnnnnnnnnnnnnnnnnnnnnnnnnnnnnnnnnnnnnnnnnnnnnnnnnnnnnnnnnnnnnnnnnnnnnnnnnnnnnnnnnnnnnnnnnnnnnnnnnnnnnnnnnnnnnnnnnnnnnnnnnnnnnnnnnnnnnnnnnnnnnnnnnnnnnnnnnnnnnnnnnnnnnnnnnnnnnnnnnnnnnnnnnnnnnnnnnnnnnnnnnnnnnnnnnnnnnnnnnnnnnnnnnnnnnnnnnnnnnnnnnnnnnnnnnnnnnnnnnnnnnnnnnnnnnnnnnnnnnnnnnnnnnnnnnnnnnnnnnnnnnnnnnnnnnnnnnnnnnnnnnnnnnnnnnnnnnnnnnnnnnnnnnnnnnnnnnnnnnnnnnnnnnnnnnnnnnnnnnnnnnnnnnnnnnnnnnnnnnnnnnnnnnnnnnnnnnnnnnnnnnnnnnnnnnnnnnnnnnnnnnnnnnnnnnnnnnnnnnnnnnnnnnnnnnnnnnnnnnnnnnnnnnnnnnnnnnnnnnnnnnnnnnnnnnnnnnnnnnnnnnnnnnnnnnnnnnnnnnnnnnnnnnnnnnnnnnnnnnnnnnnnnnnnnnnnnnnnnnnnnnnnnnnnnnnnnnnnnnnnnnnnnnnnnnnnnnnnnnnnnnnnnnnnnnnnnnnnnnnnnnnnnnnnnnnnnnnnnnnnnnnnnnnnnnnnnnnnnnnnnnnnnnnnnnnnnnnnnnnnnnnnnnnnnnnnnnnnnnnnnnnnnnnnnnnnnnnnnnnnnnnnnnnnnnnnnnnnnnnnnnnnnnnnnnnnnnnnnnnnnnnnnnnnnnnnnnnnnnnnnnnnnnnnnnnnnnnnnnnnnnnnnnnnnnnnnnnnnnnnnnnnnnnnnnnnnnnnnnnnnnnnnnnnnnnnnnnnnnnnnnnnnnnnnnnnnnnnnnnnnnnnnnnnnnnnnnnnnnnnnnnnnnnnnnnnnnnnnnnnnnnnnnnnnnnnnnnnnnnnnnnnnnnnnnnnnnnnnnnnnnnnnnnnnnnnnnnnnnnnnnnnnnnnnnnnnnnnnnnnnnnnnnnnnnnnnnnnnnnnnnnnnnnnnnnnnnnnnnnnnnnnnnnnnnnnnnnnnnnnnnnnnnnnnnnnnnnnnnnnnnnnnnnnnnnnnnnnnnnnnnnnnnnnnnnnnnnnnnnnnnnnnnnnnnnnnnnnnnnnnnnnnnnnnnnnnnnnnnnnnnnnnnnnnnnnnnnnnnnnnnnnnnnnnnnnnnnnnnnnnnnnnnnnnnnnnnnnnnnnnnnnnnnnnnnnnnnnnnnnnnnnnnnnnnnnnnnnnnnnnnnnnnnnnnnnnnnnnnnnnnnnnnnnnnnnnnnnnnnnnnnnnnnnnnnnnnnnnnnnnnnnnnnnnnnnnnnnnnnnnnnnnnnnnnnnnnnnnnnnnnnnnnnnnnnnnnnnnnnnnnnnnnnnnnnnnnnnnnnnnnnnnnnnnnnnnnnnnnnnnnnnnnnnnnnnnnnnnnnnnnnnnnnnnnnnnnnnnnnnnnnnnnnnnnnnnnnnnnnnnnnnnnnnnnnnnnnnnnnnnnnnnnnnnnnnnnnnnnnnnnnnnnnnnnnnnnnnnnnnnnnnnnnnnnnnnnnnnnnnnnnnnnnnnnnnnnnnnnnnnnnnnnnnnnnnnnnnnnnnnnnnnnnnnnnnnnnnnnnnnnnnnnnnnnnnnnnnnnnnnnnnnnnnnnnnnnnnnnnnnnnnnnnnnnnnnnnnnnnnnnnnnnnnnnnnnnnnnnnnnnnnnnnnnnnnnnnnnnnnnnnnnnnnnnnnnnnnnnnnnnnnnnnnnnnnnnnnnnnnnnnnnnnnnnnnnnnnnnnnnnnnnnnnnnnnnnnnnnnnnnnnnnnnnnnnnnnnnnnnnnnnnnnnnnnnnnnnnnnnnnnnnnnnnnnnnnnnnnnnnnnnnnnnnnnnnnnnnnnnnnnnnnnnnnnnnnnnnnnnnnnnnnnnnnnnnnnnnnnnnnnnnnnnnnnnnnnnnnnnnnnnnnnnnnnnnnnnnnnnnnnnnnnnnnnnnnnnnnnnnnnnnnnnnnnnnnnnnnnnnnnnnnnnnnnnnnnnnnnnnnnnnnnnnnnnnnnnnnnnnnnnnnnnnnnnnnnnnnnnnnnnnnnnnnnnnnnnnnnnnnnnnnnnnnnnnnnnnnnnnnnnnnnnnnnnnnnnnnnnnnnnnnnnnnnnnnnnnnnnnnnnnnnnnnnnnnnnnnnnnnnnnnnnnnnnnnnnnnnnnnnnnnnnnnnnnnnnnnnnnnnnnnnnnnnnnnnnnnnnnnnnnnnnnnnnnnnnnnnnnnnnnnnnnnnnnnnnnnnnnnnnnnnnnnnnnnnnnnnnnnnnnnnnnnnnnnnnnnnnnnnnnnnnnnnnnnnnnnnnnnnnnnnnnnnnnnnnnnnnnnnnnnnnnnnnnnnnnnnnnnnnnnnnnnnnnnnnnnnnnnnnnnnnnnnnnnnnnnnnnnnnnnnnnnnnnnnnnnnnnnnnnnnnnnnnnnnnnnnnnnnnnnnnnnnnnnnnnnnnnnnnnnnnnnnnnnnnnnnnnnnnnnnnnnnnnnnnnnnnnnnnnnnnnnnnnnnnnnnnnnnnnnnnnnnnnnnnnnnnnnnnnnnnnnnnnnnnnnnnnnnnnnnnnnnnnnnnnnnnnnnnnnnnnnnnnnnnnnnnnnnnnnnnnnnnnnnnnnnnnnnnnnnnnnnnnnnnnnnnnnnnnnnnnnnnnnnnnnnnnnnnnnnnnnnnnnnnnnnnnnnnnnnnnnnnnnnnnnnnnnnnnnnnnnnnnnnnnnnnnnnnnnnnnnnnnnnnnnnnnnnnnnnnnnnnnnnnnnnnnnnnnnnnnnnnnnnnnnnnnnnnnnnnnnnnnnnnnnnnnnnnnnnnnnnnnnnnnnnnnnnnnnnnnnnnnnnnnnnnnnnnnnnnnnnnnnnnnnnnnnnnnnnnnnnnnnnnnnnnnnnnnnnnnnnnnnnnnnnnnnnnnnnnnnnnnnnnnnnnnnnnnnnnnnnnnnnnnnnnnnnnnnnnnnnnnnnnnnnnnnnnnnnnnnnnnnnnnnnnnnnnnnnnnnnnnnnnnnnnnnnnnnnnnnnnnnnnnnnnnnnnnnnnnnnnnnnnnnnnnnnnnnnnnnnnnnnnnnnnnnnnnnnnnnnnnnnnnnnnnnnnnnnnnnnnnnnnnnnnnnnnnnnnnnnnnnnnnnnnnnnnnnnnnnnnnnnnnnnnnnnnnnnnnnnnnnnnnnnnnnnnnnnnnnnnnnnnnnnnnnnnnnnnnnnnnnnnnnnnnnnnnnnnnnnnnnnnnnnnnnnnnnnnnnnnnnnnnnnnnnnnnnnnnnnnnnnnnnnnnnnnnnnnnnnnnnnnnnnnnnnnnnnnnnnnnnnnnnnnnnnnnnnnnnnnnnnnnnnnnnnnnnnnnnnnnnnnnnnnnnnnnnnnnnnnnnnnnnnnnnnnnnnnnnnnnnnnnnnnnnnnnnnnnnnnnnnnnnnnnnnnnnnnnnnnnnnnnnnnnnnnnnnnnnnnnnnnnnnnnnnnnnnnnnnnnnnnnnnnnnnnnnnnnnnnnnnnnnnnnnnnnnnnnnnnnnnnnnnnnnnnnnnnnnnnnnnnnnnnnnnnnnnnnnnnnnnnnnnnnnnnnnnnnnnnnnnnnnnnnnnnnnnnnnnnnnnnnnnnnnnnnnnnnnnnnnnnnnnnnnnnnnnnnnnnnnnnnnnnnnnnnnnnnnnnnnnnnnnnnnnnnnnnnnnnnnnnnnnnnnnnnnnnnnnnnnnnnnnnnnnnnnnnnnnnnnnnnnnnnnnnnnnnnnnnnnnnnnnnnnnnnnnnnnnnnnnnnnnnnnnnnnnnnnnnnnnnnnnnnnnnnnnnnnnnnnnnnnnnnnnnnnnnnnnnnnnnnnnnnnnnnnnnnnnnnnnnnnnnnnnnnnnnnnnnnnnnnnnnnnnnnnnnnnnnnnnnnnnnnnnnnnnnnnnnnnnnnnnnnnnnnnnnnnnnnnnnnnnnnnnnnnnnnnnnnnnnnnnnnnnnnnnnnnnnnnnnnnnnnnnnnnnnnnnnnnnnnnnnnnnnnnnnnnnnnnnnnnnnnnnnnnnnnnnnnnnnnnnnnnnnnnnnnnnnnnnnnnnnnnnnnnnnnnnnnnnnnnnnnnnnnnnnnnnnnnnnnnnnnnnnnnnnnnnnnnnnnnnnnnnnnnnnnnnnnnnnnnnnnnnnnnnnnnnnnnnnnnnnnnnnnnnnnnnnnnnnnnnnnnnnnnnnnnnnnnnnnnnnnnnnnnnnnnnnnnnnnnnnnnnnnnnnnnnnnnnnnnnnnnnnnnnnnnnnnnnnnnnnnnnnnnnnnnnnnnnnnnnnnnnnnnnnnnnnnnnnnnnnnnnnnnnnnnnnnnnnnnnnnnnnnnnnnnnnnnnnnnnnnnnnnnnnnnnnnnnnnnnnnnnnnnnnnnnnnnnnnnnnnnnnnnnnnnnnnnnnnnnnnnnnnnnnnnnnnnnnnnnnnnnnnnnnnnnnnnnnnnnnnnnnnnnnnnnnnnnnnnnnnnnnnnnnnnnnnnnnnnnnnnnnnnnnnnnnnnnnnnnnnnnnnnnnnnnnnnnnnnnnnnnnnnnnnnnnnnnnnnnnnnnnnnnnnnnnnnnnnnnnnnnnnnnnnnnnnnnnnnnnnnnnnnnnnnnnnnnnnnnnnnnnnnnnnnnnnnnnnnnnnnnnnnnnnnnnnnnnnnnnnnnnnnnnnnnnnnnnnnnnnnnnnnnnnnnnnnnnnnnnnnnnnnnnnnnnnnnnnnnnnnnnnnnnnnnnnnnnnnnnnnnnnnnnnnnnnnnnnnnnnnnnnnnnnnnnnnnnnnnnnnnnnnnnnnnnnnnnnnnnnnnnnnnnnnnnnnnnnnnnnnnnnnnnnnnnnnnnnnnnnnnnnnnnnnnnnnnnnnnnnnnnnnnnnnnnnnnnnnnnnnnnnnnnnnnnnnnnnnnnnnnnnnnnnnnnnnnnnnnnnnnnnnnnnnnnnnnnnnnnnnnnnnnnnnnnnnnnnnnnnnnnnnnnnnnnnnnnnnnnnnnnnnnnnnnnnnnnnnnnnnnnnnnnnnnnnnnnnnnnnnnnnnnnnnnnnnnnnnnnnnnnnnnnnnnnnnnnnnnnnnnnnnnnnnnnnnnnnnnnnnnnnnnnnnnnnnnnnnnnnnnnnnnnnnnnnnnnnnnnnnnnnnnnnnnnnnnnnnnnnnnnnnnnnnnnnnnnnnnnnnnnnnnnnnnnnnnnnnnnnnnnnnnnnnnnnnnnnnnnnnnnnnnnnnnnnnnnnnnnnnnnnnnnnnnnnnnnnnnnnnnnnnnnnnnnnnnnnnnnnnnnnnnnnnnnnnnnnnnnnnnnnnnnnnnnnnnnnnnnnnnnnnnnnnnnnnnnnnnnnnnnnnnnnnnnnnnnnnnnnnnnnnnnnnnnnnnnnnnnnnnnnnnnnnnnnnnnnnnnnnnnnnnnnnnnnnnnnnnnnnnnnnnnnnnnnnnnnnnnnnnnnnnnnnnnnnnnnnnnnnnnnnnnnnnnnnnnnnnnnnnnnnnnnnnnnnnnnnnnnnnnnnnnnnnnnnnnnnnnnnnnnnnnnnnnnnnnnnnnnnnnnnnnnnnnnnnnnnnnnnnnnnnnnnnnnnnnnnnnnnnnnnnnnnnnnnnnnnnnnnnnnnnnnnnnnnnnnnnnnnnnnnnnnnnnnnnnnnnnnnnnnnnnnnnnnnnnnnnnnnnnnnnnnnnnnnnnnnnnnnnnnnnnnnnnnnnnnnnnnnnnnnnnnnnnnnnnnnnnnnnnnnnnnnnnnnnnnnnnnnnnnnnnnnnnnnnnnnnnnnnnnnnnnnnnnnnnnnnnnnnnnnnnnnnnnnnnnnnnnnnnnnnnnnnnnnnnnnnnnnnnnnnnnnnnnnnnnnnnnnnnnnnnnnnnnnnnnnnnnnnnnnnnnnnnnnnnnnnnnnnnnnnnnnnnnnnnnnnnnnnnnnnnnnnnnnnnnnnnnnnnnnnnnnnnnnnnnnnnnnnnnnnnnnnnnnnnnnnnnnnnnnnnnnnnnnnnnnnnnnnnnnnnnnnnnnnnnnnnnnnnnnnnnnnnnnnnnnnnnnnnnnnnnnnnnnnnnnnnnnnnnnnnnnnnnnnnnnnnnnnnnnnnnnnnnnnnnnnnnnnnnnnnnnnnnnnnnnnnnnnnnnnnnnnnnnnnnnnnnnnnnnnnnnnnnnnnnnnnnnnnnnnnnnnnnnnnnnnnnnnnnnnnnnnnnnnnnnnnnnnnnnnnnnnnnnnnnnnnnnnnnnnnnnnnnnnnnnnnnnnnnnnnnnnnnnnnnnnnnnnnnnnnnnnnnnnnnnnnnnnnnnnnnnnnnnnnnnnnnnnnnnnnnnnnnnnnnnnnnnnnnnnnnnnnnnnnnnnnnnnnnnnnnnnnnnnnnnnnnnnnnnnnnnnnnnnnnnnnnnnnnnnnnnnnnnnnnnnnnnnnnnnnnnnnnnnnnnnnnnnnnnnnnnnnnnnnnnnnnnnnnnnnnnnnnnnnnnnnnnnnnnnnnnnnnnnnnnnnnnnnnnnnnnnnnnnnnnnnnnnnnnnnnnnnnnnnnnnnnnnnnnnnnnnnnnnnnnnnnnnnnnnnnnnnnnnnnnnnnnnnnnnnnnnnnnnnnnnnnnnnnnnnnnnnnnnnnnnnnnnnnnnnnnnnnnnnnnnnnnnnnnnnnnnnnnnnnnnnnnnnnnnnnnnnnnnnnnnnnnnnnnnnnnnnnnnnnnnnnnnnnnnnnnnnnnnnnnnnnnnnnnnnnnnnnnnnnnnnnnnnnnnnnnnnnnnnnnnnnnnnnnnnnnnnnnnnnnnnnnnnnnnnnnnnnnnnnnnnnnnnnnnnnnnnnnnnnnnnnnnnnnnnnnnnnnnnnnnnnnnnnnnnnnnnnnnnnnnnnnnnnnnnnnnnnnnnnnnnnnnnnnnnnnnnnnnnnnnnnnnnnnnnnnnnnnnnnnnnnnnnnnnnnnnnnnnnnnnnnnnnnnnnnnnnnnnnnnnnnnnnnnnnnnnnnnnnnnnnnnnnnnnnnnnnnnnnnnnnnnnnnnnnnnnnnnnnnnnnnnnnnnnnnnnnnnnnnnnnnnnnnnnnnnnnnnnnnnnnnnnnnnnnnnnnnnnnnnnnnnnnnnnnnnnnnnnnnnnnnnnnnnnnnnnnnnnnnnnnnnnnnnnnnnnnnnnnnnnnnnnnnnnnnnnnnnnnnnnnnnnnnnnnnnnnnnnnnnnnnnnnnnnnnnnnnnnnnnnnnnnnnnnnnnnnnnnnnnnnnnnnnnnnnnnnnnnnnnnnnnnnnnnnnnnnnnnnnnnnnnnnnnnnnnnnnnnnnnnnnnnnnnnnnnnnnnnnnnnnnnnnnnnnnnnnnnnnnnnnnnnnnnnnnnnnnnnnnnnnnnnnnnnnnnnnnnnnnnnnnnnnnnnnnnnnnnnnnnnnnnnnnnnnnnnnnnnnnnnnnnnnnnnnnnnnnnnnnnnnnnnnnnnnnnnnnnnnnnnnnnnnnnnnnnnnnnnnnnnnnnnnnnnnnnnnnnnnnnnnnnnnnnnnnnnnnnnnnnnnnnnnnnnnnnnnnnnnnnnnnnnnnnnnnnnnnnnnnnnnnnnnnnnnnnnnnnnnnnnnnnnnnnnnnnnnnnnnnnnnnnnnnnnnnnnnnnnnnnnnnnnnnnnnnnnnnnnnnnnnnnnnnnnnnnnnnnnnnnnnnnnnnnnnnnnnnnnnnnnnnnnnnnnnnnnnnnnnnnnnnnnnnnnnnnnnnnnnnnnnnnnnnnnnnnnnnnnnnnnnnnnnnnnnnnnnnnnnnnnnnnnnnnnnnnnnnnnnnnnnnnnnnnnnnnnnnnnnnnnnnnnnnnnnnnnnnnnnnnnnnnnnnnnnnnnnnnnnnnnnnnnnnnnnnnnnnnnnnnnnnnnnnnnnnnnnnnnnnnnnnnnnnnnnnnnnnnnnnnnnnnnnnnnnnnnnnnnnnnnnnnnnnnnnnnnnnnnnnnnnnnnnnnnnnnnnnnnnnnnnnnnnnnnnnnnnnnnnnnnnnnnnnnnnnnnnnnnnnnnnnnnnnnnnnnnnnnnnnnnnnnnnnnnnnnnnnnnnnnnnnnnnnnnnnnnnnnnnnnnnnnnnnnnnnnnnnnnnnnnnnnnnnnnnnnnnnnnnnnnnnnnnnnnnnnnnnnnnnnnnnnnnnnnnnnnnnnnnnnnnnnnnnnnnnnnnnnnnnnnnnnnnnnnnnnnnnnnnnnnnnnnnnnnnnnnnnnnnnnnnnnnnnnnnnnnnnnnnnnnnnnnnnnnnnnnnnnnnnnnnnnnnnnnnnnnnnnnnnnnnnnnnnnnnnnnnnnnnnnnnnnnnnnnnnnnnnnnnnnnnnnnnnnnnnnnnnnnnnnnnnnnnnnnnnnnnnnnnnnnnnnnnnnnnnnnnnnnnnnnnnnnnnnnnnnnnnnnnnnnnnnnnnnnnnnnnnnnnnnnnnnnnnnnnnnnnnnnnnnnnnnnnnnnnnnnnnnnnnnnnnnnnnnnnnnnnnnnnnnnnnnnnnnnnnnnnnnnnnnnnnnnnnnnnnnnnnnnnnnnnnnnnnnnnnnnnnnnnnnnnnnnnnnnnnnnnnnnnnnnnnnnnnnnnnnnnnnnnnnnnnnnnnnnnnnnnnnnnnnnnnnnnnnnnnnnnnnnnnnnnnnnnnnnnnnnnnnnnnnnnnnnnnnnnnnnnnnnnnnnnnnnnnnnnnnnnnnnnnnnnnnnnnnnnnnnnnnnnnnnnnnnnnnnnnnnnnnnnnnnnnnnnnnnnnnnnnnnnnnnnnnnnnnnnnnnnnnnnnnnnnnnnnnnnnnnnnnnnnnnnnnnnnnnnnnnnnnnnnnnnnnnnnnnnnnnnnnnnnnnnnnnnnnnnnnnnnnnnnnnnnnnnnnnnnnnnnnnnnnnnnnnnnnnnnnnnnnnnnnnnnnnnnnnnnnnnnnnnnnnnnnnnnnnnnnnnnnnnnnnnnnnnnnnnnnnnnnnnnnnnnnnnnnnnnnnnnnnnnnnnnnnnnnnnnnnnnnnnnnnnnnnnnnnnnnnnnnnnnnnnnnnnnnnnnnnnnnnnnnnnnnnnnnnnnnnnnnnnnnnnnnnnnnnnnnnnnnnnnnnnnnnnnnnnnnnnnnnnnnnnnnnnnnnnnnnnnnnnnnnnnnnnnnnnnnnnnnnnnnnnnnnnnnnnnnnnnnnnnnnnnnnnnnnnnnnnnnnnnnnnnnnnnnnnnnnnnnnnnnnnnnnnnnnnnnnnnnnnnnnnnnnnnnnnnnnnnnnnnnnnnnnnnnnnnnnnnnnnnnnnnnnnnnnnnnnnnnnnnnnnnnnnnnnnnnnnnnnnnnnnnnnnnnnnnnnnnnnnnnnnnnnnnnnnnnnnnnnnnnnnnnnnnnnnnnnnnnnnnnnnnnnnnnnnnnnnnnnnnnnnnnnnnnnnnnnnnnnnnnnnnnnnnnnnnnnnnnnnnnnnnnnnnnnnnnnnnnnnnnnnnnnnnnnnnnnnnnnnnnnnnnnnnnnnnnnnnnnnnnnnnnnnnnnnnnnnnnnnnnnnnnnnnnnnnnnnnnnnnnnnnnnnnnnnnnnnnnnnnnnnnnnnnnnnnnnnnnnnnnnnnnnnnnnnnnnnnnnnnnnnnnnnnnnnnnnnnnnnnnnnnnnnnnnnnnnnnnnnnnnnnnnnnnnnnnnnnnnnnnnnnnnnnnnnnnnnnnnnnnnnnnnnnnnnnnnnnnnnnnnnnnnnnnnnnnnnnnnnnnnnnnnnnnnnnnnnnnnnnnnnnnnnnnnnnnnnnnnnnnnnnnnnnnnnnnnnnnnnnnnnnnnnnnnnnnnnnnnnnnnnnnnnnnnnnnnnnnnnnnnnnnnnnnnnnnnnnnnnnnnnnnnnnnnnnnnnnnnnnnnnnnnnnnnnnnnnnnnnnnnnnnnnnnnnnnnnnnnnnnnnnnnnnnnnnnnnnnnnnnnnnnnnnnnnnnnnnnnnnnnnnnnnnnnnnnnnnnnnnnnnnnnnnnnnnnnnnnnnnnnnnnnnnnnnnnnnnnnnnnnnnnnnnnnnnnnnnnnnnnnnnnnnnnnnnnnnnnnnnnnnnnnnnnnnnnnnnnnnnnnnnnnnnnnnnnnnnnnnnnnnnnnnnnnnnnnnnnnnnnnnnnnnnnnnnnnnnnnnnnnnnnnnnnnnnnnnnnnnnnnnnnnnnnnnnnnnnnnnnnnnnnnnnnnnnnnnnnnnnnnnnnnnnnnnnnnnnnnnnnnnnnnnnnnnnnnnnnnnnnnnnnnnnnnnnnnnnnnnnnnnnnnnnnnnnnnnnnnnnnnnnnnnnnnnnnnnnnnnnnnnnnnnnnnnnnnnnnnnnnnnnnnnnnnnnnnnnnnnnnnnnnnnnnnnnnnnnnnnnnnnnnnnnnnnnnnnnnnnnnnnnnnnnnnnnnnnnnnnnnnnnnnnnnnnnnnnnnnnnnnnnnnnnnnnnnnnnnnnnnnnnnnnnnnnnnnnnnnnnnnnnnnnnnnnnnnnnnnnnnnnnnnnnnnnnnnnnnnnnnnnnnnnnnnnnnnnnnnnnnnnnnnnnnnnnnnnnnnnnnnnnnnnnnnnnnnnnnnnnnnnnnnnnnnnnnnnnnnnnnnnnnnnnnnnnnnnnnnnnnnnnnnnnnnnnnnnnnnnnnnnnnnnnnnnnnnnnnnnnnnnnnnnnnnnnnnnnnnnnnnnnnnnnnnnnnnnnnnnnnnnnnnnnnnnnnnnnnnnnnnnnnnnnnnnnnnnnnnnnnnnnnnnnnnnnnnnnnnnnnnnnnnnnnnnnnnnnnnnnnnnnnnnnnnnnnnnnnnnnnnnnnnnnnnnnnnnnnnnnnnnnnnnnnnnnnnnnnnnnnnnnnnnnnnnnnnnnnnnnnnnnnnnnnnnnnnnnnnnnnnnnnnnnnnnnnnnnnnnnnnnnnnnnnnnnnnnnnnnnnnnnnnnnnnnnnnnnnnnnnnnnnnnnnnnnnnnnnnnnnnnnnnnnnnnnnnnnnnnnnnnnnnnnnnnnnnnnnnnnnnnnnnnnnnnnnnnnnnnnnnnnnnnnnnnnnnnnnnnnnnnnnnnnnnnnnnnnnnnnnnnnnnnnnnnnnnnnnnnnnnnnnnnnnnnnnnnnnnnnnnnnnnnnnnnnnnnnnnnnnnnnnnnnnnnnnnnnnnnnnnnnnnnnnnnnnnnnnnnnnnnnnnnnnnnnnnnnnnnnnnnnnnnnnnnnnnnnnnnnnnnnnnnnnnnnnnnnnnnnnnnnnnnnnnnnnnnnnnnnnnnnnnnnnnnnnnnnnnnnnnnnnnnnnnnnnnnnnnnnnnnnnnnnnnnnnnnnnnnnnnnnnnnnnnnnnnnnnnnnnnnnnnnnnnnnnnnnnnnnnnnnnnnnnnnnnnnnnnnnnnnnnnnnnnnnnnnnnnnnnnnnnnnnnnnnnnnnnnnnnnnnnnnnnnnnnnnnnnnnnnnnnnnnnnnnnnnnnnnnnnnnnnnnnnnnnnnnnnnnnnnnnnnnnnnnnnnnnnnnnnnnnnnnnnnnnnnnnnnnnnnnnnnnnnnnnnnnnnnnnnnnnnnnnnnnnnnnnnnnnnnnnnnnnnnnnnnnnnnnnnnnnnnnnnnnnnnnnnnnnnnnnnnnnnnnnnnnnnnnnnnnnnnnnnnnnnnnnnnnnnnnnnnnnnnnnnnnnnnnnnnnnnnnnnnnnnnnnnnnnnnnnnnnnnnnnnnnnnnnnnnnnnnnnnnnnnnnnnnnnnnnnnnnnnnnnnnnnnnnnnnnnnnnnnnnnnnnnnnnnnnnnnnnnnnnnnnnnnnnnnnnnnnnnnnnnnnnnnnnnnnnnnnnnnnnnnnnnnnnnnnnnnnnnnnnnnnnnnnnnnnnnnnnnnnnnnnnnnnnnnnnnnnnnnnnnnnnnnnnnnnnnnnnnnnnnnnnnnnnnnnnnnnnnnnnnnnnnnnnnnnnnnnnnnnnnnnnnnnnnnnnnnnnnnnnnnnnnnnnnnnnnnnnnnnnnnnnnnnnnnnnnnnnnnnnnnnnnnnnnnnnnnnnnnnnnnnnnnnnnnnnnnnnnnnnnnnnnnnnnnnnnnnnnnnnnnnnnnnnnnnnnnnnnnnnnnnnnnnnnnnnnnnnnnnnnnnnnnnnnnnnnnnnnnnnnnnnnnnnnnnnnnnnnnnnnnnnnnnnnnnnnnnnnnnnnnnnnnnnnnnnnnnnnnnnnnnnnnnnnnnnnnnnnnnnnnnnnnnnnnnnnnnnnnnnnnnnnnnnnnnnnnnnnnnnnnnnnnnnnnnnnnnnnnnnnnnnnnnnnnnnnnnnnnnnnnnnnnnnnnnnnnnnnnnnnnnnnnnnnnnnnnnnnnnnnnnnnnnnnnnnnnnnnnnnnnnnnnnnnnnnnnnnnnnnnnnnnnnnnnnnnnnnnnnnnnnnnnnnnnnnnnnnnnnnnnnnnnnnnnnnnnnnnnnnnnnnnnnnnnnnnnnnnnnnnnnnnnnnnnnnnnnnnnnnnnnnnnnnnnnnnnnnnnnnnnnnnnnnnnnnnnnnnnnnnnnnnnnnnnnnnnnnnnnnnnnnnnnnnnnnnnnnnnnnnnnnnnnnnnnnnnnnnnnnnnnnnnnnnnnnnnnnnnnnnnnnnnnnnnnnnnnnnnnnnnnnnnnnnnnnnnnnnnnnnnnnnnnnnnnnnnnnnnnnnnnnnnnnnnnnnnnnnnnnnnnnnnnnnnnnnnnnnnnnnnnnnnnnnnnnnnnnnnnnnnnnnnnnnnnnnnnnnnnnnnnnnnnnnnnnnnnnnnnnnnnnnnnnnnnnnnnnnnnnnnnnnnnnnnnnnnnnnnnnnnnnnnnnnnnnnnnnnnnnnnnnnnnnnnnnnnnnnnnnnnnnnnnnnnnnnnnnnnnnnnnnnnnnnnnnnnnnnnnnnnnnnnnnnnnnnnnnnnnnnnnnnnnnnnnnnnnnnnnnnnnnnnnnnnnnnnnnnnnnnnnnnnnnnnnnnnnnnnnnnnnnnnnnnnnnnnnnnnnnnnnnnnnnnnnnnnnnnnnnnnnnnnnnnnnnnnnnnnnnnnnnnnnnnnnnnnnnnnnnnnnnnnnnnnnnnnnnnnnnnnnnnnnnnnnnnnnnnnnnnnnnnnnnnnnnnnnnnnnnnnnnnnnnnnnnnnnnnnnnnnnnnnnnnnnnnnnnnnnnnnnnnnnnnnnnnnnnnnnnnnnnnnnnnnnnnnnnnnnnnnnnnnnnnnnnnnnnnnnnnnnnnnnnnnnnnnnnnnnnnnnnnnnnnnnnnnnnnnnnnnnnnnnnnnnnnnnnnnnnnnnnnnnnnnnnnnnnnnnnnnnnnnnnnnnnnnnnnnnnnnnnnnnnnnnnnnnnnnnnnnnnnnnnnnnnnnnnnnnnnnnnnnnnnnnnnnnnnnnnnnnnnnnnnnnnnnnnnnnnnnnnnnnnnnnnnnnnnnnnnnnnnnnnnnnnnnnnnnnnnnnnnnnnnnnnnnnnnnnnnnnnnnnnnnnnnnnnnnnnnnnnnnnnnnnnnnnnnnnnnnnnnnnnnnnnnnnnnnnnnnnnnnnnnnnnnnnnnnnnnnnnnnnnnnnnnnnnnnnnnnnnnnnnnnnnnnnnnnnnnnnnnnnnnnnnnnnnnnnnnnnnnnnnnnnnnnnnnnnnnnnnnnnnnnnnnnnnnnnnnnnnnnnnnnnnnnnnnnnnnnnnnnnnnnnnnnnnnnnnnnnnnnnnnnnnnnnnnnnnnnnnnnnnnnnnnnnnnnnnnnnnnnnnnnnnnnnnnnnnnnnnnnnnnnnnnnnnnnnnnnnnnnnnnnnnnnnnnnnnnnnnnnnnnnnnnnnnnnnnnnnnnnnnnnnnnnnnnnnnnnnnnnnnnnnnnnnnnnnnnnnnnnnnnnnnnnnnnnnnnnnnnnnnnnnnnnnnnnnnnnnnnnnnnnnnnnnnnnnnnnnnnnnnnnnnnnnnnnnnnnnnnnnnnnnnnnnnnnnnnnnnnnnnnnnnnnnnnnnnnnnnnnnnnnnnnnnnnnnnnnnnnnnnnnnnnnnnnnnnnnnnnnnnnnnnnnnnnnnnnnnnnnnnnnnnnnnnnnnnnnnnnnnnnnnnnnnnnnnnnnnnnnnnnnnnnnnnnnnnnnnnnnnnnnnnnnnnnnnnnnnnnnnnnnnnnnnnnnnnnnnnnnnnnnnnnnnnnnnnnnnnnnnnnnnnnnnnnnnnnnnnnnnnnnnnnnnnnnnnnnnnnnnnnnnnnnnnnnnnnnnnnnnnnnnnnnnnnnnnnnnnnnnnnnnnnnnnnnnnnnnnnnnnnnnnnnnnnnnnnnnnnnnnnnnnnnnnnnnnnnnnnnnnnnnnnnnnnnnnnnnnnnnnnnnnnnnnnnnnnnnnnnnnnnnnnnnnnnnnnnnnnnnnnnnnnnnnnnnnnnnnnnnnnnnnnnnnnnnnnnnnnnnnnnnnnnnnnnnnnnnnnnnnnnnnnnnnnnnnnnnnnnnnnnnnnnnnnnnnnnnnnnnnnnnnnnnnnnnnnnnnnnnnnnnnnnnnnnnnnnnnnnnnnnnnnnnnnnnnnnnnnnnnnnnnnnnnnnnnnnnnnnnnnnnnnnnnnnnnnnnnnnnnnnnnnnnnnnnnnnnnnnnnnnnnnnnnnnnnnnnnnnnnnnnnnnnnnnnnnnnnnnnnnnnnnnnnnnnnnnnnnnnnnnnnnnnnnnnnnnnnnnnnnnnnnnnnnnnnnnnnnnnnnnnnnnnnnnnnnnnnnnnnnnnnnnnnnnnnnnnnnnnnnnnnnnnnnnnnnnnnnnnnnnnnnnnnnnnnnnnnnnnnnnnnnnnnnnnnnnnnnnnnnnnnnnnnnnnnnnnnnnnnnnnnnnnnnnnnnnnnnnnnnnnnnnnnnnnnnnnnnnnnnnnnnnnnnnnnnnnnnnnnnnnnnnnnnnnnnnnnnnnnnnnnnnnnnnnnnnnnnnnnnnnnnnnnnnnnnnnnnnnnnnnnnnnnnnnnnnnnnnnnnnnnnnnnnnnnnnnnnnnnnnnnnnnnnnnnnnnnnnnnnnnnnnnnnnnnnnnnnnnnnnnnnnnnnnnnnnnnnnnnnnnnnnnnnnnnnnnnnnnnnnnnnnnnnnnnnnnnnnnnnnnnnnnnnnnnnnnnnnnnnnnnnnnnnnnnnnnnnnnnnnnnnnnnnnnnnnnnnnnnnnnnnnnnnnnnnnnnnnnnnnnnnnnnnnnnnnnnnnnnnnnnnnnnnnnnnnnnnnnnnnnnnnnnnnnnnnnnnnnnnnnnnnnnnnnnnnnnnnnnnnnnnnnnnnnnnnnnnnnnnnnnnnnnnnnnnnnnnnnnnnnnnnnnnnnnnnnnnnnnnnnnnnnnnnnnnnnnnnnnnnnnnnnnnnnnnnnnnnnnnnnnnnnnnnnnnnnnnnnnnnnnnnnnnnnnnnnnnnnnnnnnnnnnnnnnnnnnnnnnnnnnnnnnnnnnnnnnnnnnnnnnnnnnnnnnnnnnnnnnnnnnnnnnnnnnnnnnnnnnnnnnnnnnnnnnnnnnnnnnnnnnnnnnnnnnnnnnnnnnnnnnnnnnnnnnnnnnnnnnnnnnnnnnnnnnnnnnnnnnnnnnnnnnnnnnnnnnnnnnnnnnnnnnnnnnnnnnnnnnnnnnnnnnnnnnnnnnnnnnnnnnnnnnnnnnnnnnnnnnnnnnnnnnnnnnnnnnnnnnnnnnnnnnnnnnnnnnnnnnnnnnnnnnnnnnnnnnnnnnnnnnnnnnnnnnnnnnnnnnnnnnnnnnnnnnnnnnnnnnnnnnnnnnnnnnnnnnnnnnnnnnnnnnnnnnnnnnnnnnnnnnnnnnnnnnnnnnnnnnnnnnnnnnnnnnnnnnnnnnnnnnnnnnnnnnnnnnnnnnnnnnnnnnnnnnnnnnnnnnnnnnnnnnnnnnnnnnnnnnnnnnnnnnnnnnnnnnnnnnnnnnnnnnnnnnnnnnnnnnnnnnnnnnnnnnnnnnnnnnnnnnnnnnnnnnnnnnnnnnnnnnnnnnnnnnnnnnnnnnnnnnnnnnnnnnnnnnnnnnnnnnnnnnnnnnnnnnnnnnnnnnnnnnnnnnnnnnnnnnnnnnnnnnnnnnnnnnnnnnnnnnnnnnnnnnnnnnnnnnnnnnnnnnnnnnnnnnnnnnnnnnnnnnnnnnnnnnnnnnnnnnnnnnnnnnnnnnnnnnnnnnnnnnnnnnnnnnnnnnnnnnnnnnnnnnnnnnnnnnnnnnnnnnnnnnnnnnnnnnnnnnnnnnnnnnnnnnnnnnnnnnnnnnnnnnnnnnnnnnnnnnnnnnnnnnnnnnnnnnnnnnnnnnnnnnnnnnnnnnnnnnnnnnnnnnnnnnnnnnnnnnnnnnnnnnnnnnnnnnnnnnnnnnnnnnnnnnnnnnnnnnnnnnnnnnnnnnnnnnnnnnnnnnnnnnnnnnnnnnnnnnnnnnnnnnnnnnnnnnnnnnnnnnnnnnnnnnnnnnnnnnnnnnnnnnnnnnnnnnnnnnnnnnnnnnnnnnnnnnnnnnnnnnnnnnnnnnnnnnnnnnnnnnnnnnnnnnnnnnnnnnnnnnnnnnnnnnnnnnnnnnnnnnnnnnnnnnnnnnnnnnnnnnnnnnnnnnnnnnnnnnnnnnnnnnnnnnnnnnnnnnnnnnnnnnnnnnnnnnnnnnnnnnnnnnnnnnnnnnnnnnnnnnnnnnnnnnnnnnnnnnnnnnnnnnnnnnnnnnnnnnnnnnnnnnnnnnnnnnnnnnnnnnnnnnnnnnnnnnnnnnnnnnnnnnnnnnnnnnnnnnnnnnnnnnnnnnnnnnnnnnnnnnnnnnnnnnnnnnnnnnnnnnnnnnnnnnnnnnnnnnnnnnnnnnnnnnnnnnnnnnnnnnnnnnnnnnnnnnnnnnnnnnnnnnnnnnnnnnnnnnnnnnnnnnnnnnnnnnnnnnnnnnnnnnnnnnnnnnnnnnnnnnnnnnnnnnnnnnnnnnnnnnnnnnnnnnnnnnnnnnnnnnnnnnnnnnnnnnnnnnnnnnnnnnnnnnnnnnnnnnnnnnnnnnnnnnnnnnnnnnnnnnnnnnnnnnnnnnnnnnnnnnnnnnnnnnnnnnnnnnnnnnnnnnnnnnnnnnnnnnnnnnnnnnnnnnnnnnnnnnnnnnnnnnnnnnnnnnnnnnnnnnnnnnnnnnnnnnnnnnnnnnnnnnnnnnnnnnnnnnnnnnnnnnnnnnnnnnnnnnnnnnnnnnnnnnnnnnnnnnnnnnnnnnnnnnnnnnnnnnnnnnnnnnnnnnnnnnnnnnnnnnnnnnnnnnnnnnnnnnnnnnnnnnnnnnnnnnnnnnnnnnnnnnnnnnnnnnnnnnnnnnnnnnnnnnnnnnnnnnnnnnnnnnnnnnnnnnnnnnnnnnnnnnnnnnnnnnnnnnnnnnnnnnnnnnnnnnnnnnnnnnnnnnnnnnnnnnnnnnnnnnnnnnnnnnnnnnnnnnnnnnnnnnnnnnnnnnnnnnnnnnnnnnnnnnnnnnnnnnnnnnnnnnnnnnnnnnnnnnnnnnnnnnnnnnnnnnnnnnnnnnnnnnnnnnnnnnnnnnnnnnnnnnnnnnnnnnnnnnnnnnnnnnnnnnnnnnnnnnnnnnnnnnnnnnnnnnnnnnnnnnnnnnnnnnnnnnnnnnnnnnnnnnnnnnnnnnnnnnnnnnnnnnnnnnnnnnnnnnnnnnnnnnnnnnnnnnnnnnnnnnnnnnnnnnnnnnnnnnnnnnnnnnnnnnnnnnnnnnnnnnnnnnnnnnnnnnnnnnnnnnnnnnnnnnnnnnnnnnnnnnnnnnnnnnnnnnnnnnnnnnnnnnnnnnnnnnnnnnnnnnnnnnnnnnnnnnnnnnnnnnnnnnnnnnnnnnnnnnnnnnnnnnnnnnnnnnnnnnnnnnnnnnnnnnnnnnnnnnnnnnnnnnnnnnnnnnnnnnnnnnnnnnnnnnnnnnnnnnnnnnnnnnnnnnnnnnnnnnnnnnnnnnnnnnnnnnnnnnnnnnnnnnnnnnnnnnnnnnnnnnnnnnnnnnnnnnnnnnnnnnnnnnnnnnnnnnnnnnnnnnnnnnnnnnnnnnnnnnnnnnnnnnnnnnnnnnnnnnnnnnnnnnnnnnnnnnnnnnnnnnnnnnnnnnnnnnnnnnnnnnnnnnnnnnnnnnnnnnnnnnnnnnnnnnnnnnnnnnnnnnnnnnnnnnnnnnnnnnnnnnnnnnnnnnnnnnnnnnnnnnnnnnnnnnnnnnnnnnnnnnnnnnnnnnnnnnnnnnnnnnnnnnnnnnnnnnnnnnnnnnnnnnnnnnnnnnnnnnnnnnnnnnnnnnnnnnnnnnnnnnnnnnnnnnnnnnnnnnnnnnnnnnnnnnnnnnnnnnnnnnnnnnnnnnnnnnnnnnnnnnnnnnnnnnnnnnnnnnnnnnnnnnnnnnnnnnnnnnnnnnnnnnnnnnnnnnnnnnnnnnnnnnnnnnnnnnnnnnnnnnnnnnnnnnnnnnnnnnnnnnnnnnnnnnnnnnnnnnnnnnnnnnnnnnnnnnnnnnnnnnnnnnnnnnnnnnnnnnnnnnnnnnnnnnnnnnnnnnnnnnnnnnnnnnnnnnnnnnnnnnnnnnnnnnnnnnnnnnnnnnnnnnnnnnnnnnnnnnnnnnnnnnnnnnnnnnnnnnnnnnnnnnnnnnnnnnnnnnnnnnnnnnnnnnnnnnnnnnnnnnnnnnnnnnnnnnnnnnnnnnnnnnnnnnnnnnnnnnnnnnnnnnnnnnnnnnnnnnnnnnnnnnnnnnnnnnnnnnnnnnnnnnnnnnnnnnnnnnnnnnnnnnnnnnnnnnnnnnnnnnnnnnnnnnnnnnnnnnnnnnnnnnnnnnnnnnnnnnnnnnnnnnnnnnnnnnnnnnnnnnnnnnnnnnnnnnnnnnnnnnnnnnnnnnnnnnnnnnnnnnnnnnnnnnnnnnnnnnnnnnnnnnnnnnnnnnnnnnnnnnnnnnnnnnnnnnnnnnnnnnnnnnnnnnnnnnnnnnnnnnnnnnnnnnnnnnnnnnnnnnnnnnnnnnnnnnnnnnnnnnnnnnnnnnnnnnnnnnnnnnnnnnnnnnnnnnnnnnnnnnnnnnnnnnnnnnnnnnnnnnnnnnnnnnnnnnnnnnnnnnnnnnnnnnnnnnnnnnnnnnnnnnnnnnnnnnnnnnnnnnnnnnnnnnnnnnnnnnnnnnnnnnnnnnnnnnnnnnnnnnnnnnnnnnnnnnnnnnnnnnnnnnnnnnnnnnnnnnnnnnnnnnnnnnnnnnnnnnnnnnnnnnnnnnnnnnnnnnnnnnnnnnnnnnnnnnnnnnnnnnnnnnnnnnnnnnnnnnnnnnnnnnnnnnnnnnnnnnnnnnnnnnnnnnnnnnnnnnnnnnnnnnnnnnnnnnnnnnnnnnnnnnnnnnnnnnnnnnnnnnnnnnnnnnnnnnnnnnnnnnnnnnnnnnnnnnnnnnnnnnnnnnnnnnnnnnnnnnnnnnnnnnnnnnnnnnnnnnnnnnnnnnnnnnnnnnnnnnnnnnnnnnnnnnnnnnnnnnnnnnnnnnnnnnnnnnnnnnnnnnnnnnnnnnnnnnnnnnnnnnnnnnnnnnnnnnnnnnnnnnnnnnnnnnnnnnnnnnnnnnnnnnnnnnnnnnnnnnnnnnnnnnnnnnnnnnnnnnnnnnnnnnnnnnnnnnnnnnnnnnnnnnnnnnnnnnnnnnnnnnnnnnnnnnnnnnnnnnnnnnnnnnnnnnnnnnnnnnnnnnnnnnnnnnnnnnnnnnnnnnnnnnnnnnnnnnnnnnnnnnnnnnnnnnnnnnnnnnnnnnnnnnnnnnnnnnnnnnnnnnnnnnnnnnnnnnnnnnnnnnnnnnnnnnnnnnnnnnnnnnnnnnnnnnnnnnnnnnnnnnnnnnnnnnnnnnnnnnnnnnnnnnnnnnnnnnnnnnnnnnnnnnnnnnnnnnnnnnnnnnnnnnnnnnnnnnnnnnnnnnnnnnnnnnnnnnnnnnnnnnnnnnnnnnnnnnnnnnnnnnnnnnnnnnnnnnnnnnnnnnnnnnnnnnnnnnnnnnnnnnnnnnnnnnnnnnnnnnnnnnnnnnnnnnnnnnnnnnnnnnnnnnnnnnnnnnnnnnnnnnnnnnnnnnnnnnnnnnnnnnnnnnnnnnnnnnnnnnnnnnnnnnnnnnnnnnnnnnnnnnnnnnnnnnnnnnnnnnnnnnnnnnnnnnnnnnnnnnnnnnnnnnnnnnnnnnnnnnnnnnnnnnnnnnnnnnnnnnnnnnnnnnnnnnnnnnnnnnnnnnnnnnnnnnnnnnnnnnnnnnnnnnnnnnnnnnnnnnnnnnnnnnnnnnnnnnnnnnnnnnnnnnnnnnnnnnnnnnnnnnnnnnnnnnnnnnnnnnnnnnnnnnnnnnnnnnnnnnnnnnnnnnnnnnnnnnnnnnnnnnnnnnnnnnnnnnnnnnnnnnnnnnnnnnnnnnnnnnnnnnnnnnnnnnnnnnnnnnnnnnnnnnnnnnnnnnnnnnnnnnnnnnnnnnnnnnnnnnnnnnnnnnnnnnnnnnnnnnnnnnnnnnnnnnnnnnnnnnnnnnnnnnnnnnnnnnnnnnnnnnnnnnnnnnnnnnnnnnnnnnnnnnnnnnnnnnnnnnnnnnnnnnnnnnnnnnnnnnnnnnnnnnnnnnnnnnnnnnnnnnnnnnnnnnnnnnnnnnnnnnnnnnnnnnnnnnnnnnnnnnnnnnnnnnnnnnnnnnnnnnnnnnnnnnnnnnnnnnnnnnnnnnnnnnnnnnnnnnnnnnnnnnnnnnnnnnnnnnnnnnnnnnnnnnnnnnnnnnnnnnnnnnnnnnnnnnnnnnnnnnnnnnnnnnnnnnnnnnnnnnnnnnnnnnnnnnnnnnnnnnnnnnnnnnnnnnnnnnnnnnnnnnnnnnnnnnnnnnnnnnnnnnnnnnnnnnnnnnnnnnnnnnnnnnnnnnnnnnnnnnnnnnnnnnnnnnnnnnnnnnnnnnnnnnnnnnnnnnnnnnnnnnnnnnnnnnnnnnnnnnnnnnnnnnnnnnnnnnnnnnnnnnnnnnnnnnnnnnnnnnnnnnnnnnnnnnnnnnnnnnnnnnnnnnnnnnnnnnnnnnnnnnnnnnnnnnnnnnnnnnnnnnnnnnnnnnnnnnnnnnnnnnnnnnnnnnnnnnnnnnnnnnnnnnnnnnnnnnnnnnnnnnnnnnnnnnnnnnnnnnnnnnnnnnnnnnnnnnnnnnnnnnnnnnnnnnnnnnnnnnnnnnnnnnnnnnnnnnnnnnnnnnnnnnnnnnnnnnnnnnnnnnnnnnnnnnnnnnnnnnnnnnnnnnnnnnnnnnnnnnnnnnnnnnnnnnnnnnnnnnnnnnnnnnnnnnnnnnnnnnnnnnnnnnnnnnnnnnnnnnnnnnnnnnnnnnnnnnnnnnnnnnnnnnnnnnnnnnnnnnnnnnnnnnnnnnnnnnnnnnnnnnnnnnnnnnnnnnnnnnnnnnnnnnnnnnnnnnnnnnnnnnnnnnnnnnnnnnnnnnnnnnnnnnnnnnnnnnnnnnnnnnnnnnnnnnnnnnnnnnnnnnnnnnnnnnnnnnnnnnnnnnnnnnnnnnnnnnnnnnnnnnnnnnnnnnnnnnnnnnnnnnnnnnnnnnnnnnnnnnnnnnnnnnnnnnnnnnnnnnnnnnnnnnnnnnnnnnnnnnnnnnnnnnnnnnnnnnnnnnnnnnnnnnnnnnnnnnnnnnnnnnnnnnnnnnnnnnnnnnnnnnnnnnnnnnnnnnnnnnnnnnnnnnnnnnnnnnnnnnnnnnnnnnnnnnnnnnnnnnnnnnnnnnnnnnnnnnnnnnnnnnnnnnnnnnnnnnnnnnnnnnnnnnnnnnnnnnnnnnnnnnnnnnnnnnnnnnnnnnnnnnnnnnnnnnnnnnnnnnnnnnnnnnnnnnnnnnnnnnnnnnnnnnnnnnnnnnnnnnnnnnnnnnnnnnnnnnnnnnnnnnnnnnnnnnnnnnnnnnnnnnnnnnnnnnnnnnnnnnnnnnnnnnnnnnnnnnnnnnnnnnnnnnnnnnnnnnnnnnnnnnnnnnnnnnnnnnnnnnnnnnnnnnnnnnnnnnnnnnnnnnnnnnnnnnnnnnnnnnnnnnnnnnnnnnnnnnnnnnnnnnnnnnnnnnnnnnnnnnnnnnnnnnnnnnnnnnnnnnnnnnnnnnnnnnnnnnnnnnnnnnnnnnnnnnnnnnnnnnnnnnnnnnnnnnnnnnnnnnnnnnnnnnnnnnnnnnnnnnnnnnnnnnnnnnnnnnnnnnnnnnnnnnnnnnnnnnnnnnnnnnnnnnnnnnnnnnnnnnnnnnnnnnnnnnnnnnnnnnnnnnnnnnnnnnnnnnnnnnnnnnnnnnnnnnnnnnnnnnnnnnnnnnnnnnnnnnnnnnnnnnnnnnnnnnnnnnnnnnnnnnnnnnnnnnnnnnnnnnnnnnnnnnnnnnnnnnnnnnnnnnnnnnnnnnnnnnnnnnnnnnnnnnnnnnnnnnnnnnnnnnnnnnnnnnnnnnnnnnnnnnnnnnnnnnnnnnnnnnnnnnnnnnnnnnnnnnnnnnnnnnnnnnnnnnnnnnnnnnnnnnnnnnnnnnnnnnnnnnnnnnnnnnnnnnnnnnnnnnnnnnnnnnnnnnnnnnnnnnnnnnnnnnnnnnnnnnnnnnnnnnnnnnnnnnnnnnnnnnnnnnnnnnnnnnnnnnnnnnnnnnnnnnnnnnnnnnnnnnnnnnnnnnnnnnnnnnnnnnnnnnnnnnnnnnnnnnnnnnnnnnnnnnnnnnnnnnnnnnnnnnnnnnnnnnnnnnnnnnnnnnnnnnnnnnnnnnnnnnnnnnnnnnnnnnnnnnnnnnnnnnnnnnnnnnnnnnnnnnnnnnnnnnnnnnnnnnnnnnnnnnnnnnnnnnnnnnnnnnnnnnnnnnnnnnnnnnnnnnnnnnnnnnnnnnnnnnnnnnnnnnnnnnnnnnnnnnnnnnnnnnnnnnnnnnnnnnnnnnnnnnnnnnnnnnnnnnnnnnnnnnnnnnnnnnnnnnnnnnnnnnnnnnnnnnnnnnnnnnnnnnnnnnnnnnnnnnnnnnnnnnnnnnnnnnnnnnnnnnnnnnnnnnnnnnnnnnnnnnnnnnnnnnnnnnnnnnnnnnnnnnnnnnnnnnnnnnnnnnnnnnnnnnnnnnnnnnnnnnnnnnnnnnnnnnnnnnnnnnnnnnnnnnnnnnnnnnnnnnnnnnnnnnnnnnnnnnnnnnnnnnnnnnnnnnnnnnnnnnnnnnnnnnnnnnnnnnnnnnnnnnnnnnnnnnnnnnnnnnnnnnnnnnnnnnnnnnnnnnnnnnnnnnnnnnnnnnnnnnnnnnnnnnnnnnnnnnnnnnnnnnnnnnnnnnnnnnnnnnnnnnnnnnnnnnnnnnnnnnnnnnnnnnnnnnnnnnnnnnnnnnnnnnnnnnnnnnnnnnnnnnnnnnnnnnnnnnnnnnnnnnnnnnnnnnnnnnnnnnnnnnnnnnnnnnnnnnnnnnnnnnnnnnnnnnnnnnnnnnnnnnnnnnnnnnnnnnnnnnnnnnnnnnnnnnnnnnnnnnnnnnnnnnnnnnnnnnnnnnnnnnnnnnnnnnnnnnnnnnnnnnnnnnnnnnnnnnnnnnnnnnnnnnnnnnnnnnnnnnnnnnnnnnnnnnnnnnnnnnnnnnnnnnnnnnnnnnnnnnnnnnnnnnnnnnnnnnnnnnnnnnnnnnnnnnnnnnnnnnnnnnnnnnnnnnnnnnnnnnnnnnnnnnnnnnnnnnnnnnnnnnnnnnnnnnnnnnnnnnnnnnnnnnnnnnnnnnnnnnnnnnnnnnnnnnnnnnnnnnnnnnnnnnnnnnnnnnnnnnnnnnnnnnnnnnnnnnnnnnnnnnnnnnnnnnnnnnnnnnnnnnnnnnnnnnnnnnnnnnnnnnnnnnnnnnnnnnnnnnnnnnnnnnnnnnnnnnnnnnnnnnnnnnnnnnnnnnnnnnnnnnnnnnnnnnnnnnnnnnnnnnnnnnnnnnnnnnnnnnnnnnnnnnnnnnnnnnnnnnnnnnnnnnnnnnnnnnnnnnnnnnnnnnnnnnnnnnnnnnnnnnnnnnnnnnnnnnnnnnnnnnnnnnnnnnnnnnnnnnnnnnnnnnnnnnnnnnnnnnnnnnnnnnnnnnnnnnnnnnnnnnnnnnnnnnnnnnnnnnnnnnnnnnnnnnnnnnnnnnnnnnnnnnnnnnnnnnnnnnnnnnnnnnnnnnnnnnnnnnnnnnnnnnnnnnnnnnnnnnnnnnnnnnnnnnnnnnnnnnnnnnnnnnnnnnnnnnnnnnnnnnnnnnnnnnnnnnnnnnnnnnnnnnnnnnnnnnnnnnnnnnnnnnnnnnnnnnnnnnnnnnnnnnnnnnnnnnnnnnnnnnnnnnnnnnnnnnnnnnnnnnnnnnnnnnnnnnnnnnnnnnnnnnnnnnnnnnnnnnnnnnnnnnnnnnnnnnnnnnnnnnnnnnnnnnnnnnnnnnnnnnnnnnnnnnnnnnnnnnnnnnnnnnnnnnnnnnnnnnnnnnnnnnnnnnnnnnnnnnnnnnnnnnnnnnnnnnnnnnnnnnnnnnnnnnnnnnnnnnnnnnnnnnnnnnnnnnnnnnnnnnnnnnnnnnnnnnnnnnnnnnnnnnnnnnnnnnnnnnnnnnnnnnnnnnnnnnnnnnnnnnnnnnnnnnnnnnnnnnnnnnnnnnnnnnnnnnnnnnnnnnnnnnnnnnnnnnnnnnnnnnnnnnnnnnnnnnnnnnnnnnnnnnnnnnnnnnnnnnnnnnnnnnnnnnnnnnnnnnnnnnnnnnnnnnnnnnnnnnnnnnnnnnnnnnnnnnnnnnnnnnnnnnnnnnnnnnnnnnnnnnnnnnnnnnnnnnnnnnnnnnnnnnnnnnnnnnnnnnnnnnnnnnnnnnnnnnnnnnnnnnnnnnnnnnnnnnnnnnnnnnnnnnnnnnnnnnnnnnnnnnnnnnnnnnnnnnnnnnnnnnnnnnnnnnnnnnnnnnnnnnnnnnnnnnnnnnnnnnnnnnnnnnnnnnnnnnnnnnnnnnnnnnnnnnnnnnnnnnnnnnnnnnnnnnnnnnnnnnnnnnnnnnnnnnnnnnnnnnnnnnnnnnnnnnnnnnnnnnnnnnnnnnnnnnnnnnnnnnnnnnnnnnnnnnnnnnnnnnnnnnnnnnnnnnnnnnnnnnnnnnnnnnnnnnnnnnnnnnnnnnnnnnnnnnnnnnnnnnnnnnnnnnnnnnnnnnnnnnnnnnnnnnnnnnnnnnnnnnnnnnnnnnnnnnnnnnnnnnnnnnnnnnnnnnnnnnnnnnnnnnnnnnnnnnnnnnnnnnnnnnnnnnnnnnnnnnnnnnnnnnnnnnnnnnnnnnnnnnnnnnnnnnnnnnnnnnnnnnnnnnnnnnnnnnnnnnnnnnnnnnnnnnnnnnnnnnnnnnnnnnnnnnnnnnnnnnnnnnnnnnnnnnnnnnnnnnnnnnnnnnnnnnnnnnnnnnnnnnnnnnnnnnnnnnnnnnnnnnnnnnnnnnnnnnnnnnnnnnnnnnnnnnnnnnnnnnnnnnnnnnnnnnnnnnnnnnnnnnnnnnnnnnnnnnnnnnnnnnnnnnnnnnnnnnnnnnnnnnnnnnnnnnnnnnnnnnnnnnnnnnnnnnnnnnnnnnnnnnnnnnnnnnnnnnnnnnnnnnnnnnnnnnnnnnnnnnnnnnnnnnnnnnnnnnnnnnnnnnnnnnnnnnnnnnnnnnnnnnnnnnnnnnnnnnnnnnnnnnnnnnnnnnnnnnnnnnnnnnnnnnnnnnnnnnnnnnnnnnnnnnnnnnnnnnnnnnnnnnnnnnnnnnnnnnnnnnnnnnnnnnnnnnnnnnnnnnnnnnnnnnnnnnnnnnnnnnnnnnnnnnnnnnnnnnnnnnnnnnnnnnnnnnnnnnnnnnnnnnnnnnnnnnnnnnnnnnnnnnnnnnnnnnnnnnnnnnnnnnnnnnnnnnnnnnnnnnnnnnnnnnnnnnnnnnnnnnnnnnnnnnnnnnnnnnnnnnnnnnnnnnnnnnnnnnnnnnnnnnnnnnnnnnnnnnnnnnnnnnnnnnnnnnnnnnnnnnnnnnnnnnnnnnnnnnnnnnnnnnnnnnnnnnnnnnnnnnnnnnnnnnnnnnnnnnnnnnnnnnnnnnnnnnnnnnnnnnnnnnnnnnnnnnnnnnnnnnnnnnnnnnnnnnnnnnnnnnnnnnnnnnnnnnnnnnnnnnnnnnnnnnnnnnnnnnnnnnnnnnnnnnnnnnnnnnnnnnnnnnnnnnnnnnnnnnnnnnnnnnnnnnnnnnnnnnnnnnnnnnnnnnnnnnnnnnnnnnnnnnnnnnnnnnnnnnnnnnnnnnnnnnnnnnnnnnnnnnnnnnnnnnnnnnnnnnnnnnnnnnnnnnnnnnnnnnnnnnnnnnnnnnnnnnnnnnnnnnnnnnnnnnnnnnnnnnnnnnnnnnnnnnnnnnnnnnnnnnnnnnnnnnnnnnnnnnnnnnnnnnnnnnnnnnnnnnnnnnnnnnnnnnnnnnnnnnnnnnnnnnnnnnnnnnnnnnnnnnnnnnnnnnnnnnnnnnnnnnnnnnnnnnnnnnnnnnnnnnnnnnnnnnnnnnnnnnnnnnnnnnnnnnnnnnnnnnnnnnnnnnnnnnnnnnnnnnnnnnnnnnnnnnnnnnnnnnnnnnnnnnnnnnnnnnnnnnnnnnnnnnnnnnnnnnnnnnnnnnnnnnnnnnnnnnnnnnnnnnnnnnnnnnnnnnnnnnnnnnnnnnnnnnnnnnnnnnnnnnnnnnnnnnnnnnnnnnnnnnnnnnnnnnnnnnnnnnnnnnnnnnnnnnnnnnnnnnnnnnnnnnnnnnnnnnnnnnnnnnnnnnnnnnnnnnnnnnnnnnnnnnnnnnnnnnnnnnnnnnnnnnnnnnnnnnnnnnnnnnnnnnnnnnnnnnnnnnnnnnnnnnnnnnnnnnnnnnnnnnnnnnnnnnnnnnnnnnnnnnnnnnnnnnnnnnnnnnnnnnnnnnnnnnnnnnnnnnnnnnnnnnnnnnnnnnnnnnnnnnnnnnnnnnnnnnnnnnnnnnnnnnnnnnnnnnnnnnnnnnnnnnnnnnnnnnnnnnnnnnnnnnnnnnnnnnnnnnnnnnnnnnnnnnnnnnnnnnnnnnnnnnnnnnnnnnnnnnnnnnnnnnnnnnnnnnnnnnnnnnnnnnnnnnnnnnnnnnnnnnnnnnnnnnnnnnnnnnnnnnnnnnnnnnnnnnnnnnnnnnnnnnnnnnnnnnnnnnnnnnnnnnnnnnnnnnnnnnnnnnnnnnnnnnnnnnnnnnnnnnnnnnnnnnnnnnnnnnnnnnnnnnnnnnnnnnnnnnnnnnnnnnnnnnnnnnnnnnnnnnnnnnnnnnnnnnnnnnnnnnnnnnnnnnnnnnnnnnnnnnnnnnnnnnnnnnnnnnnnnnnnnnnnnnnnnnnnnnnnnnnnnnnnnnnnnnnnnnnnnnnnnnnnnnnnnnnnnnnnnnnnnnnnnnnnnnnnnnnnnnnnnnnnnnnnnnnnnnnnnnnnnnnnnnnnnnnnnnnnnnnnnnnnnnnnnnnnnnnnnnnnnnnnnnnnnnnnnnnnnnnnnnnnnnnnnnnnnnnnnnnnnnnnnnnnnnnnnnnnnnnnnnnnnnnnnnnnnnnnnnnnnnnnnnnnnnnnnnnnnnnnnnnnnnnnnnnnnnnnnnnnnnnnnnnnnnnnnnnnnnnnnnnnnnnnnnnnnnnnnnnnnnnnnnnnnnnnnnnnnnnnnnnnnnnnnnnnnnnnnnnnnnnnnnnnnnnnnnnnnnnnnnnnnnnnnnnnnnnnnnnnnnnnnnnnnnnnnnnnnnnnnnnnnnnnnnnnnnnnnnnnnnnnnnnnnnnnnnnnnnnnnnnnnnnnnnnnnnnnnnnnnnnnnnnnnnnnnnnnnnnnnnnnnnnnnnnnnnnnnnnnnnnnnnnnnnnnnnnnnnnnnnnnnnnnnnnnnnnnnnnnnnnnnnnnnnnnnnnnnnnnnnnnnnnnnnnnnnnnnnnnnnnnnnnnnnnnnnnnnnnnnnnnnnnnnnnnnnnnnnnnnnnnnnnnnnnnnnnnnnnnnnnnnnnnnnnnnnnnnnnnnnnnnnnnnnnnnnnnnnnnnnnnnnnnnnnnnnnnnnnnnnnnnnnnnnnnnnnnnnnnnnnnnnnnnnnnnnnnnnnnnnnnnnnnnnnnnnnnnnnnnnnnnnnnnnnnnnnnnnnnnnnnnnnnnnnnnnnnnnnnnnnnnnnnnnnnnnnnnnnnnnnnnnnnnnnnnnnnnnnnnnnnnnnnnnnnnnnnnnnnnnnnnnnnnnnnnnnnnnnnnnnnnnnnnnnnnnnnnnnnnnnnnnnnnnnnnnnnnnnnnnnnnnnnnnnnnnnnnnnnnnnnnnnnnnnnnnnnnnnnnnnnnnnnnnnnnnnnnnnnnnnnnnnnnnnnnnnnnnnnnnnnnnnnnnnnnnnnnnnnnnnnnnnnnnnnnnnnnnnnnnnnnnnnnnnnnnnnnnnnnnnnnnnnnnnnnnnnnnnnnnnnnnnnnnnnnnnnnnnnnnnnnnnnnnnnnnnnnnnnnnnnnnnnnnnnnnnnnnnnnnnnnnnnnnnnnnnnnnnnnnnnnnnnnnnnnnnnnnnnnnnnnnnnnnnnnnnnnnnnnnnnnnnnnnnnnnnnnnnnnnnnnnnnnnnnnnnnnnnnnnnnnnnnnnnnnnnnnnnnnnnnnnnnnnnnnnnnnnnnnnnnnnnnnnnnnnnnnnnnnnnnnnnnnnnnnnnnnnnnnnnnnnnnnnnnnnnnnnnnnnnnnnnnnnnnnnnnnnnnnnnnnnnnnnnnnnnnnnnnnnnnnnnnnnnnnnnnnnnnnnnnnnnnnnnnnnnnnnnnnnnnnnnnnnnnnnnnnnnnnnnnnnnnnnnnnnnnnnnnnnnnnnnnnnnnnnnnnnnnnnnnnnnnnnnnnnnnnnnnnnnnnnnnnnnnnnnnnnnnnnnnnnnnnnnnnnnnnnnnnnnnnnnnnnnnnnnnnnnnnnnnnnnnnnnnnnnnnnnnnnnnnnnnnnnnnnnnnnnnnnnnnnnnnnnnnnnnnnnnnnnnnnnnnnnnnnnnnnnnnnnnnnnnnnnnnnnnnnnnnnnnnnnnnnnnnnnnnnnnnnnnnnnnnnnnnnnnnnnnnnnnnnnnnnnnnnnnnnnnnnnnnnnnnnnnnnnnnnnnnnnnnnnnnnnnnnnnnnnnnnnnnnnnnnnnnnnnnnnnnnnnnnnnnnnnnnnnnnnnnnnnnnnnnnnnnnnnnnnnnnnnnnnnnnnnnnnnnnnnnnnnnnnnnnnnnnnnnnnnnnnnnnnnnnnnnnnnnnnnnnnnnnnnnnnnnnnnnnnnnnnnnnnnnnnnnnnnnnnnnnnnnnnnnnnnnnnnnnnnnnnnnnnnnnnnnnnnnnnnnnnnnnnnnnnnnnnnnnnnnnnnnnnnnnnnnnnnnnnnnnnnnnnnnnnnnnnnnnnnnnnnnnnnnnnnnnnnnnnnnnnnnnnnnnnnnnnnnnnnnnnnnnnnnnnnnnnnnnnnnnnnnnnnnnnnnnnnnnnnnnnnnnnnnnnnnnnnnnnnnnnnnnnnnnnnnnnnnnnnnnnnnnnnnnnnnnnnnnnnnnnnnnnnnnnnnnnnnnnnnnnnnnnnnnnnnnnnnnnnnnnnnnnnnnnnnnnnnnnnnnnnnnnnnnnnnnnnnnnnnnnnnnnnnnnnnnnnnnnnnnnnnnnnnnnnnnnnnnnnnnnnnnnnnnnnnnnnnnnnnnnnnnnnnnnnnnnnnnnnnnnnnnnnnnnnnnnnnnnnnnnnnnnnnnnnnnnnnnnnnnnnnnnnnnnnnnnnnnnnnnnnnnnnnnnnnnnnnnnnnnnnnnnnnnnnnnnnnnnnnnnnnnnnnnnnnnnnnnnnnnnnnnnnnnnnnnnnnnnnnnnnnnnnnnnnnnnnnnnnnnnnnnnnnnnnnnnnnnnnnnnnnnnnnnnnnnnnnnnnnnnnnnnnnnnnnnnnnnnnnnnnnnnnnnnnnnnnnnnnnnnnnnnnnnnnnnnnnnnnnnnnnnnnnnnnnnnnnnnnnnnnnnnnnnnnnnnnnnnnnnnnnnnnnnnnnnnnnnnnnnnnnnnnnnnnnnnnnnnnnnnnnnnnnnnnnnnnnnnnnnnnnnnnnnnnnnnnnnnnnnnnnnnnnnnnnnnnnnnnnnnnnnnnnnnnnnnnnnnnnnnnnnnnnnnnnnnnnnnnnnnnnnnnnnnnnnnnnnnnnnnnnnnnnnnnnnnnnnnnnnnnnnnnnnnnnnnnnnnnnnnnnnnnnnnnnnnnnnnnnnnnnnnnnnnnnnnnnnnnnnnnnnnnnnnnnnnnnnnnnnnnnnnnnnnnnnnnnnnnnnnnnnnnnnnnnnnnnnnnnnnnnnnnnnnnnnnnnnnnnnnnnnnnnnnnnnnnnnnnnnnnnnnnnnnnnnnnnnnnnnnnnnnnnnnnnnnnnnnnnnnnnnnnnnnnnnnnnnnnnnnnnnnnnnnnnnnnnnnnnnnnnnnnnnnnnnnnnnnnnnnnnnnnnnnnnnnnnnnnnnnnnnnnnnnnnnnnnnnnnnnnnnnnnnnnnnnnnnnnnnnnnnnnnnnnnnnnnnnnnnnnnnnnnnnnnnnnnnnnnnnnnnnnnnnnnnnnnnnnnnnnnnnnnnnnnnnnnnnnnnnnnnnnnnnnnnnnnnnnnnnnnnnnnnnnnnnnnnnnnnnnnnnnnnnnnnnnnnnnnnnnnnnnnnnnnnnnnnnnnnnnnnnnnnnnnnnnnnnnnnnnnnnnnnnnnnnnnnnnnnnnnnnnnnnnnnnnnnnnnnnnnnnnnnnnnnnnnnnnnnnnnnnnnnnnnnnnnnnnnnnnnnnnnnnnnnnnnnnnnnnnnnnnnnnnnnnnnnnnnnnnnnnnnnnnnnnnnnnnnnnnnnnnnnnnnnnnnnnnnnnnnnnnnnnnnnnnnnnnnnnnnnnnnnnnnnnnnnnnnnnnnnnnnnnnnnnnnnnnnnnnnnnnnnnnnnnnnnnnnnnnnnnnnnnnnnnnnnnnnnnnnnnnnnnnnnnnnnnnnnnnnnnnnnnnnnnnnnnnnnnnnnnnnnnnnnnnnnnnnnnnnnnnnnnnnnnnnnnnnnnnnnnnnnnnnnnnnnnnnnnnnnnnnnnnnnnnnnnnnnnnnnnnnnnnnnnnnnnnnnnnnnnnnnnnnnnnnnnnnnnnnnnnnnnnnnnnnnnnnnnnnnnnnnnnnnnnnnnnnnnnnnnnnnnnnnnnnnnnnnnnnnnnnnnnnnnnnnnnnnnnnnnnnnnnnnnnnnnnnnnnnnnnnnnnnnnnnnnnnnnnnnnnnnnnnnnnnnnnnnnnnnnnnnnnnnnnnnnnnnnnnnnnnnnnnnnnnnnnnnnnnnnnnnnnnnnnnnnnnnnnnnnnnnnnnnnnnnnnnnnnnnnnnnnnnnnnnnnnnnnnnnnnnnnnnnnnnnnnnnnnnnnnnnnnnnnnnnnnnnnnnnnnnnnnnnnnnnnnnnnnnnnnnnnnnnnnnnnnnnnnnnnnnnnnnnnnnnnnnnnnnnnnnnnnnnnnnnnnnnnnnnnnnnnnnnnnnnnnnnnnnnnnnnnnnnnnnnnnnnnnnnnnnnnnnnnnnnnnnnnnnnnnnnnnnnnnnnnnnnnnnnnnnnnnnnnnnnnnnnnnnnnnnnnnnnnnnnnnnnnnnnnnnnnnnnnnnnnnnnnnnnnnnnnnnnnnnnnnnnnnnnnnnnnnnnnnnnnnnnnnnnnnnnnnnnnnnnnnnnnnnnnnnnnnnnnnnnnnnnnnnnnnnnnnnnnnnnnnnnnnnnnnnnnnnnnnnnnnnnnnnnnnnnnnnnnnnnnnnnnnnnnnnnnnnnnnnnnnnnnnnnnnnnnnnnnnnnnnnnnnnnnnnnnnnnnnnnnnnnnnnnnnnnnnnnnnnnnnnnnnnnnnnnnnnnnnnnnnnnnnnnnnnnnnnnnnnnnnnnnnnnnnnnnnnnnnnnnnnnnnnnnnnnnnnnnnnnnnnnnnnnnnnnnnnnnnnnnnnnnnnnnnnnnnnnnnnnnnnnnnnnnnnnnnnnnnnnnnnnnnnnnnnnnnnnnnnnnnnnnnnnnnnnnnnnnnnnnnnnnnnnnnnnnnnnnnnnnnnnnnnnnnnnnnnnnnnnnnnnnnnnnnnnnnnnnnnnnnnnnnnnnnnnnnnnnnnnnnnnnnnnnnnnnnnnnnnnnnnnnnnnnnnnnnnnnnnnnnnnnnnnnnnnnnnnnnnnnnnnnnnnnnnnnnnnnnnnnnnnnnnnnnnnnnnnnnnnnnnnnnnnnnnnnnnnnnnnnnnnnnnnnnnnnnnnnnnnnnnnnnnnnnnnnnnnnnnnnnnnnnnnnnnnnnnnnnnnnnnnnnnnnnnnnnnnnnnnnnnnnnnnnnnnnnnnnnnnnnnnnnnnnnnnnnnnnnnnnnnnnnnnnnnnnnnnnnnnnnnnnnnnnnnnnnnnnnnnnnnnnnnnnnnnnnnnnnnnnnnnnnnnnnnnnnnnnnnnnnnnnnnnnnnnnnnnnnnnnnnnnnnnnnnnnnnnnnnnnnnnnnnnnnnnnnnnnnnnnnnnnnnnnnnnnnnnnnnnnnnnnnnnnnnnnnnnnnnnnnnnnnnnnnnnnnnnnnnnnnnnnnnnnnnnnnnnnnnnnnnnnnnnnnnnnnnnnnnnnnnnnnnnnnnnnnnnnnnnnnnnnnnnnnnnnnnnnnnnnnnnnnnnnnnnnnnnnnnnnnnnnnnnnnnnnnnnnnnnnnnnnnnnnnnnnnnnnnnnnnnnnnnnnnnnnnnnnnnnnnnnnnnnnnnnnnnnnnnnnnnnnnnnnnnnnnnnnnnnnnnnnnnnnnnnnnnnnnnnnnnnnnnnnnnnnnnnnnnnnnnnnnnnnnnnnnnnnnnnnnnnnnnnnnnnnnnnnnnnnnnnnnnnnnnnnnnnnnnnnnnnnnnnnnnnnnnnnnnnnnnnnnnnnnnnnnnnnnnnnnnnnnnnnnnnnnnnnnnnnnnnnnnnnnnnnnnnnnnnnnnnnnnnnnnnnnnnnnnnnnnnnnnnnnnnnnnnnnnnnnnnnnnnnnnnnnnnnnnnnnnnnnnnnnnnnnnnnnnnnnnnnnnnnnnnnnnnnnnnnnnnnnnnnnnnnnnnnnnnnnnnnnnnnnnnnnnnnnnnnnnnnnnnnnnnnnnnnnnnnnnnnnnnnnnnnnnnnnnnnnnnnnnnnnnnnnnnnnnnnnnnnnnnnnnnnnnnnnnnnnnnnnnnnnnnnnnnnnnnnnnnnnnnnnnnnnnnnnnnnnnnnnnnnnnnnnnnnnnnnnnnnnnnnnnnnnnnnnnnnnnnnnnnnnnnnnnnnnnnnnnnnnnnnnnnnnnnnnnnnnnnnnnnnnnnnnnnnnnnnnnnnnnnnnnnnnnnnnnnnnnnnnnnnnnnnnnnnnnnnnnnnnnnnnnnnnnnnnnnnnnnnnnnnnnnnnnnnnnnnnnnnnnnnnnnnnnnnnnnnnnnnnnnnnnnnnnnnnnnnnnnnnnnnnnnnnnnnnnnnnnnnnnnnnnnnnnnnnnnnnnnnnnnnnnnnnnnnnnnnnnnnnnnnnnnnnnnnnnnnnnnnnnnnnnnnnnnnnnnnnnnnnnnnnnnnnnnnnnnnnnnnnnnnnnnnnnnnnnnnnnnnnnnnnnnnnnnnnnnnnnnnnnnnnnnnnnnnnnnnnnnnnnnnnnnnnnnnnnnnnnnnnnnnnnnnnnnnnnnnnnnnnnnnnnnnnnnnnnnnnnnnnnnnnnnnnnnnnnnnnnnnnnnnnnnnnnnnnnnnnnnnnnnnnnnnnnnnnnnnnnnnnnnnnnnnnnnnnnnnnnnnnnnnnnnnnnnnnnnnnnnnnnnnnnnnnnnnnnnnnnnnnnnnnnnnnnnnnnnnnnnnnnnnnnnnnnnnnnnnnnnnnnnnnnnnnnnnnnnnnnnnnnnnnnnnnnnnnnnnnnnnnnnnnnnnnnnnnnnnnnnnnnnnnnnnnnnnnnnnnnnnnnnnnnnnnnnnnnnnnnnnnnnnnnnnnnnnnnnnnnnnnnnnnnnnnnnnnnnnnnnnnnnnnnnnnnnnnnnnnnnnnnnnnnnnnnnnnnnnnnnnnnnnnnnnnnnnnnnnnnnnnnnnnnnnnnnnnnnnnnnnnnnnnnnnnnnnnnnnnnnnnnnnnnnnnnnnnnnnnnnnnnnnnnnnnnnnnnnnnnnnnnnnnnnnnnnnnnnnnnnnnnnnnnnnnnnnnnnnnnnnnnnnnnnnnnnnnnnnnnnnnnnnnnnnnnnnnnnnnnnnnnnnnnnnnnnnnnnnnnnnnnnnnnnnnnnnnnnnnnnnnnnnnnnnnnnnnnnnnnnnnnnnnnnnnnnnnnnnnnnnnnnnnnnnnnnnnnnnnnnnnnnnnnnnnnnnnnnnnnnnnnnnnnnnnnnnnnnnnnnnnnnnnnnnnnnnnnnnnnnnnnnnnnnnnnnnnnnnnnnnnnnnnnnnnnnnnnnnnnnnnnnnnnnnnnnnnnnnnnnnnnnnnnnnnnnnnnnnnnnnnnnnnnnnnnnnnnnnnnnnnnnnnnnnnnnnnnnnnnnnnnnnnnnnnnnnnnnnnnnnnnnnnnnnnnnnnnnnnnnnnnnnnnnnnnnnnnnnnnnnnnnnnnnnnnnnnnnnnnnnnnnnnnnnnnnnnnnnnnnnnnnnnnnnnnnnnnnnnnnnnnnnnnnnnnnnnnnnnnnnnnnnnnnnnnnnnnnnnnnnnnnnnnnnnnnnnnnnnnnnnnnnnnnnnnnnnnnnnnnnnnnnnnnnnnnnnnnnnnnnnnnnnnnnnnnnnnnnnnnnnnnnnnnnnnnnnnnnnnnnnnnnnnnnnnnnnnnnnnnnnnnnnnnnnnnnnnnnnnnnnnnnnnnnnnnnnnnnnnnnnnnnnnnnnnnnnnnnnnnnnnnnnnnnnnnnnnnnnnnnnnnnnnnnnnnnnnnnnnnnnnnnnnnnnnnnnnnnnnnnnnnnnnnnnnnnnnnnnnnnnnnnnnnnnnnnnnnnnnnnnnnnnnnnnnnnnnnnnnnnnnnnnnnnnnnnnnnnnnnnnnnnnnnnnnnnnnnnnnnnnnnnnnnnnnnnnnnnnnnnnnnnnnnnnnnnnnnnnnnnnnnnnnnnnnnnnnnnnnnnnnnnnnnnnnnnnnnnnnnnnnnnnnnnnnnnnnnnnnnnnnnnnnnnnnnnnnnnnnnnnnnnnnnnnnnnnnnnnnnnnnnnnnnnnnnnnnnnnnnnnnnnnnnnnnnnnnnnnnnnnnnnnnnnnnnnnnnnnnnnnnnnnnnnnnnnnnnnnnnnnnnnnnnnnnnnnnnnnnnnnnnnnnnnnnnnnnnnnnnnnnnnnnnnnnnnnnnnnnnnnnnnnnnnnnnnnnnnnnnnnnnnnnnnnnnnnnnnnnnnnnnnnnnnnnnnnnnnnnnnnnnnnnnnnnnnnnnnnnnnnnnnnnnnnnnnnnnnnnnnnnnnnnnnnnnnnnnnnnnnnnnnnnnnnnnnnnnnnnnnnnnnnnnnnnnnnnnnnnnnnnnnnnnnnnnnnnnnnnnnnnnnnnnnnnnnnnnnnnnnnnnnnnnnnnnnnnnnnnnnnnnnnnnnnnnnnnnnnnnnnnnnnnnnnnnnnnnnnnnnnnnnnnnnnnnnnnnnnnnnnnnnnnnnnnnnnnnnnnnnnnnnnnnnnnnnnnnnnnnnnnnnnnnnnnnnnnnnnnnnnnnnnnnnnnnnnnnnnnnnnnnnnnnnnnnnnnnnnnnnnnnnnnnnnnnnnnnnnnnnnnnnnnnnnnnnnnnnnnnnnnnnnnnnnnnnnnnnnnnnnnnnnnnnnnnnnnnnnnnnnnnnnnnnnnnnnnnnnnnnnnnnnnnnnnnnnnnnnnnnnnnnnnnnnnnnnnnnnnnnnnnnnnnnnnnnnnnnnnnnnnnnnnnnnnnnnnnnnnnnnnnnnnnnnnnnnnnnnnnnnnnnnnnnnnnnnnnnnnnnnnnnnnnnnnnnnnnnnnnnnnnnnnnnnnnnnnnnnnnnnnnnnnnnnnnnnnnnnnnnnnnnnnnnnnnnnnnnnnnnnnnnnnnnnnnnnnnnnnnnnnnnnnnnnnnnnnnnnnnnnnnnnnnnnnnnnnnnnnnnnnnnnnnnnnnnnnnnnnnnnnnnnnnnnnnnnnnnnnnnnnnnnnnnnnnnnnnnnnnnnnnnnnnnnnnnnnnnnnnnnnnnnnnnnnnnnnnnnnnnnnnnnnnnnnnnnnnnnnnnnnnnnnnnnnnnnnnnnnnnnnnnnnnnnnnnnnnnnnnnnnnnnnnnnnnnnnnnnnnnnnnnnnnnnnnnnnnnnnnnnnnnnnnnnnnnnnnnnnnnnnnnnnnnnnnnnnnnnnnnnnnnnnnnnnnnnnnnnnnnnnnnnnnnnnnnnnnnnnnnnnnnnnnnnnnnnnnnnnnnnnnnnnnnnnnnnnnnnnnnnnnnnnnnnnnnnnnnnnnnnnnnnnnnnnnnnnnnnnnnnnnnnnnnnnnnnnnnnnnnnnnnnnnnnnnnnnnnnnnnnnnnnnnnnnnnnnnnnnnnnnnnnnnnnnnnnnnnnnnnnnnnnnnnnnnnnnnnnnnnnnnnnnnnnnnnnnnnnnnnnnnnnnnnnnnnnnnnnnnnnnnnnnnnnnnnnnnnnnnnnnnnnnnnnnnnnnnnnnnnnnnnnnnnnnnnnnnnnnnnnnnnnnnnnnnnnnnnnnnnnnnnnnnnnnnnnnnnnnnnnnnnnnnnnnnnnnnnnnnnnnnnnnnnnnnnnnnnnnnnnnnnnnnnnnnnnnnnnnnnnnnnnnnnnnnnnnnnnnnnnnnnnnnnnnnnnnnnnnnnnnnnnnnnnnnnnnnnnnnnnnnnnnnnnnnnnnnnnnnnnnnnnnnnnnnnnnnnnnnnnnnnnnnnnnnnnnnnnnnnnnnnnnnnnnnnnnnnnnnnnnnnnnnnnnnnnnnnnnnnnnnnnnnnnnnnnnnnnnnnnnnnnnnnnnnnnnnnnnnnnnnnnnnnnnnnnnnnnnnnnnnnnnnnnnnnnnnnnnnnnnnnnnnnnnnnnnnnnnnnnnnnnnnnnnnnnnnnnnnnnnnnnnnnnnnnnnnnnnnnnnnnnnnnnnnnnnnnnnnnnnnnnnnnnnnnnnnnnnnnnnnnnnnnnnnnnnnnnnnnnnnnnnnnnnnnnnnnnnnnnnnnnnnnnnnnnnnnnnnnnnnnnnnnnnnnnnnnnnnnnnnnnnnnnnnnnnnnnnnnnnnnnnnnnnnnnnnnnnnnnnnnnnnnnnnnnnnnnnnnnnnnnnnnnnnnnnnnnnnnnnnnnnnnnnnnnnnnnnnnnnnnnnnnnnnnnnnnnnnnnnnnnnnnnnnnnnnnnnnnnnnnnnnnnnnnnnnnnnnnnnnnnnnnnnnnnnnnnnnnnnnnnnnnnnnnnnnnnnnnnnnnnnnnnnnnnnnnnnnnnnnnnnnnnnnnnnnnnnnnnnnnnnnnnnnnnnnnnnnnnnnnnnnnnnnnnnnnnnnnnnnnnnnnnnnnnnnnnnnnnnnnnnnnnnnnnnnnnnnnnnnnnnnnnnnnnnnnnnnnnnnnnnnnnnnnnnnnnnnnnnnnnnnnnnnnnnnnnnnnnnnnnnnnnnnnnnnnnnnnnnnnnnnnnnnnnnnnnnnnnnnnnnnnnnnnnnnnnnnnnnnnnnnnnnnnnnnnnnnnnnnnnnnnnnnnnnnnnnnnnnnnnnnnnnnnnnnnnnnnnnnnnnnnnnnnnnnnnnnnnnnnnnnnnnnnnnnnnnnnnnnnnnnnnnnnnnnnnnnnnnnnnnnnnnnnnnnnnnnnnnnnnnnnnnnnnnnnnnnnnnnnnnnnnnnnnnnnnnnnnnnnnnnnnnnnnnnnnnnnnnnnnnnnnnnnnnnnnnnnnnnnnnnnnnnnnnnnnnnnnnnnnnnnnnnnnnnnnnnnnnnnnnnnnnnnnnnnnnnnnnnnnnnnnnnnnnnnnnnnnnnnnnnnnnnnnnnnnnnnnnnnnnnnnnnnnnnnnnnnnnnnnnnnnnnnnnnnnnnnnnnnnnnnnnnnnnnnnnnnnnnnnnnnnnnnnnnnnnnnnnnnnnnnnnnnnnnnnnnnnnnnnnnnnnnnnnnnnnnnnnnnnnnnnnnnnnnnnnnnnnnnnnnnnnnnnnnnnnnnnnnnnnnnnnnnnnnnnnnnnnnnnnnnnnnnnnnnnnnnnnnnnnnnnnnnnnnnnnnnnnnnnnnnnnnnnnnnnnnnnnnnnnnnnnnnnnnnnnnnnnnnnnnnnnnnnnnnnnnnnnnnnnnnnnnnnnnnnnnnnnnnnnnnnnnnnnnnnnnnnnnnnnnnnnnnnnnnnnnnnnnnnnnnnnnnnnnnnnnnnnnnnnnnnnnnnnnnnnnnnnnnnnnnnnnnnnnnnnnnnnnnnnnnnnnnnnnnnnnnnnnnnnnnnnnnnnnnnnnnnnnnnnnnnnnnnnnnnnnnnnnnnnnnnnnnnnnnnnnnnnnnnnnnnnnnnnnnnnnnnnnnnnnnnnnnnnnnnnnnnnnnnnnnnnnnnnnnnnnnnnnnnnnnnnnnnnnnnnnnnnnnnnnnnnnnnnnnnnnnnnnnnnnnnnnnnnnnnnnnnnnnnnnnnnnnnnnnnnnnnnnnnnnnnnnnnnnnnnnnnnnnnnnnnnnnnnnnnnnnnnnnnnnnnnnnnnnnnnnnnnnnnnnnnnnnnnnnnnnnnnnnnnnnnnnnnnnnnnnnnnnnnnnnnnnnnnnnnnnnnnnnnnnnnnnnnnnnnnnnnnnnnnnnnnnnnnnnnnnnnnnnnnnnnnnnnnnnnnnnnnnnnnnnnnnnnnnnnnnnnnnnnnnnnnnnnnnnnnnnnnnnnnnnnnnnnnnnnnnnnnnnnnnnnnnnnnnnnnnnnnnnnnnnnnnnnnnnnnnnnnnnnnnnnnnnnnnnnnnnnnnnnnnnnnnnnnnnnnnnnnnnnnnnnnnnnnnnnnnnnnnnnnnnnnnnnnnnnnnnnnnnnnnnnnnnnnnnnnnnnnnnnnnnnnnnnnnnnnnnnnnnnnnnnnnnnnnnnnnnnnnnnnnnnnnnnnnnnnnnnnnnnnnnnnnnnnnnnnnnnnnnnnnnnnnnnnnnnnnnnnnnnnnnnnnnnnnnnnnnnnnnnnnnnnnnnnnnnnnnnnnnnnnnnnnnnnnnnnnnnnnnnnnnnnnnnnnnnnnnnnnnnnnnnnnnnnnnnnnnnnnnnnnnnnnnnnnnnnnnnnnnnnnnnnnnnnnnnnnnnnnnnnnnnnnnnnnnnnnnnnnnnnnnnnnnnnnnnnnnnnnnnnnnnnnnnnnnnnnnnnnnnnnnnnnnnnnnnnnnnnnnnnnnnnnnnnnnnnnnnnnnnnnnnnnnnnnnnnnnnnnnnnnnnnnnnnnnnnnnnnnnnnnnnnnnnnnnnnnnnnnnnnnnnnnnnnnnnnnnnnnnnnnnnnnnnnnnnnnnnnnnnnnnnnnnnnnnnnnnnnnnnnnnnnnnnnnnnnnnnnnnnnnnnnnnnnnnnnnnnnnnnnnnnnnnnnnnnnnnnnnnnnnnnnnnnnnnnnnnnnnnnnnnnnnnnnnnnnnnnnnnnnnnnnnnnnnnnnnnnnnnnnnnnnnnnnnnnnnnnnnnnnnnnnnnnnnnnnnnnnnnnnnnnnnnnnnnnnnnnnnnnnnnnnnnnnnnnnnnnnnnnnnnnnnnnnnnnnnnnnnnnnnnnnnnnnnnnnnnnnnnnnnnnnnnnnnnnnnnnnnnnnnnnnnnnnnnnnnnnnnnnnnnnnnnnnnnnnnnnnnnnnnnnnnnnnnnnnnnnnnnnnnnnnnnnnnnnnnnnnnnnnnnnnnnnnnnnnnnnnnnnnnnnnnnnnnnnnnnnnnnnnnnnnnnnnnnnnnnnnnnnnnnnnnnnnnnnnnnnnnnnnnnnnnnnnnnnnnnnnnnnnnnnnnnnnnnnnnnnnnnnnnnnnnnnnnnnnnnnnnnnnnnnnnnnnnnnnnnnnnnnnnnnnnnnnnnnnnnnnnnnnnnnnnnnnnnnnnnnnnnnnnnnnnnnnnnnnnnnnnnnnnnnnnnnnnnnnnnnnnnnnnnnnnnnnnnnnnnnnnnnnnnnnnnnnnnnnnnnnnnnnnnnnnnnnnnnnnnnnnnnnnnnnnnnnnnnnnnnnnnnnnnnnnnnnnnnnnnnnnnnnnnnnnnnnnnnnnnnnnnnnnnnnnnnnnnnnnnnnnnnnnnnnnnnnnnnnnnnnnnnnnnnnnnnnnnnnnnnnnnnnnnnnnnnnnnnnnnnnnnnnnnnnnnnnnnnnnnnnnnnnnnnnnnnnnnnnnnnnnnnnnnnnnnnnnnnnnnnnnnnnnnnnnnnnnnnnnnnnnnnnnnnnnnnnnnnnnnnnnnnnnnnnnnnnnnnnnnnnnnnnnnnnnnnnnnnnnnnnnnnnnnnnnnnnnnnnnnnnnnnnnnnnnnnnnnnnnnnnnnnnnnnnnnnnnnnnnnnnnnnnnnnnnnnnnnnnnnnnnnnnnnnnnnnnnnnnnnnnnnnnnnnnnnnnnnnnnnnnnnnnnnnnnnnnnnnnnnnnnnnnnnnnnnnnnnnnnnnnnnnnnnnnnnnnnnnnnnnnnnnnnnnnnnnnnnnnnnnnnnnnnnnnnnnnnnnnnnnnnnnnnnnnnnnnnnnnnnnnnnnnnnnnnnnnnnnnnnnnnnnnnnnnnnnnnnnnnnnnnnnnnnnnnnnnnnnnnnnnnnnnnnnnnnnnnnnnnnnnnnnnnnnnnnnnnnnnnnnnnnnnnnnnnnnnnnnnnnnnnnnnnnnnnnnnnnnnnnnnnnnnnnnnnnnnnnnnnnnnnnnnnnnnnnnnnnnnnnnnnnnnnnnnnnnnnnnnnnnnnnnnnnnnnnnnnnnnnnnnnnnnnnnnnnnnnnnnnnnnnnnnnnnnnnnnnnnnnnnnnnnnnnnnnnnnnnnnnnnnnnnnnnnnnnnnnnnnnnnnnnnnnnnnnnnnnnnnnnnnnnnnnnnnnnnnnnnnnnnnnnnnnnnnnnnnnnnnnnnnnnnnnnnnnnnnnnnnnnnnnnnnnnnnnnnnnnnnnnnnnnnnnnnnnnnnnnnnnnnnnnnnnnnnnnnnnnnnnnnnnnnnnnnnnnnnnnnnnnnnnnnnnnnnnnnnnnnnnnnnnnnnnnnnnnnnnnnnnnnnnnnnnnnnnnnnnnnnnnnnnnnnnnnnnnnnnnnnnnnnnnnnnnnnnnnnnnnnnnnnnnnnnnnnnnnnnnnnnnnnnnnnnnnnnnnnnnnnnnnnnnnnnnnnnnnnnnnnnnnnnnnnnnnnnnnnnnnnnnnnnnnnnnnnnnnnnnnnnnnnnnnnnnnnnnnnnnnnnnnnnnnnnnnnnnnnnnnnnnnnnnnnnnnnnnnnnnnnnnnnnnnnnnnnnnnnnnnnnnnnnnnnnnnnnnnnnnnnnnnnnnnnnnnnnnnnnnnnnnnnnnnnnnnnnnnnnnnnnnnnnnnnnnnnnnnnnnnnnnnnnnnnnnnnnnnnnnnnnnnnnnnnnnnnnnnnnnnnnnnnnnnnnnnnnnnnnnnnnnnnnnnnnnnnnnnnnnnnnnnnnnnnnnnnnnnnnnnnnnnnnnnnnnnnnnnnnnnnnnnnnnnnnnnnnnnnnnnnnnnnnnnnnnnnnnnnnnnnnnnnnnnnnnnnnnnnnnnnnnnnnnnnnnnnnnnnnnnnnnnnnnnnnnnnnnnnnnnnnnnnnnnnnnnnnnnnnnnnnnnnnnnnnnnnnnnnnnnnnnnnnnnnnnnnnnnnnnnnnnnnnnnnnnnnnnnnnnnnnnnnnnnnnnnnnnnnnnnnnnnnnnnnnnnnnnnnnnnnnnnnnnnnnnnnnnnnnnnnnnnnnnnnnnnnnnnnnnnnnnnnnnnnnnnnnnnnnnnnnnnnnnnnnnnnnnnnnnnnnnnnnnnnnnnnnnnnnnnnnnnnnnnnnnnnnnnnnnnnnnnnnnnnnnnnnnnnnnnnnnnnnnnnnnnnnnnnnnnnnnnnnnnnnnnnnnnnnnnnnnnnnnnnnnnnnnnnnnnnnnnnnnnnnnnnnnnnnnnnnnnnnnnnnnnnnnnnnnnnnnnnnnnnnnnnnnnnnnnnnnnnnnnnnnnnnnnnnnnnnnnnnnnnnnnnnnnnnnnnnnnnnnnnnnnnnnnnnnnnnnnnnnnnnnnnnnnnnnnnnnnnnnnnnnnnnnnnnnnnnnnnnnnnnnnnnnnnnnnnnnnnnnnnnnnnnnnnnnnnnnnnnnnnnnnnnnnnnnnnnnnnnnnnnnnnnnnnnnnnnnnnnnnnnnnnnnnnnnnnnnnnnnnnnnnnnnnnnnnnnnnnnnnnnnnnnnnnnnnnnnnnnnnnnnnnnnnnnnnnnnnnnnnnnnnnnnnnnnnnnnnnnnnnnnnnnnnnnnnnnnnnnnnnnnnnnnnnnnnnnnnnnnnnnnnnnnnnnnnnnnnnnnnnnnnnnnnnnnnnnnnnnnnnnnnnnnnnnnnnnnnnnnnnnnnnnnnnnnnnnnnnnnnnnnnnnnnnnnnnnnnnnnnnnnnnnnnnnnnnnnnnnnnnnnnnnnnnnnnnnnnnnnnnnnnnnnnnnnnnnnnnnnnnnnnnnnnnnnnnnnnnnnnnnnnnnnnnnnnnnnnnnnnnnnnnnnnnnnnnnnnnnnnnnnnnnnnnnnnnnnnnnnnnnnnnnnnnnnnnnnnnnnnnnnnnnnnnnnnnnnnnnnnnnnnnnnnnnnnnnnnnnnnnnnnnnnnnnnnnnnnnnnnnnnnnnnnnnnnnnnnnnnnnnnnnnnnnnnnnnnnnnnnnnnnnnnnnnnnnnnnnnnnnnnnnnnnnnnnnnnnnnnnnnnnnnnnnnnnnnnnnnnnnnnnnnnnnnnnnnnnnnnnnnnnnnnnnnnnnnnnnnnnnnnnnnnnnnnnnnnnnnnnnnnnnnnnnnnnnnnnnnnnnnnnnnnnnnnnnnnnnnnnnnnnnnnnnnnnnnnnnnnnnnnnnnnnnnnnnnnnnnnnnnnnnnnnnnnnnnnnnnnnnnnnnnnnnnnnnnnnnnnnnnnnnnnnnnnnnnnnnnnnnnnnnnnnnnnnnnnnnnnnnnnnnnnnnnnnnnnnnnnnnnnnnnnnnnnnnnnnnnnnnnnnnnnnnnnnnnnnnnnnnnnnnnnnnnnnnnnnnnnnnnnnnnnnnnnnnnnnnnnnnnnnnnnnnnnnnnnnnnnnnnnnnnnnnnnnnnnnnnnnnnnnnnnnnnnnnnnnnnnnnnnnnnnnnnnnnnnnnnnnnnnnnnnnnnnnnnnnnnnnnnnnnnnnnnnnnnnnnnnnnnnnnnnnnnnnnnnnnnnnnnnnnnnnnnnnnnnnnnnnnnnnnnnnnnnnnnnnnnnnnnnnnnnnnnnnnnnnnnnnnnnnnnnnnnnnnnnnnnnnnnnnnnnnnnnnnnnnnnnnnnnnnnnnnnnnnnnnnnnnnnnnnnnnnnnnnnnnnnnnnnnnnnnnnnnnnnnnnnnnnnnnnnnnnnnnnnnnnnnnnnnnnnnnnnnnnnnnnnnnnnnnnnnnnnnnnnnnnnnnnnnnnnnnnnnnnnnnnnnnnnnnnnnnnnnnnnnnnnnnnnnnnnnnnnnnnnnnnnnnnnnnnnnnnnnnnnnnnnnnnnnnnnnnnnnnnnnnnnnnnnnnnnnnnnnnnnnnnnnnnnnnnnnnnnnnnnnnnnnnnnnnnnnnnnnnnnnnnnnnnnnnnnnnnnnnnnnnnnnnnnnnnnnnnnnnnnnnnnnnnnnnnnnnnnnnnnnnnnnnnnnnnnnnnnnnnnnnnnnnnnnnnnnnnnnnnnnnnnnnnnnnnnnnnnnnnnnnnnnnnnnnnnnnnnnnnnnnnnnnnnnnnnnnnnnnnnnnnnnnnnnnnnnnnnnnnnnnnnnnnnnnnnnnnnnnnnnnnnnnnnnnnnnnnnnnnnnnnnnnnnnnnnnnnnnnnnnnnnnnnnnnnnnnnnnnnnnnnnnnnnnnnnnnnnnnnnnnnnnnnnnnnnnnnnnnnnnnnnnnnnnnnnnnnnnnnnnnnnnnnnnnnnnnnnnnnnnnnnnnnnnnnnnnnnnnnnnnnnnnnnnnnnnnnnnnnnnnnnnnnnnnnnnnnnnnnnnnnnnnnnnnnnnnnnnnnnnnnnnnnnnnnnnnnnnnnnnnnnnnnnnnnnnnnnnnnnnnnnnnnnnnnnnnnnnnnnnnnnnnnnnnnnnnnnnnnnnnnnnnnnnnnnnnnnnnnnnnnnnnnnnnnnnnnnnnnnnnnnnnnnnnnnnnnnnnnnnnnnnnnnnnnnnnnnnnnnnnnnnnnnnnnnnnnnnnnnnnnnnnnnnnnnnnnnnnnnnnnnnnnnnnnnnnnnnnnnnnnnnnnnnnnnnnnnnnnnnnnnnnnnnnnnnnnnnnnnnnnnnnnnnnnnnnnnnnnnnnnnnnnnnnnnnnnnnnnnnnnnnnnnnnnnnnnnnnnnnnnnnnnnnnnnnnnnnnnnnnnnnnnnnnnnnnnnnnnnnnnnnnnnnnnnnnnnnnnnnnnnnnnnnnnnnnnnnnnnnnnnnnnnnnnnnnnnnnnnnnnnnnnnnnnnnnnnnnnnnnnnnnnnnnnnnnnnnnnnnnnnnnnnnnnnnnnnnnnnnnnnnnnnnnnnnnnnnnnnnnnnnnnnnnnnnnnnnnnnnnnnnnnnnnnnnnnnnnnnnnnnnnnnnnnnnnnnnnnnnnnnnnnnnnnnnnnnnnnnnnnnnnnnnnnnnnnnnnnnnnnnnnnnnnnnnnnnnnnnnnnnnnnnnnnnnnnnnnnnnnnnnnnnnnnnnnnnnnnnnnnnnnnnnnnnnnnnnnnnnnnnnnnnnnnnnnnnnnnnnnnnnnnnnnnnnnnnnnnnnnnnnnnnnnnnnnnnnnnnnnnnnnnnnnnnnnnnnnnnnnnnnnnnnnnnnnnnnnnnnnnnnnnnnnnnnnnnnnnnnnnnnnnnnnnnnnnnnnnnnnnnnnnnnnnnnnnnnnnnnnnnnnnnnnnnnnnnnnnnnnnnnnnnnnnnnnnnnnnnnnnnnnnnnnnnnnnnnnnnnnnnnnnnnnnnnnnnnnnnnnnnnnnnnnnnnnnnnnnnnnnnnnnnnnnnnnnnnnnnnnnnnnnnnnnnnnnnnnnnnnnnnnnnnnnnnnnnnnnnnnnnnnnnnnnnnnnnnnnnnnnnnnnnnnnnnnnnnnnnnnnnnnnnnnnnnnnnnnnnnnnnnnnnnnnnnnnnnnnnnnnnnnnnnnnnnnnnnnnnnnnnnnnnnnnnnnnnnnnnnnnnnnnnnnnnnnnnnnnnnnnnnnnnnnnnnnnnnnnnnnnnnnnnnnnnnnnnnnnnnnnnnnnnnnnnnnnnnnnnnnnnnnnnnnnnnnnnnnnnnnnnnnnnnnnnnnnnnnnnnnnnnnnnnnnnnnnnnnnnnnnnnnnnnnnnnnnnnnnnnnnnnnnnnnnnnnnnnnnnnnnnnnnnnnnnnnnnnnnnnnnnnnnnnnnnnnnnnnnnnnnnnnnnnnnnnnnnnnnnnnnnnnnnnnnnnnnnnnnnnnnnnnnnnnnnnnnnnnnnnnnnnnnnnnnnnnnnnnnnnnnnnnnnnnnnnnnnnnnnnnnnnnnnnnnnnnnnnnnnnnnnnnnnnnnnnnnnnnnnnnnnnnnnnnnnnnnnnnnnnnnnnnnnnnnnnnnnnnnnnnnnnnnnnnnnnnnnnnnnnnnnnnnnnnnnnnnnnnnnnnnnnnnnnnnnnnnnnnnnnnnnnnnnnnnnnnnnnnnnnnnnnnnnnnnnnnnnnnnnnnnnnnnnnnnnnnnnnnnnnnnnnnnnnnnnnnnnnnnnnnnnnnnnnnnnnnnnnnnnnnnnnnnnnnnnnnnnnnnnnnnnnnnnnnnnnnnnnnnnnnnnnnnnnnnnnnnnnnnnnnnnnnnnnnnnnnnnnnnnnnnnnnnnnnnnnnnnnnnnnnnnnnnnnnnnnnnnnnnnnnnnnnnnnnnnnnnnnnnnnnnnnnnnnnnnnnnnnnnnnnnnnnnnnnnnnnnnnnnnnnnnnnnnnnnnnnnnnnnnnnnnnnnnnnnnnnnnnnnnnnnnnnnnnnnnnnnnnnnnnnnnnnnnnnnnnnnnnnnnnnnnnnnnnnnnnnnnnnnnnnnnnnnnnnnnnnnnnnnnnnnnnnnnnnnnnnnnnnnnnnnnnnnnnnnnnnnnnnnnnnnnnnnnnnnnnnnnnnnnnnnnnnnnnnnnnnnnnnnnnnnnnnnnnnnnnnnnnnnnnnnnnnnnnnnnnnnnnnnnnnnnnnnnnnnnnnnnnnnnnnnnnnnnnnnnnnnnnnnnnnnnnnnnnnnnnnnnnnnnnnnnnnnnnnnnnnnnnnnnnnnnnnnnnnnnnnnnnnnnnnnnnnnnnnnnnnnnnnnnnnnnnnnnnnnnnnnnnnnnnnnnnnnnnnnnnnnnnnnnnnnnnnnnnnnnnnnnnnnnnnnnnnnnnnnnnnnnnnnnnnnnnnnnnnnnnnnnnnnnnnnnnnnnnnnnnnnnnnnnnnnnnnnnnnnnnnnnnnnnnnnnnnnnnnnnnnnnnnnnnnnnnnnnnnnnnnnnnnnnnnnnnnnnnnnnnnnnnnnnnnnnnnnnnnnnnnnnnnnnnnnnnnnnnnnnnnnnnnnnnnnnnnnnnnnnnnnnnnnnnnnnnnnnnnnnnnnnnnnnnnnnnnnnnnnnnnnnnnnnnnnnnnnnnnnnnnnnnnnnnnnnnnnnnnnnnnnnnnnnnnnnnnnnnnnnnnnnnnnnnnnnnnnnnnnnnnnnnnnnnnnnnnnnnnnnnnnnnnnnnnnnnnnnnnnnnnnnnnnnnnnnnnnnnnnnnnnnnnnnnnnnnnnnnnnnnnnnnnnnnnnnnnnnnnnnnnnnnnnnnnnnnnnnnnnnnnnnnnnnnnnnnnnnnnnnnnnnnnnnnnnnnnnnnnnnnnnnnnnnnnnnnnnnnnnnnnnnnnnnnnnnnnnnnnnnnnnnnnnnnnnnnnnnnnnnnnnnnnnnnnnnnnnnnnnnnnnnnnnnnnnnnnnnnnnnnnnnnnnnnnnnnnnnnnnnnnnnnnnnnnnnnnnnnnnnnnnnnnnnnnnnnnnnnnnnnnnnnnnnnnnnnnnnnnnnnnnnnnnnnnnnnnnnnnnnnnnnnnnnnnnnnnnnnnnnnnnnnnnnnnnnnnnnnnnnnnnnnnnnnnnnnnnnnnnnnnnnnnnnnnnnnnnnnnnnnnnnnnnnnnnnnnnnnnnnnnnnnnnnnnnnnnnnnnnnnnnnnnnnnnnnnnnnnnnnnnnnnnnnnnnnnnnnnnnnnnnnnnnnnnnnnnnnnnnnnnnnnnnnnnnnnnnnnnnnnnnnnnnnnnnnnnnnnnnnnnnnnnnnnnnnnnnnnnnnnnnnnnnnnnnnnnnnnnnnnnnnnnnnnnnnnnnnnnnnnnnnnnnnnnnnnnnnnnnnnnnnnnnnnnnnnnnnnnnnnnnnnnnnnnnnnnnnnnnnnnnnnnnnnnnnnnnnnnnnnnnnnnnnnnnnnnnnnnnnnnnnnnnnnnnnnnnnnnnnnnnnnnnnnnnnnnnnnnnnnnnnnnnnnnnnnnnnnnnnnnnnnnnnnnnnnnnnnnnnnnnnnnnnnnnnnnnnnnnnnnnnnnnnnnnnnnnnnnnnnnnnnnnnnnnnnnnnnnnnnnnnnnnnnnnnnnnnnnnnnnnnnnnnnnnnnnnnnnnnnnnnnnnnnnnnnnnnnnnnnnnnnnnnnnnnnnnnnnnnnnnnnnnnnnnnnnnnnnnnnnnnnnnnnnnnnnnnnnnnnnnnnnnnnnnnnnnnnnnnnnnnnnnnnnnnnnnnnnnnnnnnnnnnnnnnnnnnnnnnnnnnnnnnnnnnnnnnnnnnnnnnnnnnnnnnnnnnnnnnnnnnnnnnnnnnnnnnnnnnnnnnnnnnnnnnnnnnnnnnnnnnnnnnnnnnnnnnnnnnnnnnnnnnnnnnnnnnnnnnnnnnnnnnnnnnnnnnnnnnnnnnnnnnnnnnnnnnnnnnnnnnnnnnnnnnnnnnnnnnnnnnnnnnnnnnnnnnnnnnnnnnnnnnnnnnnnnnnnnnnnnnnnnnnnnnnnnnnnnnnnnnnnnnnnnnnnnnnnnnnnnnnnnnnnnnnnnnnnnnnnnnnnnnnnnnnnnnnnnnnnnnnnnnnnnnnnnnnnnnnnnnnnnnnnnnnnnnnnnnnnnnnnnnnnnnnnnnnnnnnnnnnnnnnnnnnnnnnnnnnnnnnnnnnnnnnnnnnnnnnnnnnnnnnnnnnnnnnnnnnnnnnnnnnnnnnnnnnnnnnnnnnnnnnnnnnnnnnnnnnnnnnnnnnnnnnnnnnnnnnnnnnnnnnnnnnnnnnnnnnnnnnnnnnnnnnnnnnnnnnnnnnnnnnnnnnnnnnnnnnnnnnnnnnnnnnnnnnnnnnnnnnnnnnnnnnnnnnnnnnnnnnnnnnnnnnnnnnnnnnnnnnnnnnnnnnnnnnnnnnnnnnnnnnnnnnnnnnnnnnnnnnnnnnnnnnnnnnnnnnnnnnnnnnnnnnnnnnnnnnnnnnnnnnnnnnnnnnnnnnnnnnnnnnnnnnnnnnnnnnnnnnnnnnnnnnnnnnnnnnnnnnnnnnnnnnnnnnnnnnnnnnnnnnnnnnnnnnnnnnnnnnnnnnnnnnnnnnnnnnnnnnnnnnnnnnnnnnnnnnnnnnnnnnnnnnnnnnnnnnnnnnnnnnnnnnnnnnnnnnnnnnnnnnnnnnnnnnnnnnnnnnnnnnnnnnnnnnnnnnnnnnnnnnnnnnnnnnnnnnnnnnnnnnnnnnnnnnnnnnnnnnnnnnnnnnnnnnnnnnnnnnnnnnnnnnnnnnnnnnnnnnnnnnnnnnnnnnnnnnnnnnnnnnnnnnnnnnnnnnnnnnnnnnnnnnnnnnnnnnnnnnnnnnnnnnnnnnnnnnnnnnnnnnnnnnnnnnnnnnnnnnnnnnnnnnnnnnnnnnnnnnnnnnnnnnnnnnnnnnnnnnnnnnnnnnnnnnnnnnnnnnnnnnnnnnnnnnnnnnnnnnnnnnnnnnnnnnnnnnnnnnnnnnnnnnnnnnnnnnnnnnnnnnnnnnnnnnnnnnnnnnnnnnnnnnnnnnnnnnnnnnnnnnnnnnnnnnnnnnnnnnnnnnnnnnnnnnnnnnnnnnnnnnnnnnnnnnnnnnnnnnnnnnnnnnnnnnnnnnnnnnnnnnnnnnnnnnnnnnnnnnnnnnnnnnnnnnnnnnnnnnnnnnnnnnnnnnnnnnnnnnnnnnnnnnnnnnnnnnnnnnnnnnnnnnnnnnnnnnnnnnnnnnnnnnnnnnnnnnnnnnnnnnnnnnnnnnnnnnnnnnnnnnnnnnnnnnnnnnnnnnnnnnnnnnnnnnnnnnnnnnnnnnnnnnnnnnnnnnnnnnnnnnnnnnnnnnnnnnnnnnnnnnnnnnnnnnnnnnnnnnnnnnnnnnnnnnnnnnnnnnnnnnnnnnnnnnnnnnnnnnnnnnnnnnnnnnnnnnnnnnnnnnnnnnnnnnnnnnnnnnnnnnnnnnnnnnnnnnnnnnnnnnnnnnnnnnnnnnnnnnnnnnnnnnnnnnnnnnnnnnnnnnnnnnnnnnnnnnnnnnnnnnnnnnnnnnnnnnnnnnnnnnnnnnnnnnnnnnnnnnnnnnnnnnnnnnnnnnnnnnnnnnnnnnnnnnnnnnnnnnnnnnnnnnnnnnnnnnnnnnnnnnnnnnnnnnnnnnnnnnnnnnnnnnnnnnnnnnnnnnnnnnnnnnnnnnnnnnnnnnnnnnnnnnnnnnnnnnnnnnnnnnnnnnnnnnnnnnnnnnnnnnnnnnnnnnnnnnnnnnnnnnnnnnnnnnnnnnnnnnnnnnnnnnnnnnnnnnnnnnnnnnnnnnnnnnnnnnnnnnnnnnnnnnnnnnnnnnnnnnnnnnnnnnnnnnnnnnnnnnnnnnnnnnnnnnnnnnnnnnnnnnnnnnnnnnnnnnnnnnnnnnnnnnnnnnnnnnnnnnnnnnnnnnnnnnnnnnnnnnnnnnnnnnnnnnnnnnnnnnnnnnnnnnnnnnnnnnnnnnnnnnnnnnnnnnnnnnnnnnnnnnnnnnnnnnnnnnnnnnnnnnnnnnnnnnnnnnnnnnnnnnnnnnnnnnnnnnnnnnnnnnnnnnnnnnnnnnnnnnnnnnnnnnnnnnnnnnnnnnnnnnnnnnnnnnnnnnnnnnnnnnnnnnnnnnnnnnnnnnnnnnnnnnnnnnnnnnnnnnnnnnnnnnnnnnnnnnnnnnnnnnnnnnnnnnnnnnnnnnnnnnnnnnnnnnnnnnnnnnnnnnnnnnnnnnnnnnnnnnnnnnnnnnnnnnnnnnnnnnnnnnnnnnnnnnnnnnnnnnnnnnnnnnnnnnnnnnnnnnnnnnnnnnnnnnnnnnnnnnnnnnnnnnnnnnnnnnnnnnnnnnnnnnnnnnnnnnnnnnnnnnnnnnnnnnnnnnnnnnnnnnnnnnnnnnnnnnnnnnnnnnnnnnnnnnnnnnnnnnnnnnnnnnnnnnnnnnnnnnnnnnnnnnnnnnnnnnnnnnnnnnnnnnnnnnnnnnnnnnnnnnnnnnnnnnnnnnnnnnnnnnnnnnnnnnnnnnnnnnnnnnnnnnnnnnnnnnnnnnnnnnnnnnnnnnnnnnnnnnnnnnnnnnnnnnnnnnnnnnnnnnnnnnnnnnnnnnnnnnnnnnnnnnnnnnnnnnnnnnnnnnnnnnnnnnnnnnnnnnnnnnnnnnnnnnnnnnnnnnnnnnnnnnnnnnnnnnnnnnnnnnnnnnnnnnnnnnnnnnnnnnnnnnnnnnnnnnnnnnnnnnnnnnnnnnnnnnnnnnnnnnnnnnnnnnnnnnnnnnnnnnnnnnnnnnnnnnnnnnnnnnnnnnnnnnnnnnnnnnnnnnnnnnnnnnnnnnnnnnnnnnnnnnnnnnnnnnnnnnnnnnnnnnnnnnnnnnnnnnnnnnnnnnnnnnnnnnnnnnnnnnnnnnnnnnnnnnnnnnnnnnnnnnnnnnnnnnnnnnnnnnnnnnnnnnnnnnnnnnnnnnnnnnnnnnnnnnnnnnnnnnnnnnnnnnnnnnnnnnnnnnnnnnnnnnnnnnnnnnnnnnnnnnnnnnnnnnnnnnnnnnnnnnnnnnnnnnnnnnnnnnnnnnnnnnnnnnnnnnnnnnnnnnnnnnnnnnnnnnnnnnnnnnnnnnnnnnnnnnnnnnnnnnnnnnnnnnnnnnnnnnnnnnnnnnnnnnnnnnnnnnnnnnnnnnnnnnnnnnnnnnnnnnnnnnnnnnnnnnnnnnnnnnnnnnnnnnnnnnnnnnnnnnnnnnnnnnnnnnnnnnnnnnnnnnnnnnnnnnnnnnnnnnnnnnnnnnnnnnnnnnnnnnnnnnnnnnnnnnnnnnnnnnnnnnnnnnnnnnnnnnnnnnnnnnnnnnnnnnnnnnnnnnnnnnnnnnnnnnnnnnnnnnnnnnnnnnnnnnnnnnnnnnnnnnnnnnnnnnnnnnnnnnnnnnnnnnnnnnnnnnnnnnnnnnnnnnnnnnnnnnnnnnnnnnnnnnnnnnnnnnnnnnnnnnnnnnnnnnnnnnnnnnnnnnnnnnnnnnnnnnnnnnnnnnnnnnnnnnnnnnnnnnnnnnnnnnnnnnnnnnnnnnnnnnnnnnnnnnnnnnnnnnnnnnnnnnnnnnnnnnnnnnnnnnnnnnnnnnnnnnnnnnnnnnnnnnnnnnnnnnnnnnnnnnnnnnnnnnnnnnnnnnnnnnnnnnnnnnnnnnnnnnnnnnnnnnnnnnnnnnnnnnnnnnnnnnnnnnnnnnnnnnnnnnnnnnnnnnnnnnnnnnnnnnnnnnnnnnnnnnnnnnnnnnnnnnnnnnnnnnnnnnnnnnnnnnnnnnnnnnnnnnnnnnnnnnnnnnnnnnnnnnnnnnnnnnnnnnnnnnnnnnnnnnnnnnnnnnnnnnnnnnnnnnnnnnnnnnnnnnnnnnnnnnnnnnnnnnnnnnnnnnnnnnnnnnnnnnnnnnnnnnnnnnnnnnnnnnnnnnnnnnnnnnnnnnnnnnnnnnnnnnnnnnnnnnnnnnnnnnnnnnnnnnnnnnnnnnnnnnnnnnnnnnnnnnnnnnnnnnnnnnnnnnnnnnnnnnnnnnnnnnnnnnnnnnnnnnnnnnnnnnnnnnnnnnnnnnnnnnnnnnnnnnnnnnnnnnnnnnnnnnnnnnnnnnnnnnnnnnnnnnnnnnnnnnnnnnnnnnnnnnnnnnnnnnnnnnnnnnnnnnnnnnnnnnnnnnnnnnnnnnnnnnnnnnnnnnnnnnnnnnnnnnnnnnnnnnnnnnnnnnnnnnnnnnnnnnnnnnnnnnnnnnnnnnnnnnnnnnnnnnnnnnnnnnnnnnnnnnnnnnnnnnnnnnnnnnnnnnnnnnnnnnnnnnnnnnnnnnnnnnnnnnnnnnnnnnnnnnnnnnnnnnnnnnnnnnnnnnnnnnnnnnnnnnnnnnnnnnnnnnnnnnnnnnnnnnnnnnnnnnnnnnnnnnnnnnnnnnnnnnnnnnnnnnnnnnnnnnnnnnnnnnnnnnnnnnnnnnnnnnnnnnnnnnnnnnnnnnnnnnnnnnnnnnnnnnnnnnnnnnnnnnnnnnnnnnnnnnnnnnnnnnnnnnnnnnnnnnnnnnnnnnnnnnnnnnnnnnnnnnnnnnnnnnnnnnnnnnnnnnnnnnnnnnnnnnnnnnnnnnnnnnnnnnnnnnnnnnnnnnnnnnnnnnnnnnnnnnnnnnnnnnnnnnnnnnnnnnnnnnnnnnnnnnnnnnnnnnnnnnnnnnnnnnnnnnnnnnnnnnnnnnnnnnnnnnnnnnnnnnnnnnnnnnnnnnnnnnnnnnnnnnnnnnnnnnnnnnnnnnnnnnnnnnnnnnnnnnnnnnnnnnnnnnnnnnnnnnnnnnnnnnnnnnnnnnnnnnnnnnnnnnnnnnnnnnnnnnnnnnnnnnnnnnnnnnnnnnnnnnnnnnnnnnnnnnnnnnnnnnnnnnnnnnnnnnnnnnnnnnnnnnnnnnnnnnnnnnnnnnnnnnnnnnnnnnnnnnnnnnnnnnnnnnnnnnnnnnnnnnnnnnnnnnnnnnnnnnnnnnnnnnnnnnnnnnnnnnnnnnnnnnnnnnnnnnnnnnnnnnnnnnnnnnnnnnnnnnnnnnnnnnnnnnnnnnnnnnnnnnnnnnnnnnnnnnnnnnnnnnnnnnnnnnnnnnnnnnnnnnnnnnnnnnnnnnnnnnnnnnnnnnnnnnnnnnnnnnnnnnnnnnnnnnnnnnnnnnnnnnnnnnnnnnnnnnnnnnnnnnnnnnnnnnnnnnnnnnnnnnnnnnnnnnnnnnnnnnnnnnnnnnnnnnnnnnnnnnnnnnnnnnnnnnnnnnnnnnnnnnnnnnnnnnnnnnnnnnnnnnnnnnnnnnnnnnnnnnnnnnnnnnnnnnnnnnnnnnnnnnnnnnnnnnnnnnnnnnnnnnnnnnnnnnnnnnnnnnnnnnnnnnnnnnnnnnnnnnnnnnnnnnnnnnnnnnnnnnnnnnnnnnnnnnnnnnnnnnnnnnnnnnnnnnnnnnnnnnnnnnnnnnnnnnnnnnnnnnnnnnnnnnnnnnnnnnnnnnnnnnnnnnnnnnnnnnnnnnnnnnnnnnnnnnnnnnnnnnnnnnnnnnnnnnnnnnnnnnnnnnnnnnnnnnnnnnnnnnnnnnnnnnnnnnnnnnnnnnnnnnnnnnnnnnnnnnnnnnnnnnnnnnnnnnnnnnnnnnnnnnnnnnnnnnnnnnnnnnnnnnnnnnnnnnnnnnnnnnnnnnnnnnnnnnnnnnnnnnnnnnnnnnnnnnnnnnnnnnnnnnnnnnnnnnnnnnnnnnnnnnnnnnnnnnnnnnnnnnnnnnnnnnnnnnnnnnnnnnnnnnnnnnnnnnnnnnnnnnnnnnnnnnnnnnnnnnnnnnnnnnnnnnnnnnnnnnnnnnnnnnnnnnnnnnnnnnnnnnnnnnnnnnnnnnnnnnnnnnnnnnnnnnnnnnnnnnnnnnnnnnnnnnnnnnnnnnnnnnnnnnnnnnnnnnnnnnnnnnnnnnnnnnnnnnnnnnnnnnnnnnnnnnnnnnnnnnnnnnnnnnnnnnnnnnnnnnnnnnnnnnnnnnnnnnnnnnnnnnnnnnnnnnnnnnnnnnnnnnnnnnnnnnnnnnnnnnnnnnnnnnnnnnnnnnnnnnnnnnnnnnnnnnnnnnnnnnnnnnnnnnnnnnnnnnnnnnnnnnnnnnnnnnnnnnnnnnnnnnnnnnnnnnnnnnnnnnnnnnnnnnnnnnnnnnnnnnnnnnnnnnnnnnnnnnnnnnnnnnnnnnnnnnnnnnnnnnnnnnnnnnnnnnnnnnnnnnnnnnnnnnnnnnnnnnnnnnnnnnnnnnnnnnnnnnnnnnnnnnnnnnnnnnnnnnnnnnnnnnnnnnnnnnnnnnnnnnnnnnnnnnnnnnnnnnnnnnnnnnnnnnnnnnnnnnnnnnnnnnnnnnnnnnnnnnnnnnnnnnnnnnnnnnnnnnnnnnnnnnnnnnnnnnnnnnnnnnnnnnnnnnnnnnnnnnnnnnnnnnnnnnnnnnnnnnnnnnnnnnnnnnnnnnnnnnnnnnnnnnnnnnnnnnnnnnnnnnnnnnnnnnnnnnnnnnnnnnnnnnnnnnnnnnnnnnnnnnnnnnnnnnnnnnnnnnnnnnnnnnnnnnnnnnnnnnnnnnnnnnnnnnnnnnnnnnnnnnnnnnnnnnnnnnnnnnnnnnnnnnnnnnnnnnnnnnnnnnnnnnnnnnnnnnnnnnnnnnnnnnnnnnnnnnnnnnnnnnnnnnnnnnnnnnnnnnnnnnnnnnnnnnnnnnnnnnnnnnnnnnnnnnnnnnnnnnnnnnnnnnnnnnnnnnnnnnnnnnnnnnnnnnnnnnnnnnnnnnnnnnnnnnnnnnnnnnnnnnnnnnnnnnnnnnnnnnnnnnnnnnnnnnnnnnnnnnnnnnnnnnnnnnnnnnnnnnnnnnnnnnnnnnnnnnnnnnnnnnnnnnnnnnnnnnnnnnnnnnnnnnnnnnnnnnnnnnnnnnnnnnnnnnnnnnnnnnnnnnnnnnnnnnnnnnnnnnnnnnnnnnnnnnnnnnnnnnnnnnnnnnnnnnnnnnnnnnnnnnnnnnnnnnnnnnnnnnnnnnnnnnnnnnnnnnnnnnnnnnnnnnnnnnnnnnnnnnnnnnnnnnnnnnnnnnnnnnnnnnnnnnnnnnnnnnnnnnnnnnnnnnnnnnnnnnnnnnnnnnnnnnnnnnnnnnnnnnnnnnnnnnnnnnnnnnnnnnnnnnnnnnnnnnnnnnnnnnnnnnnnnnnnnnnnnnnnnnnnnnnnnnnnnnnnnnnnnnnnnnnnnnnnnnnnnnnnnnnnnnnnnnnnnnnnnnnnnnnnnnnnnnnnnnnnnnnnnnnnnnnnnnnnnnnnnnnnnnnnnnnnnnnnnnnnnnnnnnnnnnnnnnnnnnnnnnnnnnnnnnnnnnnnnnnnnnnnnnnnnnnnnnnnnnnnnnnnnnnnnnnnnnnnnnnnnnnnnnnnnnnnnnnnnnnnnnnnnnnnnnnnnnnnnnnnnnnnnnnnnnnnnnnnnnnnnnnnnnnnnnnnnnnnnnnnnnnnnnnnnnnnnnnnnnnnnnnnnnnnnnnnnnnnnnnnnnnnnnnnnnnnnnnnnnnnnnnnnnnnnnnnnnnnnnnnnnnnnnnnnnnnnnnnnnnnnnnnnnnnnnnnnnnnnnnnnnnnnnnnnnnnnnnnnnnnnnnnnnnnnnnnnnnnnnnnnnnnnnnnnnnnnnnnnnnnnnnnnnnnnnnnnnnnnnnnnnnnnnnnnnnnnnnnnnnnnnnnnnnnnnnnnnnnnnnnnnnnnnnnnnnnnnnnnnnnnnnnnnnnnnnnnnnnnnnnnnnnnnnnnnnnnnnnnnnnnnnnnnnnnnnnnnnnnnnnnnnnnnnnnnnnnnnnnnnnnnnnnnnnnnnnnnnnnnnnnnnnnnnnnnnnnnnnnnnnnnnnnnnnnnnnnnnnnnnnnnnnnnnnnnnnnnnnnnnnnnnnnnnnnnnnnnnnnnnnnnnnnnnnnnnnnnnnnnnnnnnnnnnnnnnnnnnnnnnnnnnnnnnnnnnnnnnnnnnnnnnnnnnnnnnnnnnnnnnnnnnnnnnnnnnnnnnnnnnnnnnnnnnnnnnnnnnnnnnnnnnnnnnnnnnnnnnnnnnnnnnnnnnnnnnnnnnnnnnnnnnnnnnnnnnnnnnnnnnnnnnnnnnnnnnnnnnnnnnnnnnnnnnnnnnnnnnnnnnnnnnnnnnnnnnnnnnnnnnnnnnnnnnnnnnnnnnnnnnnnnnnnnnnnnnnnnnnnnnnnnnnnnnnnnnnnnnnnnnnnnnnnnnnnnnnnnnnnnnnnnnnnnnnnnnnnnnnnnnnnnnnnnnnnnnnnnnnnnnnnnnnnnnnnnnnnnnnnnnnnnnnnnnnnnnnnnnnnnnnnnnnnnnnnnnnnnnnnnnnnnnnnnnnnnnnnnnnnnnnnnnnnnnnnnnnnnnnnnnnnnnnnnnnnnnnnnnnnnnnnnnnnnnnnnnnnnnnnnnnnnnnnnnnnnnnnnnnnnnnnnnnnnnnnnnnnnnnnnnnnnnnnnnnnnnnnnnnnnnnnnnnnnnnnnnnnnnnnnnnnnnnnnnnnnnnnnnnnnnnnnnnnnnnnnnnnnnnnnnnnnnnnnnnnnnnnnnnnnnnnnnnnnnnnnnnnnnnnnnnnnnnnnnnnnnnnnnnnnnnnnnnnnnnnnnnnnnnnnnnnnnnnnnnnnnnnnnnnnnnnnnnnnnnnnnnnnnnnnnnnnnnnnnnnnnnnnnnnnnnnnnnnnnnnnnnnnnnnnnnnnnnnnnnnnnnnnnnnnnnnnnnnnnnnnnnnnnnnnnnnnnnnnnnnnnnnnnnnnnnnnnnnnnnnnnnnnnnnnnnnnnnnnnnnnnnnnnnnnnnnnnnnnnnnnnnnnnnnnnnnnnnnnnnnnnnnnnnnnnnnnnnnnnnnnnnnnnnnnnnnnnnnnnnnnnnnnnnnnnnnnnnnnnnnnnnnnnnnnnnnnnnnnnnnnnnnnnnnnnnnnnnnnnnnnnnnnnnnnnnnnnnnnnnnnnnnnnnnnnnnnnnnnnnnnnnnnnnnnnnnnnnnnnnnnnnnnnnnnnnnnnnnnnnnnnnnnnnnnnnnnnnnnnnnnnnnnnnnnnnnnnnnnnnnnnnnnnnnnnnnnnnnnnnnnnnnnnnnnnnnnnnnnnnnnnnnnnnnnnnnnnnnnnnnnnnnnnnnnnnnnnnnnnnnnnnnnnnnnnnnnnnnnnnnnnnnnnnnnnnnnnnnnnnnnnnnnnnnnnnnnnnnnnnnnnnnnnnnnnnnnnnnnnnnnnnnnnnnnnnnnnnnnnnnnnnnnnnnnnnnnnnnnnnnnnnnnnnnnnnnnnnnnnnnnnnnnnnnnnnnnnnnnnnnnnnnnnnnnnnnnnnnnnnnnnnnnnnnnnnnnnnnnnnnnnnnnnnnnnnnnnnnnnnnnnnnnnnnnnnnnnnnnnnnnnnnnnnnnnnnnnnnnnnnnnnnnnnnnnnnnnnnnnnnnnnnnnnnnnnnnnnnnnnnnnnnnnnnnnnnnnnnnnnnnnnnnnnnnnnnnnnnnnnnnnnnnnnnnnnnnnnnnnnnnnnnnnnnnnnnnnnnnnnnnnnnnnnnnnnnnnnnnnnnnnnnnnnnnnnnnnnnnnnnnnnnnnnnnnnnnnnnnnnnnnnnnnnnnnnnnnnnnnnnnnnnnnnnnnnnnnnnnnnnnnnnnnnnnnnnnnnnnnnnnnnnnnnnnnnnnnnnnnnnnnnnnnnnnnnnnnnnnnnnnnnnnnnnnnnnnnnnnnnnnnnnnnnnnnnnnnnnnnnnnnnnnnnnnnnnnnnnnnnnnnnnnnnnnnnnnnnnnnnnnnnnnnnnnnnnnnnnnnnnnnnnnnnnnnnnnnnnnnnnnnnnnnnnnnnnnnnnnnnnnnnnnnnnnnnnnnnnnnnnnnnnnnnnnnnnnnnnnnnnnnnnnnnnnnnnnnnnnnnnnnnnnnnnnnnnnnnnnnnnnnnnnnnnnnnnnnnnnnnnnnnnnnnnnnnnnnnnnnnnnnnnnnnnnnnnnnnnnnnnnnnnnnnnnnnnnnnnnnnnnnnnnnnnnnnnnnnnnnnnnnnnnnnnnnnnnnnnnnnnnnnnnnnnnnnnnnnnnnnnnnnnnnnnnnnnnnnnnnnnnnnnnnnnnnnnnnnnnnnnnnnnnnnnnnnnnnnnnnnnnnnnnnnnnnnnnnnnnnnnnnnnnnnnnnnnnnnnnnnnnnnnnnnnnnnnnnnnnnnnnnnnnnnnnnnnnnnnnnnnnnnnnnnnnnnnnnnnnnnnnnnnnnnnnnnnnnnnnnnnnnnnnnnnnnnnnnnnnnnnnnnnnnnnnnnnnnnnnnnnnnnnnnnnnnnnnnnnnnnnnnnnnnnnnnnnnnnnnnnnnnnnnnnnnnnnnnnnnnnnnnnnnnnnnnnnnnnnnnnnnnnnnnnnnnnnnnnnnnnnnnnnnnnnnnnnnnnnnnnnnnnnnnnnnnnnnnnnnnnnnnnnnnnnnnnnnnnnnnnnnnnnnnnnnnnnnnnnnnnnnnnnnnnnnnnnnnnnnnnnnnnnnnnnnnnnnnnnnnnnnnnnnnnnnnnnnnnnnnnnnnnnnnnnnnnnnnnnnnnnnnnnnnnnnnnnnnnnnnnnnnnnnnnnnnnnnnnnnnnnnnnnnnnnnnnnnnnnnnnnnnnnnnnnnnnnnnnnnnnnnnnnnnnnnnnnnnnnnnnnnnnnnnnnnnnnnnnnnnnnnnnnnnnnnnnnnnnnnnnnnnnnnnnnnnnnnnnnnnnnnnnnnnnnnnnnnnnnnnnnnnnnnnnnnnnnnnnnnnnnnnnnnnnnnnnnnnnnnnnnnnnnnnnnnnnnnnnnnnnnnnnnnnnnnnnnnnnnnnnnnnnnnnnnnnnnnnnnnnnnnnnnnnnnnnnnnnnnnnnnnnnnnnnnnnnnnnnnnnnnnnnnnnnnnnnnnnnnnnnnnnnnnnnnnnnnnnnnnnnnnnnnnnnnnnnnnnnnnnnnnnnnnnnnnnnnnnnnnnnnnnnnnnnnnnnnnnnnnnnnnnnnnnnnnnnnnnnnnnnnnnnnnnnnnnnnnnnnnnnnnnnnnnnnnnnnnnnnnnnnnnnnnnnnnnnnnnnnnnnnnnnnnnnnnnnnnnnnnnnnnnnnnnnnnnnnnnnnnnnnnnnnnnnnnnnnnnnnnnnnnnnnnnnnnnnnnnnnnnnnnnnnnnnnnnnnnnnnnnnnnnnnnnnnnnnnnnnnnnnnnnnnnnnnnnnnnnnnnnnnnnnnnnnnnnnnnnnnnnnnnnnnnnnnnnnnnnnnnnnnnnnnnnnnnnnnnnnnnnnnnnnnnnnnnnnnnnnnnnnnnnnnnnnnnnnnnnnnnnnnnnnnnnnnnnnnnnnnnnnnnnnnnnnnnnnnnnnnnnnnnnnnnnnnnnnnnnnnnnnnnnnnnnnnnnnnnnnnnnnnnnnnnnnnnnnnnnnnnnnnnnnnnnnnnnnnnnnnnnnnnnnnnnnnnnnnnnnnnnnnnnnnnnnnnnnnnnnnnnnnnnnnnnnnnnnnnnnnnnnnnnnnnnnnnnnnnnnnnnnnnnnnnnnnnnnnnnnnnnnnnnnnnnnnnnnnnnnnnnnnnnnnnnnnnnnnnnnnnnnnnnnnnnnnnnnnnnnnnnnnnnnnnnnnnnnnnnnnnnnnnnnnnnnnnnnnnnnnnnnnnnnnnnnnnnnnnnnnnnnnnnnnnnnnnnnnnnnnnnnnnnnnnnnnnnnnnnnnnnnnnnnnnnnnnnnnnnnnnnnnnnnnnnnnnnnnnnnnnnnnnnnnnnnnnnnnnnnnnnnnnnnnnnnnnnnnnnnnnnnnnnnnnnnnnnnnnnnnnnnnnnnnnnnnnnnnnnnnnnnnnnnnnnnnnnnnnnnnnnnnnnnnnnnnnnnnnnnnnnnnnnnnnnnnnnnnnnnnnnnnnnnnnnnnnnnnnnnnnnnnnnnnnnnnnnnnnnnnnnnnnnnnnnnnnnnnnnnnnnnnnnnnnnnnnnnnnnnnnnnnnnnnnnnnnnnnnnnnnnnnnnnnnnnnnnnnnnnnnnnnnnnnnnnnnnnnnnnnnnnnnnnnnnnnnnnnnnnnnnnnnnnnnnnnnnnnnnnnnnnnnnnnnnnnnnnnnnnnnnnnnnnnnnnnnnnnnnnnnnnnnnnnnnnnnnnnnnnnnnnnnnnnnnnnnnnnnnnnnnnnnnnnnnnnnnnnnnnnnnnnnnnnnnnnnnnnnnnnnnnnnnnnnnnnnnnnnnnnnnnnnnnnnnnnnnnnnnnnnnnnnnnnnnnnnnnnnnnnnnnnnnnnnnnnnnnnnnnnnnnnnnnnnnnnnnnnnnnnnnnnnnnnnnnnnnnnnnnnnnnnnnnnnnnnnnnnnnnnnnnnnnnnnnnnnnnnnnnnnnnnnnnnnnnnnnnnnnnnnnnnnnnnnnnnnnnnnnnnnnnnnnnnnnnnnnnnnnnnnnnnnnnnnnnnnnnnnnnnnnnnnnnnnnnnnnnnnnnnnnnnnnnnnnnnnnnnnnnnnnnnnnnnnnnnnnnnnnnnnnnnnnnnnnnnnnnnnnnnnnnnnnnnnnnnnnnnnnnnnnnnnnnnnnnnnnnnnnnnnnnnnnnnnnnnnnnnnnnnnnnnnnnnnnnnnnnnnnnnnnnnnnnnnnnnnnnnnnnnnnnnnnnnnnnnnnnnnnnnnnnnnnnnnnnnnnnnnnnnnnnnnnnnnnnnnnnnnnnnnnnnnnnnnnnnnnnnnnnnnnnnnnnnnnnnnnnnnnnnnnnnnnnnnnnnnnnnnnnnnnnnnnnnnnnnnnnnnnnnnnnnnnnnnnnnnnnnnnnnnnnnnnnnnnnnnnnnnnnnnnnnnnnnnnnnnnnnnnnnnnnnnnnnnnnnnnnnnnnnnnnnnnnnnnnnnnnnnnnnnnnnnnnnnnnnnnnnnnnnnnnnnnnnnnnnnnnnnnnnnnnnnnnnnnnnnnnnnnnnnnnnnnnnnnnnnnnnnnnnnnnnnnnnnnnnnnnnnnnnnnnnnnnnnnnnnnnnnnnnnnnnnnnnnnnnnnnnnnnnnnnnnnnnnnnnnnnnnnnnnnnnnnnnnnnnnnnnnnnnnnnnnnnnnnnnnnnnnnnnnnnnnnnnnnnnnnnnnnnnnnnnnnnnnnnnnnnnnnnnnnnnnnnnnnnnnnnnnnnnnnnnnnnnnnnnnnnnnnnnnnnnnnnnnnnnnnnnnnnnnnnnnnnnnnnnnnnnnnnnnnnnnnnnnnnnnnnnnnnnnnnnnnnnnnnnnnnnnnnnnnnnnnnnnnnnnnnnnnnnnnnnnnnnnnnnnnnnnnnnnnnnnnnnnnnnnnnnnnnnnnnnnnnnnnnnnnnnnnnnnnnnnnnnnnnnnnnnnnnnnnnnnnnnnnnnnnnnnnnnnnnnnnnnnnnnnnnnnnnnnnnnnnnnnnnnnnnnnnnnnnnnnnnnnnnnnnnnnnnnnnnnnnnnnnnnnnnnnnnnnnnnnnnnnnnnnnnnnnnnnnnnnnnnnnnnnnnnnnnnnnnnnnnnnnnnnnnnnnnnnnnnnnnnnnnnnnnnnnnnnnnnnnnnnnnnnnnnnnnnnnnnnnnnnnnnnnnnnnnnnnnnnnnnnnnnnnnnnnnnnnnnnnnnnnnnnnnnnnnnnnnnnnnnnnnnnnnnnnnnnnnnnnnnnnnnnnnnnnnnnnnnnnnnnnnnnnnnnnnnnnnnnnnnnnnnnnnnnnnnnnnnnnnnnnnnnnnnnnnnnnnnnnnnnnnnnnnnnnnnnnnnnnnnnnnnnnnnnnnnnnnnnnnnnnnnnnnnnnnnnnnnnnnnnnnnnnnnnnnnnnnnnnnnnnnnnnnnnnnnnnnnnnnnnnnnnnnnnnnnnnnnnnnnnnnnnnnnnnnnnnnnnnnnnnnnnnnnnnnnnnnnnnnnnnnnnnnnnnnnnnnnnnnnnnnnnnnnnnnnnnnnnnnnnnnnnnnnnnnnnnnnnnnnnnnnnnnnnnnnnnnnnnnnnnnnnnnnnnnnnnnnnnnnnnnnnnnnnnnnnnnnnnnnnnnnnnnnnnnnnnnnnnnnnnnnnnnnnnnnnnnnnnnnnnnnnnnnnnnnnnnnnnnnnnnnnnnnnnnnnnnnnnnnnnnnnnnnnnnnnnnnnnnnnnnnnnnnnnnnnnnnnnnnnnnnnnnnnnnnnnnnnnnnnnnnnnnnnnnnnnnnnnnnnnnnnnnnnnnnnnnnnnnnnnnnnnnnnnnnnnnnnnnnnnnnnnnnnnnnnnnnnnnnnnnnnnnnnnnnnnnnnnnnnnnnnnnnnnnnnnnnnnnnnnnnnnnnnnnnnnnnnnnnnnnnnnnnnnnnnnnnnnnnnnnnnnnnnnnnnnnnnnnnnnnnnnnnnnnnnnnnnnnnnnnnnnnnnnnnnnnnnnnnnnnnnnnnnnnnnnnnnnnnnnnnnnnnnnnnnnnnnnnnnnnnnnnnnnnnnnnnnnnnnnnnnnnnnnnnnnnnnnnnnnnnnnnnnnnnnnnnnnnnnnnnnnnnnnnnnnnnnnnnnnnnnnnnnnnnnnnnnnnnnnnnnnnnnnnnnnnnnnnnnnnnnnnnnnnnnnnnnnnnnnnnnnnnnnnnnnnnnnnnnnnnnnnnnnnnnnnnnnnnnnnnnnnnnnnnnnnnnnnnnnnnnnnnnnnnnnnnnnnnnnnnnnnnnnnnnnnnnnnnnnnnnnnnnnnnnnnnnnnnnnnnnnnnnnnnnnnnnnnnnnnnnnnnnnnnnnnnnnnnnnnnnnnnnnnnnnnnnnnnnnnnnnnnnnnnnnnnnnnnnnnnnnnnnnnnnnnnnnnnnnnnnnnnnnnnnnnnnnnnnnnnnnnnnnnnnnnnnnnnnnnnnnnnnnnnnnnnnnnnnnnnnnnnnnnnnnnnnnnnnnnnnnnnnnnnnnnnnnnnnnnnnnnnnnnnnnnnnnnnnnnnnnnnnnnnnnnnnnnnnnnnnnnnnnnnnnnnnnnnnnnnnnnnnnnnnnnnnnnnnnnnnnnnnnnnnnnnnnnnnnnnnnnnnnnnnnnnnnnnnnnnnnnnnnnnnnnnnnnnnnnnnnnnnnnnnnnnnnnnnnnnnnnnnnnnnnnnnnnnnnnnnnnnnnnnnnnnnnnnnnnnnnnnnnnnnnnnnnnnnnnnnnnnnnnnnnnnnnnnnnnnnnnnnnnnnnnnnnnnnnnnnnnnnnnnnnnnnnnnnnnnnnnnnnnnnnnnnnnnnnnnnnnnnnnnnnnnnnnnnnnnnnnnnnnnnnnnnnnnnnnnnnnnnnnnnnnnnnnnnnnnnnnnnnnnnnnnnnnnnnnnnnnnnnnnnnnnnnnnnnnnnnnnnnnnnnnnnnnnnnnnnnnnnnnnnnnnnnnnnnnnnnnnnnnnnnnnnnnnnnnnnnnnnnnnnnnnnnnnnnnnnnnnnnnnnnnnnnnnnnnnnnnnnnnnnnnnnnnnnnnnnnnnnnnnnnnnnnnnnnnnnnnnnnnnnnnnnnnnnnnnnnnnnnnnnnnnnnnnnnnnnnnnnnnnnnnnnnnnnnnnnnnnnnnnnnnnnnnnnnnnnnnnnnnnnnnnnnnnnnnnnnnnnnnnnnnnnnnnnnnnnnnnnnnnnnnnnnnnnnnnnnnnnnnnnnnnnnnnnnnnnnnnnnnnnnnnnnnnnnnnnnnnnnnnnnnnnnnnnnnnnnnnnnnnnnnnnnnnnnnnnnnnnnnnnnnnnnnnnnnnnnnnnnnnnnnnnnnnnnnnnnnnnnnnnnnnnnnnnnnnnnnnnnnnnnnnnnnnnnnnnnnnnnnnnnnnnnnnnnnnnnnnnnnnnnnnnnnnnnnnnnnnnnnnnnnnnnnnnnnnnnnnnnnnnnnnnnnnnnnnnnnnnnnnnnnnnnnnnnnnnnnnnnnnnnnnnnnnnnnnnnnnnnnnnnnnnnnnnnnnnnnnnnnnnnnnnnnnnnnnnnnnnnnnnnnnnnnnnnnnnnnnnnnnnnnnnnnnnnnnnnnnnnnnnnnnnnnnnnnnnnnnnnnnnnnnnnnnnnnnnnnnnnnnnnnnnnnnnnnnnnnnnnnnnnnnnnnnnnnnnnnnnnnnnnnnnnnnnnnnnnnnnnnnnnnnnnnnnnnnnnnnnnnnnnnnnnnnnnnnnnnnnnnnnnnnnnnnnnnnnnnnnnnnnnnnnnnnnnnnnnnnnnnnnnnnnnnnnnnnnnnnnnnnnnnnnnnnnnnnnnnnnnnnnnnnnnnnnnnnnnnnnnnnnnnnnnnnnnnnnnnnnnnnnnnnnnnnnnnnnnnnnnnnnnnnnnnnnnnnnnnnnnnnnnnnnnnnnnnnnnnnnnnnnnnnnnnnnnnnnnnnnnnnnnnnnnnnnnnnnnnnnnnnnnnnnnnnnnnnnnnnnnnnnnnnnnnnnnnnnnnnnnnnnnnnnnnnnnnnnnnnnnnnnnnnnnnnnnnnnnnnnnnnnnnnnnnnnnnnnnnnnnnnnnnnnnnnnnnnnnnnnnnnnnnnnnnnnnnnnnnnnnnnnnnnnnnnnnnnnnnnnnnnnnnnnnnnnnnnnnnnnnnnnnnnnnnnnnnnnnnnnnnnnnnnnnnnnnnnnnnnnnnnnnnnnnnnnnnnnnnnnnnnnnnnnnnnnnnnnnnnnnnnnnnnnnnnnnnnnnnnnnnnnnnnnnnnnnnnnnnnnnnnnnnnnnnnnnnnnnnnnnnnnnnnnnnnnnnnnnnnnnnnnnnnnnnnnnnnnnnnnnnnnnnnnnnnnnnnnnnnnnnnnnnnnnnnnnnnnnnnnnnnnnnnnnnnnnnnnnnnnnnnnnnnnnnnnnnnnnnnnnnnnnnnnnnnnnnnnnnnnnnnnnnnnnnnnnnnnnnnnnnnnnnnnnnnnnnnnnnnnnnnnnnnnnnnnnnnnnnnnnnnnnnnnnnnnnnnnnnnnnnnnnnnnnnnnnnnnnnnnnnnnnnnnnnnnnnnnnnnnnnnnnnnnnnnnnnnnnnnnnnnnnnnnnnnnnnnnnnnnnnnnnnnnnnnnnnnnnnnnnnnnnnnnnnnnnnnnnnnnnnnnnnnnnnnnnnnnnnnnnnnnnnnnnnnnnnnnnnnnnnnnnnnnnnnnnnnnnnnnnnnnnnnnnnnnnnnnnnnnnnnnnnnnnnnnnnnnnnnnnnnnnnnnnnnnnnnnnnnnnnnnnnnnnnnnnnnnnnnnnnnnnnnnnnnnnnnnnnnnnnnnnnnnnnnnnnnnnnnnnnnnnnnnnnnnnnnnnnnnnnnnnnnnnnnnnnnnnnnnnnnnnnnnnnnnnnnnnnnnnnnnnnnnnnnnnnnnnnnnnnnnnnnnnnnnnnnnnnnnnnnnnnnnnnnnnnnnnnnnnnnnnnnnnnnnnnnnnnnnnnnnnnnnnnnnnnnnnnnnnnnnnnnnnnnnnnnnnnnnnnnnnnnnnnnnnnnnnnnnnnnnnnnnnnnnnnnnnnnnnnnnnnnnnnnnnnnnnnnnnnnnnnnnnnnnnnnnnnnnnnnnnnnnnnnnnnnnnnnnnnnnnnnnnnnnnnnnnnnnnnnnnnnnnnnnnnnnnnnnnnnnnnnnnnnnnnnnnnnnnnnnnnnnnnnnnnnnnnnnnnnnnnnnnnnnnnnnnnnnnnnnnnnnnnnnnnnnnnnnnnnnnnnnnnnnnnnnnnnnnnnnnnnnnnnnnnnnnnnnnnnnnnnnnnnnnnnnnnnnnnnnnnnnnnnnnnnnnnnnnnnnnnnnnnnnnnnnnnnnnnnnnnnnnnnnnnnnnnnnnnnnnnnnnnnnnnnnnnnnnnnnnnnnnnnnnnnnnnnnnnnnnnnnnnnnnnnnnnnnnnnnnnnnnnnnnnnnnnnnnnnnnnnnnnnnnnnnnnnnnnnnnnnnnnnnnnnnnnnnnnnnnnnnnnnnnnnnnnnnnnnnnnnnnnnnnnnnnnnnnnnnnnnnnnnnnnnnnnnnnnnnnnnnnnnnnnnnnnnnnnnnnnnnnnnnnnnnnnnnnnnnnnnnnnnnnnnnnnnnnnnnnnnnnnnnnnnnnnnnnnnnnnnnnnnnnnnnnnnnnnnnnnnnnnnnnnnnnnnnnnnnnnnnnnnnnnnnnnnnnnnnnnnnnnnnnnnnnnnnnnnnnnnnnnnnnnnnnnnnnnnnnnnnnnnnnnnnnnnnnnnnnnnnnnnnnnnnnnnnnnnnnnnnnnnnnnnnnnnnnnnnnnnnnnnnnnnnnnnnnnnnnnnnnnnnnnnnnnnnnnnnnnnnnnnnnnnnnnnnnnnnnnnnnnnnnnnnnnnnnnnnnnnnnnnnnnnnnnnnnnnnnnnnnnnnnnnnnnnnnnnnnnnnnnnnnnnnnnnnnnnnnnnnnnnnnnnnnnnnnnnnnnnnnnnnnnnnnnnnnnnnnnnnnnnnnnnnnnnnnnnnnnnnnnnnnnnnnnnnnnnnnnnnnnnnnnnnnnnnnnnnnnnnnnnnnnnnnnnnnnnnnnnnnnnnnnnnnnnnnnnnnnnnnnnnnnnnnnnnnnnnnnnnnnnnnnnnnnnnnnnnnnnnnnnnnnnnnnnnnnnnnnnnnnnnnnnnnnnnnnnnnnnnnnnnnnnnnnnnnnnnnnnnnnnnnnnnnnnnnnnnnnnnnnnnnnnnnnnnnnnnnnnnnnnnnnnnnnnnnnnnnnnnnnnnnnnnnnnnnnnnnnnnnnnnnnnnnnnnnnnnnnnnnnnnnnnnnnnnnnnnnnnnnnnnnnnnnnnnnnnnnnnnnnnnnnnnnnnnnnnnnnnnnnnnnnnnnnnnnnnnnnnnnnnnnnnnnnnnnnnnnnnnnnnnnnnnnnnnnnnnnnnnnnnnnnnnnnnnnnnnnnnnnnnnnnnnnnnnnnnnnnnnnnnnnnnnnnnnnnnnnnnnnnnnnnnnnnnnnnnnnnnnnnnnnnnnnnnnnnnnnnnnnnnnnnnnnnnnnnnnnnnnnnnnnnnnnnnnnnnnnnnnnnnnnnnnnnnnnnnnnnnnnnnnnnnnnnnnnnnnnnnnnnnnnnnnnnnnnnnnnnnnnnnnnnnnnnnnnnnnnnnnnnnnnnnnnnnnnnnnnnnnnnnnnnnnnnnnnnnnnnnnnnnnnnnnnnnnnnnnnnnnnnnnnnnnnnnnnnnnnnnnnnnnnnnnnnnnnnnnnnnnnnnnnnnnnnnnnnnnnnnnnnnnnnnnnnnnnnnnnnnnnnnnnnnnnnnnnnnnnnnnnnnnnnnnnnnnnnnnnnnnnnnnnnnnnnnnnnnnnnnnnnnnnnnnnnnnnnnnnnnnnnnnnnnnnnnnnnnnnnnnnnnnnnnnnnnnnnnnnnnnnnnnnnnnnnnnnnnnnnnnnnnnnnnnnnnnnnnnnnnnnnnnnnnnnnnnnnnnnnnnnnnnnnnnnnnnnnnnnnnnnnnnnnnnnnnnnnnnnnnnnnnnnnnnnnnnnnnnnnnnnnnnnnnnnnnnnnnnnnnnnnnnnnnnnnnnnnnnnnnnnnnnnnnnnnnnnnnnnnnnnnnnnnnnnnnnnnnnnnnnnnnnnnnnnnnnnnnnnnnnnnnnnnnnnnnnnnnnnnnnnnnnnnnnnnnnnnnnnnnnnnnnnnnnnnnnnnnnnnnnnnnnnnnnnnnnnnnnnnnnnnnnnnnnnnnnnnnnnnnnnnnnnnnnnnnnnnnnnnnnnnnnnnnnnnnnnnnnnnnnnnnnnnnnnnnnnnnnnnnnnnnnnnnnnnnnnnnnnnnnnnnnnnnnnnnnnnnnnnnnnnnnnnnnnnnnnnnnnnnnnnnnnnnnnnnnnnnnnnnnnnnnnnnnnnnnnnnnnnnnnnnnnnnnnnnnnnnnnnnnnnnnnnnnnnnnnnnnnnnnnnnnnnnnnnnnnnnnnnnnnnnnnnnnnnnnnnnnnnnnnnnnnnnnnnnnnnnnnnnnnnnnnnnnnnnnnnnnnnnnnnnnnnnnnnnnnnnnnnnnnnnnnnnnnnnnnnnnnnnnnnnnnnnnnnnnnnnnnnnnnnnnnnnnnnnnnnnnnnnnnnnnnnnnnnnnnnnnnnnnnnnnnnnnnnnnnnnnnnnnnnnnnnnnnnnnnnnnnnnnnnnnnnnnnnnnnnnnnnnnnnnnnnnnnnnnnnnnnnnnnnnnnnnnnnnnnnnnnnnnnnnnnnnnnnnnnnnnnnnnnnnnnnnnnnnnnnnnnnnnnnnnnnnnnnnnnnnnnnnnnnnnnnnnnnnnnnnnnnnnnnnnnnnnnnnnnnnnnnnnnnnnnnnnnnnnnnnnnnnnnnnnnnnnnnnnnnnnnnnnnnnnnnnnnnnnnnnnnnnnnnnnnnnnnnnnnnnnnnnnnnnnnnnnnnnnnnnnnnnnnnnnnnnnnnnnnnnnnnnnnnnnnnnnnnnnnnnnnnnnnnnnnnnnnnnnnnnnnnnnnnnnnnnnnnnnnnnnnnnnnnnnnnnnnnnnnnnnnnnnnnnnnnnnnnnnnnnnnnnnnnnnnnnnnnnnnnnnnnnnnnnnnnnnnnnnnnnnnnnnnnnnnnnnnnnnnnnnnnnnnnnnnnnnnnnnnnnnnnnnnnnnnnnnnnnnnnnnnnnnnnnnnnnnnnnnnnnnnnnnnnnnnnnnnnnnnnnnnnnnnnnnnnnnnnnnnnnnnnnnnnnnnnnnnnnnnnnnnnnnnnnnnnnnnnnnnnnnnnnnnnnnnnnnnnnnnnnnnnnnnnnnnnnnnnnnnnnnnnnnnnnnnnnnnnnnnnnnnnnnnnnnnnnnnnnnnnnnnnnnnnnnnnnnnnnnnnnnnnnnnnnnnnnnnnnnnnnnnnnnnnnnnnnnnnnnnnnnnnnnnnnnnnnnnnnnnnnnnnnnnnnnnnnnnnnnnnnnnnnnnnnnnnnnnnnnnnnnnnnnnnnnnnnnnnnnnnnnnnnnnnnnnnnnnnnnnnnnnnnnnnnnnnnnnnnnnnnnnnnnnnnnnnnnnnnnnnnnnnnnnnnnnnnnnnnnnnnnnnnnnnnnnnnnnnnnnnnnnnnnnnnnnnnnnnnnnnnnnnnnnnnnnnnnnnnnnnnnnnnnnnnnnnnnnnnnnnnnnnnnnnnnnnnnnnnnnnnnnnnnnnnnnnnnnnnnnnnnnnnnnnnnnnnnnnnnnnnnnnnnnnnnnnnnnnnnnnnnnnnnnnnnnnnnnnnnnnnnnnnnnnnnnnnnnnnnnnnnnnnnnnnnnnnnnnnnnnnnnnnnnnnnnnnnnnnnnnnnnnnnnnnnnnnnnnnnnnnnnnnnnnnnnnnnnnnnnnnnnnnnnnnnnnnnnnnnnnnnnnnnnnnnnnnnnnnnnnnnnnnnnnnnnnnnnnnnnnnnnnnnnnnnnnnnnnnnnnnnnnnnnnnnnnnnnnnnnnnnnnnnnnnnnnnnnnnnnnnnnnnnnnnnnnnnnnnnnnnnnnnnnnnnnnnnnnnnnnnnnnnnnnnnnnnnnnnnnnnnnnnnnnnnnnnnnnnnnnnnnnnnnnnnnnnnnnnnnnnnnnnnnnnnnnnnnnnnnnnnnnnnnnnnnnnnnnnnnnnnnnnnnnnnnnnnnnnnnnnnnnnnnnnnnnnnnnnnnnnnnnnnnnnnnnnnnnnnnnnnnnnnnnnnnnnnnnnnnnnnnnnnnnnnnnnnnnnnnnnnnnnnnnnnnnnnnnnnnnnnnnnnnnnnnnnnnnnnnnnnnnnnnnnnnnnnnnnnnnnnnnnnnnnnnnnnnnnnnnnnnnnnnnnnnnnnnnnnnnnnnnnnnnnnnnnnnnnnnnnnnnnnnnnnnnnnnnnnnnnnnnnnnnnnnnnnnnnnnnnnnnnnnnnnnnnnnnnnnnnnnnnnnnnnnnnnnnnnnnnnnnnnnnnnnnnnnnnnnnnnnnnnnnnnnnnnnnnnnnnnnnnnnnnnnnnnnnnnnnnnnnnnnnnnnnnnnnnnnnnnnnnnnnnnnnnnnnnnnnnnnnnnnnnnnnnnnnnnnnnnnnnnnnnnnnnnnnnnnnnnnnnnnnnnnnnnnnnnnnnnnnnnnnnnnnnnnnnnnnnnnnnnnnnnnnnnnnnnnnnnnnnnnnnnnnnnnnnnnnnnnnnnnnnnnnnnnnnnnnnnnnnnnnnnnnnnnnnnnnnnnnnnnnnnnnnnnnnnnnnnnnnnnnnnnnnnnnnnnnnnnnnnnnnnnnnnnnnnnnnnnnnnnnnnnnnnnnnnnnnnnnnnnnnnnnnnnnnnnnnnnnnnnnnnnnnnnnnnnnnnnnnnnnnnnnnnnnnnnnnnnnnnnnnnnnnnnnnnnnnnnnnnnnnnnnnnnnnnnnnnnnnnnnnnnnnnnnnnnnnnnnnnnnnnnnnnnnnnnnnnnnnnnnnnnnnnnnnnnnnnnnnnnnnnnnnnnnnnnnnnnnnnnnnnnnnnnnnnnnnnnnnnnnnnnnnnnnnnnnnnnnnnnnnnnnnnnnnnnnnnnnnnnnnnnnnnnnnnnnnnnnnnnnnnnnnnnnnnnnnnnnnnnnnnnnnnnnnnnnnnnnnnnnnnnnnnnnnnnnnnnnnnnnnnnnnnnnnnnnnnnnnnnnnnnnnnnnnnnnnnnnnnnnnnnnnnnnnnnnnnnnnnnnnnnnnnnnnnnnnnnnnnnnnnnnnnnnnnnnnnnnnnnnnnnnnnnnnnnnnnnnnnnnnnnnnnnnnnnnnnnnnnnnnnnnnnnnnnnnnnnnnnnnnnnnnnnnnnnnnnnnnnnnnnnnnnnnnnnnnnnnnnnnnnnnnnnnnnnnnnnnnnnnnnnnnnnnnnnnnnnnnnnnnnnnnnnnnnnnnnnnnnnnnnnnnnnnnnnnnnnnnnnnnnnnnnnnnnnnnnnnnnnnnnnnnnnnnnnnnnnnnnnnnnnnnnnnnnnnnnnnnnnnnnnnnnnnnnnnnnnnnnnnnnnnnnnnnnnnnnnnnnnnnnnnnnnnnnnnnnnnnnnnnnnnnnnnnnnnnnnnnnnnnnnnnnnnnnnnnnnnnnnnnnnnnnnnnnnnnnnnnnnnnnnnnnnnnnnnnnnnnnnnnnnnnnnnnnnnnnnnnnnnnnnnnnnnnnnnnnnnnnnnnnnnnnnnnnnnnnnnnnnnnnnnnnnnnnnnnnnnnnnnnnnnnnnnnnnnnnnnnnnnnnnnnnnnnnnnnnnnnnnnnnnnnnnnnnnnnnnnnnnnnnnnnnnnnnnnnnnnnnnnnnnnnnnnnnnnnnnnnnnnnnnnnnnnnnnnnnnnnnnnnnnnnnnnnnnnnnnnnnnnnnnnnnnnnnnnnnnnnnnnnnnnnnnnnnnnnnnnnnnnnnnnnnnnnnnnnnnnnnnnnnnnnnnnnnnnnnnnnnnnnnnnnnnnnnnnnnnnnnnnnnnnnnnnnnnnnnnnnnnnnnnnnnnnnnnnnnnnnnnnnnnnnnnnnnnnnnnnnnnnnnnnnnnnnnnnnnnnnnnnnnnnnnnnnnnnnnnnnnnnnnnnnnnnnnnnnnnnnnnnnnnnnnnnnnnnnnnnnnnnnnnnnnnnnnnnnnnnnnnnnnnnnnnnnnnnnnnnnnnnnnnnnnnnnnnnnnnnnnnnnnnnnnnnnnnnnnnnnnnnnnnnnnnnnnnnnnnnnnnnnnnnnnnnnnnnnnnnnnnnnnnnnnnnnnnnnnnnnnnnnnnnnnnnnnnnnnnnnnnnnnnnnnnnnnnnnnnnnnnnnnnnnnnnnnnnnnnnnnnnnnnnnnnnnnnnnnnnnnnnnnnnnnnnnnnnnnnnnnnnnnnnnnnnnnnnnnnnnnnnnnnnnnnnnnnnnnnnnnnnnnnnnnnnnnnnnnnnnnnnnnnnnnnnnnnnnnnnnnnnnnnnnnnnnnnnnnnnnnnnnnnnnnnnnnnnnnnnnnnnnnnnnnnnnnnnnnnnnnnnnnnnnnnnnnnnnnnnnnnnnnnnnnnnnnnnnnnnnnnnnnnnnnnnnnnnnnnnnnnnnnnnnnnnnnnnnnnnnnnnnnnnnnnnnnnnnnnnnnnnnnnnnnnnnnnnnnnnnnnnnnnnnnnnnnnnnnnnnnnnnnnnnnnnnnnnnnnnnnnnnnnnnnnnnnnnnnnnnnnnnnnnnnnnnnnnnnnnnnnnnnnnnnnnnnnnnnnnnnnnnnnnnnnnnnnnnnnnnnnnnnnnnnnnnnnnnnnnnnnnnnnnnnnnnnnnnnnnnnnnnnnnnnnnnnnnnnnnnnnnnnnnnnnnnnnnnnnnnnnnnnnnnnnnnnnnnnnnnnnnnnnnnnnnnnnnnnnnnnnnnnnnnnnnnnnnnnnnnnnnnnnnnnnnnnnnnnnnnnnnnnnnnnnnnnnnnnnnnnnnnnnnnnnnnnnnnnnnnnnnnnnnnnnnnnnnnnnnnnnnnnnnnnnnnnnnnnnnnnnnnnnnnnnnnnnnnnnnnnnnnnnnnnnnnnnnnnnnnnnnnnnnnnnnnnnnnnnnnnnnnnnnnnnnnnnnnnnnnnnnnnnnnnnnnnnnnnnnnnnnnnnnnnnnnnnnnnnnnnnnnnnnnnnnnnnnnnnnnnnnnnnnnnnnnnnnnnnnnnnnnnnnnnnnnnnnnnnnnnnnnnnnnnnnnnnnnnnnnnnnnnnnnnnnnnnnnnnnnnnnnnnnnnnnnnnnnnnnnnnnnnnnnnnnnnnnnnnnnnnnnnnnnnnnnnnnnnnnnnnnnnnnnnnnnnnnnnnnnnnnnnnnnnnnnnnnnnnnnnnnnnnnnnnnnnnnnnnnnnnnnnnnnnnnnnnnnnnnnnnnnnnnnnnnnnnnnnnnnnnnnnnnnnnnnnnnnnnnnnnnnnnnnnnnnnnnnnnnnnnnnnnnnnnnnnnnnnnnnnnnnnnnnnnnnnnnnnnnnnnnnnnnnnnnnnnnnnnnnnnnnnnnnnnnnnnnnnnnnnnnnnnnnnnnnnnnnnnnnnnnnnnnnnnnnnnnnnnnnnnnnnnnnnnnnnnnnnnnnnnnnnnnnnnnnnnnnnnnnnnnnnnnnnnnnnnnnnnnnnnnnnnnnnnnnnnnnnnnnnnnnnnnnnnnnnnnnnnnnnnnnnnnnnnnnnnnnnnnnnnnnnnnnnnnnnnnnnnnnnnnnnnnnnnnnnnnnnnnnnnnnnnnnnnnnnnnnnnnnnnnnnnnnnnnnnnnnnnnnnnnnnnnnnnnnnnnnnnnnnnnnnnnnnnnnnnnnnnnnnnnnnnnnnnnnnnnnnnnnnnnnnnnnnnnnnnnnnnnnnnnnnnnnnnnnnnnnnnnnnnnnnnnnnnnnnnnnnnnnnnnnnnnnnnnnnnnnnnnnnnnnnnnnnnnnnnnnnnnnnnnnnnnnnnnnnnnnnnnnnnnnnnnnnnnnnnnnnnnnnnnnnnnnnnnnnnnnnnnnnnnnnnnnnnnnnnnnnnnnnnnnnnnnnnnnnnnnnnnnnnnnnnnnnnnnnnnnnnnnnnnnnnnnnnnnnnnnnnnnnnnnnnnnnnnnnnnnnnnnnnnnnnnnnnnnnnnnnnnnnnnnnnnnnnnnnnnnnnnnnnnnnnnnnnnnnnnnnnnnnnnnnnnnnnnnnnnnnnnnnnnnnnnnnnnnnnnnnnnnnnnnnnnnnnnnnnnnnnnnnnnnnnnnnnnnnnnnnnnnnnnnnnnnnnnnnnnnnnnnnnnnnnnnnnnnnnnnnnnnnnnnnnnnnnnnnnnnnnnnnnnnnnnnnnnnnnnnnnnnnnnnnnnnnnnnnnnnnnnnnnnnnnnnnnnnnnnnnnnnnnnnnnnnnnnnnnnnnnnnnnnnnnnnnnnnnnnnnnnnnnnnnnnnnnnnnnnnnnnnnnnnnnnnnnnnnnnnnnnnnnnnnnnnnnnnnnnnnnnnnnnnnnnnnnnnnnnnnnnnnnnnnnnnnnnnnnnnnnnnnnnnnnnnnnnnnnnnnnnnnnnnnnnnnnnnnnnnnnnnnnnnnnnnnnnnnnnnnnnnnnnnnnnnnnnnnnnnnnnnnnnnnnnnnnnnnnnnnnnnnnnnnnnnnnnnnnnnnnnnnnnnnnnnnnnnnnnnnnnnnnnnnnnnnnnnnnnnnnnnnnnnnnnnnnnnnnnnnnnnnnnnnnnnnnnnnnnnnnnnnnnnnnnnnnnnnnnnnnnnnnnnnnnnnnnnnnnnnnnnnnnnnnnnnnnnnnnnnnnnnnnnnnnnnnnnnnnnnnnnnnnnnnnnnnnnnnnnnnnnnnnnnnnnnnnnnnnnnnnnnnnnnnnnnnnnnnnnnnnnnnnnnnnnnnnnnnnnnnnnnnnnnnnnnnnnnnnnnnnnnnnnnnnnnnnnnnnnnnnnnnnnnnnnnnnnnnnnnnnnnnnnnnnnnnnnnnnnnnnnnnnnnnnnnnnnnnnnnnnnnnnnnnnnnnnnnnnnnnnnnnnnnnnnnnnnnnnnnnnnnnnnnnnnnnnnnnnnnnnnnnnnnnnnnnnnnnnnnnnnnnnnnnnnnnnnnnnnnnnnnnnnnnnnnnnnnnnnnnnnnnnnnnnnnnnnnnnnnnnnnnnnnnnnnnnnnnnnnnnnnnnnnnnnnnnnnnnnnnnnnnnnnnnnnnnnnnnnnnnnnnnnnnnnnnnnnnnnnnnnnnnnnnnnnnnnnnnnnnnnnnnnnnnnnnnnnnnnnnnnnnnnnnnnnnnnnnnnnnnnnnnnnnnnnnnnnnnnnnnnnnnnnnnnnnnnnnnnnnnnnnnnnnnnnnnnnnnnnnnnnnnnnnnnnnnnnnnnnnnnnnnnnnnnnnnnnnnnnnnnnnnnnnnnnnnnnnnnnnnnnnnnnnnnnnnnnnnnnnnnnnnnnnnnnnnnnnnnnnnnnnnnnnnnnnnnnnnnnnnnnnnnnnnnnnnnnnnnnnnnnnnnnnnnnnnnnnnnnnnnnnnnnnnnnnnnnnnnnnnnnnnnnnnnnnnnnnnnnnnnnnnnnnnnnnnnnnnnnnnnnnnnnnnnnnnnnnnnnnnnnnnnnnnnnnnnnnnnnnnnnnnnnnnnnnnnnnnnnnnnnnnnnnnnnnnnnnnnnnnnnnnnnnnnnnnnnnnnnnnnnnnnnnnnnnnnnnnnnnnnnnnnnnnnnnnnnnnnnnnnnnnnnnnnnnnnnnnnnnnnnnnnnnnnnnnnnnnnnnnnnnnnnnnnnnnnnnnnnnnnnnnnnnnnnnnnnnnnnnnnnnnnnnnnnnnnnnnnnnnnnnnnnnnnnnnnnnnnnnnnnnnnnnnnnnnnnnnnnnnnnnnnnnnnnnnnnnnnnnnnnnnnnnnnnnnnnnnnnnnnnnnnnnnnnnnnnnnnnnnnnnnnnnnnnnnnnnnnnnnnnnnnnnnnnnnnnnnnnnnnnnnnnnnnnnnnnnnnnnnnnnnnnnnnnnnnnnnnnnnnnnnnnnnnnnnnnnnnnnnnnnnnnnnnnnnnnnnnnnnnnnnnnnnnnnnnnnnnnnnnnnnnnnnnnnnnnnnnnnnnnnnnnnnnnnnnnnnnnnnnnnnnnnnnnnnnnnnnnnnnnnnnnnnnnnnnnnnnnnnnnnnnnnnnnnnnnnnnnnnnnnnnnnnnnnnnnnnnnnnnnnnnnnnnnnnnnnnnnnnnnnnnnnnnnnnnnnnnnnnnnnnnnnnnnnnnnnnnnnnnnnnnnnnnnnnnnnnnnnnnnnnnnnnnnnnnnnnnnnnnnnnnnnnnnnnnnnnnnnnnnnnnnnnnnnnnnnnnnnnnnnnnnnnnnnnnnnnnnnnnnnnnnnnnnnnnnnnnnnnnnnnnnnnnnnnnnnnnnnnnnnnnnnnnnnnnnnnnnnnnnnnnnnnnnnnnnnnnnnnnnnnnnnnnnnnnnnnnnnnnnnnnnnnnnnnnnnnnnnnnnnnnnnnnnnnnnnnnnnnnnnnnnnnnnnnnnnnnnnnnnnnnnnnnnnnnnnnnnnnnnnnnnnnnnnnnnnnnnnnnnnnnnnnnnnnnnnnnnnnnnnnnnnnnnnnnnnnnnnnnnnnnnnnnnnnnnnnnnnnnnnnnnnnnnnnnnnnnnnnnnnnnnnnnnnnnnnnnnnnnnnnnnnnnnnnnnnnnnnnnnnnnnnnnnnnnnnnnnnnnnnnnnnnnnnnnnnnnnnnnnnnnnnnnnnnnnnnnnnnnnnnnnnnnnnnnnnnnnnnnnnnnnnnnnnnnnnnnnnnnnnnnnnnnnnnnnnnnnnnnnnnnnnnnnnnnnnnnnnnnnnnnnnnnnnnnnnnnnnnnnnnnnnnnnnnnnnnnnnnnnnnnnnnnnnnnnnnnnnnnnnnnnnnnnnnnnnnnnnnnnnnnnnnnnnnnnnnnnnnnnnnnnnnnnnnnnnnnnnnnnnnnnnnnnnnnnnnnnnnnnnnnnnnnnnnnnnnnnnnnnnnnnnnnnnnnnnnnnnnnnnnnnnnnnnnnnnnnnnnnnnnnnnnnnnnnnnnnnnnnnnnnnnnnnnnnnnnnnnnnnnnnnnnnnnnnnnnnnnnnnnnnnnnnnnnnnnnnnnnnnnnnnnnnnnnnnnnnnnnnnnnnnnnnnnnnnnnnnnnnnnnnnnnnnnnnnnnnnnnnnnnnnnnnnnnnnnnnnnnnnnnnnnnnnnnnnnnnnnnnnnnnnnnnnnnnnnnnnnnnnnnnnnnnnnnnnnnnnnnnnnnnnnnnnnnnnnnnnnnnnnnnnnnnnnnnnnnnnnnnnnnnnnnnnnnnnnnnnnnnnnnnnnnnnnnnnnnnnnnnnnnnnnnnnnnnnnnnnnnnnnnnnnnnnnnnnnnnnnnnnnnnnnnnnnnnnnnnnnnnnnnnnnnnnnnnnnnnnnnnnnnnnnnnnnnnnnnnnnnnnnnnnnnnnnnnnnnnnnnnnnnnnnnnnnnnnnnnnnnnnnnnnnnnnnnnnnnnnnnnnnnnnnnnnnnnnnnnnnnnnnnnnnnnnnnnnnnnnnnnnnnnnnnnnnnnnnnnnnnnnnnnnnnnnnnnnnnnnnnnnnnnnnnnnnnnnnnnnnnnnnnnnnnnnnnnnnnnnnnnnnnnnnnnnnnnnnnnnnnnnnnnnnnnnnnnnnnnnnnnnnnnnnnnnnnnnnnnnnnnnnnnnnnnnnnnnnnnnnnnnnnnnnnnnnnnnnnnnnnnnnnnnnnnnnnnnnnnnnnnnnnnnnnnnnnnnnnnnnnnnnnnnnnnnnnnnnnnnnnnnnnnnnnnnnnnnnnnnnnnnnnnnnnnnnnnnnnnnnnnnnnnnnnnnnnnnnnnnnnnnnnnnnnnnnnnnnnnnnnnnnnnnnnnnnnnnnnnnnnnnnnnnnnnnnnnnnnnnnnnnnnnnnnnnnnnnnnnnnnnnnnnnnnnnnnnnnnnnnnnnnnnnnnnnnnnnnnnnnnnnnnnnnnnnnnnnnnnnnnnnnnnnnnnnnnnnnnnnnnnnnnnnnnnnnnnnnnnnnnnnnnnnnnnnnnnnnnnnnnnnnnnnnnnnnnnnnnnnnnnnnnnnnnnnnnnnnnnnnnnnnnnnnnnnnnnnnnnnnnnnnnnnnnnnnnnnnnnnnnnnnnnnnnnnnnnnnnnnnnnnnnnnnnnnnnnnnnnnnnnnnnnnnnnnnnnnnnnnnnnnnnnnnnnnnnnnnnnnnnnnnnnnnnnnnnnnnnnnnnnnnnnnnnnnnnnnnnnnnnnnnnnnnnnnnnnnnnnnnnnnnnnnnnnnnnnnnnnnnnnnnnnnnnnnnnnnnnnnnnnnnnnnnnnnnnnnnnnnnnnnnnnnnnnnnnnnnnnnnnnnnnnnnnnnnnnnnnnnnnnnnnnnnnnnnnnnnnnnnnnnnnnnnnnnnnnnnnnnnnnnnnnnnnnnnnnnnnnnnnnnnnnnnnnnnnnnnnnnnnnnnnnnnnnnnnnnnnnnnnnnnnnnnnnnnnnnnnnnnnnnnnnnnnnnnnnnnnnnnnnnnnnnnnnnnnnnnnnnnnnnnnnnnnnnnnnnnnnnnnnnnnnnnnnnnnnnnnnnnnnnnnnnnnnnnnnnnnnnnnnnnnnnnnnnnnnnnnnnnnnnnnnnnnnnnnnnnnnnnnnnnnnnnnnnnnnnnnnnnnnnnnnnnnnnnnnnnnnnnnnnnnnnnnnnnnnnnnnnnnnnnnnnnnnnnnnnnnnnnnnnnnnnnnnnnnnnnnnnnnnnnnnnnnnnnnnnnnnnnnnnnnnnnnnnnnnnnnnnnnnnnnnnnnnnnnnnnnnnnnnnnnnnnnnnnnnnnnnnnnnnnnnnnnnnnnnnnnnnnnnnnnnnnnnnnnnnnnnnnnnnnnnnnnnnnnnnnnnnnnnnnnnnnnnnnnnnnnnnnnnnnnnnnnnnnnnnnnnnnnnnnnnnnnnnnnnnnnnnnnnnnnnnnnnnnnnnnnnnnnnnnnnnnnnnnnnnnnnnnnnnnnnnnnnnnnnnnnnnnnnnnnnnnnnnnnnnnnnnnnnnnnnnnnnnnnnnnnnnnnnnnnnnnnnnnnnnnnnnnnnnnnnnnnnnnnnnnnnnnnnnnnnnnnnnnnnnnnnnnnnnnnnnnnnnnnnnnnnnnnnnnnnnnnnnnnnnnnnnnnnnnnnnnnnnnnnnnnnnnnnnnnnnnnnnnnnnnnnnnnnnnnnnnnnnnnnnnnnnnnnnnnnnnnnnnnnnnnnnnnnnnnnnnnnnnnnnnnnnnnnnnnnnnnnnnnnnnnnnnnnnnnnnnnnnnnnnnnnnnnnnnnnnnnnnnnnnnnnnnnnnnnnnnnnnnnnnnnnnnnnnnnnnnnnnnnnnnnnnnnnnnnnnnnnnnnnnnnnnnnnnnnnnnnnnnnnnnnnnnnnnnnnnnnnnnnnnnnnnnnnnnnnnnnnnnnnnnnnnnnnnnnnnnnnnnnnnnnnnnnnnnnnnnnnnnnnnnnnnnnnnnnnnnnnnnnnnnnnnnnnnnnnnnnnnnnnnnnnnnnnnnnnnnnnnnnnnnnnnnnnnnnnnnnnnnnnnnnnnnnnnnnnnnnnnnnnnnnnnnnnnnnnnnnnnnnnnnnnnnnnnnnnnnnnnnnnnnnnnnnnnnnnnnnnnnnnnnnnnnnnnnnnnnnnnnnnnnnnnnnnnnnnnnnnnnnnnnnnnnnnnnnnnnnnnnnnnnnnnnnnnnnnnnnnnnnnnnnnnnnnnnnnnnnnnnnnnnnnnnnnnnnnnnnnnnnnnnnnnnnnnnnnnnnnnnnnnnnnnnnnnnnnnnnnnnnnnnnnnnnnnnnnnnnnnnnnnnnnnnnnnnnnnnnnnnnnnnnnnnnnnnnnnnnnnnnnnnnnnnnnnnnnnnnnnnnnnnnnnnnnnnnnnnnnnnnnnnnnnnnnnnnnnnnnnnnnnnnnnnnnnnnnnnnnnnnnnnnnnnnnnnnnnnnnnnnnnnnnnnnnnnnnnnnnnnnnnnnnnnnnnnnnnnnnnnnnnnnnnnnnnnnnnnnnnnnnnnnnnnnnnnnnnnnnnnnnnnnnnnnnnnnnnnnnnnnnnnnnnnnnnnnnnnnnnnnnnnnnnnnnnnnnnnnnnnnnnnnnnnnnnnnnnnnnnnnnnnnnnnnnnnnnnnnnnnnnnnnnnnnnnnnnnnnnnnnnnnnnnnnnnnnnnnnnnnnnnnnnnnnnnnnnnnnnnnnnnnnnnnnnnnnnnnnnnnnnnnnnnnnnnnnnnnnnnnnnnnnnnnnnnnnnnnnnnnnnnnnnnnnnnnnnnnnnnnnnnnnnnnnnnnnnnnnnnnnnnnnnnnnnnnnnnnnnnnnnnnnnnnnnnnnnnnnnnnnnnnnnnnnnnnnnnnnnnnnnnnnnnnnnnnnnnnnnnnnnnnnnnnnnnnnnnnnnnnnnnnnnnnnnnnnnnnnnnnnnnnnnnnnnnnnnnnnnnnnnnnnnnnnnnnnnnnnnnnnnnnnnnnnnnnnnnnnnnnnnnnnnnnnnnnnnnnnnnnnnnnnnnnnnnnnnnnnnnnnnnnnnnnnnnnnnnnnnnnnnnnnnnnnnnnnnnnnnnnnnnnnnnnnnnnnnnnnnnnnnnnnnnnnnnnnnnnnnnnnnnnnnnnnnnnnnnnnnnnnnnnnnnnnnnnnnnnnnnnnnnnnnnnnnnnnnnnnnnnnnnnnnnnnnnnnnnnnnnnnnnnnnnnnnnnnnnnnnnnnnnnnnnnnnnnnnnnnnnnnnnnnnnnnnnnnnnnnnnnnnnnnnnnnnnnnnnnnnnnnnnnnnnnnnnnnnnnnnnnnnnnnnnnnnnnnnnnnnnnnnnnnnnnnnnnnnnnnnnnnnnnnnnnnnnnnnnnnnnnnnnnnnnnnnnnnnnnnnnnnnnnnnnnnnnnnnnnnnnnnnnnnnnnnnnnnnnnnnnnnnnnnnnnnnnnnnnnnnnnnnnnnnnnnnnnnnnnnnnnnnnnnnnnnnnnnnnnnnnnnnnnnnnnnnnnnnnnnnnnnnnnnnnnnnnnnnnnnnnnnnnnnnnnnnnnnnnnnnnnnnnnnnnnnnnnnnnnnnnnnnnnnnnnnnnnnnnnnnnnnnnnnnnnnnnnnnnnnnnnnnnnnnnnnnnnnnnnnnnnnnnnnnnnnnnnnnnnnnnnnnnnnnnnnnnnnnnnnnnnnnnnnnnnnnnnnnnnnnnnnnnnnnnnnnnnnnnnnnnnnnnnnnnnnnnnnnnnnnnnnnnnnnnnnnnnnnnnnnnnnnnnnnnnnnnnnnnnnnnnnnnnnnnnnnnnnnnnnnnnnnnnnnnnnnnnnnnnnnnnnnnnnnnnnnnnnnnnnnnnnnnnnnnnnnnnnnnnnnnnnnnnnnnnnnnnnnnnnnnnnnnnnnnnnnnnnnnnnnnnnnnnnnnnnnnnnnnnnnnnnnnnnnnnnnnnnnnnnnnnnnnnnnnnnnnnnnnnnnnnnnnnnnnnnnnnnnnnnnnnnnnnnnnnnnnnnnnnnnnnnnnnnnnnnnnnnnnnnnnnnnnnnnnnnnnnnnnnnnnnnnnnnnnnnnnnnnnnnnnnnnnnnnnnnnnnnnnnnnnnnnnnnnnnnnnnnnnnnnnnnnnnnncgccggtctgggaggtgctcaccacgttcacggcatagcccttttggcgtttccaggtggcaaattcattcagtttggtcaggaacacagggtcgctgttgttgccgtggatcagcaggatgcgggcgtgggaaggcgcggtctcaagattgcggtaatcggcgaaattggcgatttgggcctcgtatatcttcctgaaagcctggctgtagcccgtataatcgggcagttcgttgaggccgggttcggcagtgaaatccaaggttacctcgatatccctgaaagtggccaggcgcctggtgacgggatcgtattggcagggataaacgttgatctgaaccacgcggaaatcacgcaggatggcgggttctgaggccgttgccaggctggaggggaaaagcccgccggaagggaccgccacgccgtcccagccttccctgcatattttgggctcgtcaagctggctgtattccaccccgccgtagctataggaaagggtgaagctgccccggggcgggatggccaccatggtgctgaacacgggaagttccggctggccgggttcgcaggtgccaagcgcgccttccatgcggatttcccggacgctttggcctccgtcttcgccggcggaaaagctgagggcgggcacggaaaccgcgagtttaagctggctgccggtagaccgcgcgaccgagaacgggcttgctgtttcggcgttcagagcggcaaggcagagcagcgccaacatggtgagtgacaggatccttttcattgtatcatccttgtatcgtcaaatcaaaaacctggagttgaggctccaggttatggttgcgttttttgcataaaggttttcttttgctttgttcatttaatggcatagatcaggacaccctggtcccgggaagccacgaccagttttcccttgttgaatttggtgttgttggtgtagccggcggatcggaggttctgcttcaggatgggactgctgggattgctgatgtcaaagaggtagatgccgccactgcctgagctaacggcggccagactgcccataatgtcgatgctggtggcgtagccggtggtgtcgaaggtatgcaccagcaagggttcggcgggcgcaccgatgttcaccacgttcaggccgccctggcggctggcgacgtaggcataattccccgcgaccttcacctgcagggcctggccggggagcgcgatttcgctcaccttctctttggtggcgcggtcgtaaatgaccaatccgcgctgttcggcggccacatagatgtagttgtccgtggcgtccattcccgaagcggtggcgggagtggtgatcacgtaatctgtgcccagatagagtccgccgttgtagcgaacgtacatcaggttgcgtccggctccgaaaaagccctggacgatattgtcatccacaggggcctcaatggcgctgaaagaaatcgattgcaggccgtcagtgccgccggtgatggaatctatcagcctgagcgaatcgggatcggagtaatcgacaatacggattttgtccgcgctcacatactcgcccaggaagagcagtttgtgctcgccgactgccgagatattgcggatgttcaccagggtggcgtccgcgctggggggatagatatccgtccaccaatgctgagagtaatccgtggcatcgatcacggaaatgccgccctggtcctgggccacaaaaatgctctcgttgtcaaaagacaggtccacgggattgccgaccacctgcacctgcttgagcaggctgaggacgtcctggtcctcccaggcgggattgcgccgcgagcatccgcaaaggatgagcagcaccgccgcgaacagtacgatctgctttttcaccatgttcaaatcctcccaggggaataaaatttatgattatgcatatagtagatgcaagaatcgttccgaatctgccacaataactgcggattcctttcccaaagcctttttcgcccacggacaggccgtttgccccttcccactaacatcccgtaaacctccccttaaattcccgcccggccaatgggaactcagcgggaagtattttagatgtgtatgggatggggcaaatggggcttctattgatagtgggtatcaaaatgggaggaagtccacaaattgcgcgaattcatacgaattgcttttccagttacgctaccaactgtggtagataacctaaaataaaggacttacttcccaatcgggcaagtaatccatatgtttggagcccgaaggtcccagaacgattggccgacggggacatcgaccttcctgacgctggcgtcgagcgaggcacgagcatggacgccagcaacatctcctgtagtccatactcgcaagctcgctgcactccaggctcaccaacgttggaaggcaaattcacaaattcacaaccggtaaatatggcttgtgaatttgcaacctgctgatagacgggtaattatgaggctaattcacaaaaaaggggtctcttatacatccgcggaagccgattgtaaacaggatatgatgtatccacgctaccagtctataatacatatagaaatagtatatataatatataatagtattatatattattatatattgatattatatcatctctaccttcccttcatctcttgtttgcggcatgagccactgcaaaccggcattctcccctggtccggctggatataagagataagcgtattttgtgaatttgtcccccaactcactgtgccacaataacacacggattcacaagccatatttaccggttgtgaatttgtgaatctgaccttgccggccttaaggaagtttgaaattagagccctattttggacttgacaaattattccttggtaaatttggtgtataatagctatggggcataatgatgttagcctgtggaacggcctctgtaaaggatcaacaagctatcaaccctccccatgcgacaggagcttcaatgtattataatttgacagacaaaccctggatcagtgtgctacagcttgacgggcattctgccaggctcggcctggctgaggtcctgcgaaaagcacacacactgcgtttggcttacggcaatccgatggaccgcatgtccgttttccgtttcctcctcgccctgggctattggtgttttgccaatacaaaacaagcgccggtatcagataagccactgcctcaggcatggacggactggcttgaacaaaaccaagaatatttcgaattgttcggtgatggccccagattctaccaatccccaggaacatccagaatacgccccagcacggaccttatccacgagcttcccacggcaaacaatttctggcacttccgccatgtgaccgatttcatcgatggcatttgcccagcttgctgcgttaccggtctgctgcgcctgccactctttaccaccgtaggcggcagcggaatcggagccggcatcaacagaactcctcccttctatgccatctggcagggtgatagtctgtcggaatcgatattcctgaattgggaacccacttcccggttgggtgttcctgcctggctgaacccgtttggatcccaaaacgagaaggatgtagccttgctgactggcctcacctggctgccccgcaaggtattcctgcttggcccggtgtcagacggagcaaaatgcagcgcctgcggagaagagcatgagcctctggtctatgcctgcaacaatgaggcggtgaaagtgcctccgaaccttgtctggaacgaccctcacgcgatttaccgggatgacaataatggcctgactgcccaggtggctctgatgtccggggacaaatacactttcgctaacagggattggcataaacccctggtcggcttcttacgggcgaaaggcatgtctcggaccgccacgctgtttttagtgggcttcacaagcgttcaagccaaatgtgtggacgtttgggaaaagaccattgccctatccggaaaaacaagctccgaggaactgctggaccagatatccgaaagagcctactccctgcacaggatgaggaaacaagaccgccggggcgattacaaggaatccgtgggaatcaccgccgtggcggacatcatcccgcacgtagagcatcgggttgacgtccattcgggcgagatggtggaaaacagcggcaatgtctggcaggaagcggatgaagattacggattcttcatgaagcgttttgccgtttctctagtgccggaaattacggttgccgccaagcttgaacgagaacaactggctcggcgcaagccctggcccctaaaaccaaaatcaattaaaaaaccttcatccggaggcgataatgaatgagagcaccgtgaaatttgttcggagcctgggcgaactcaaagagggcgacctgggcttgctcagaaagctcaggggtcgccgtctggatgaatccctgccgggtttcgacctgttttccggcctgtggtggccactccgcagtataagccccaaaacccccaggcggaaggtggtctggctagtcaccaagcttttcgcggaattccgctttgagcaaaagaaaggcgccagcctgccttggctcatgggcagaatatgccgtggacttaaagaagaaaaagagttcccacgtgttttagccaggttcgaccgcttgctcacgctcgagttgaaccaactggaggaaccgctggcgcaagtgctcgcgattttaaaaagacatgacattgccagtctggactgggttgccctcatcgatgacctctccgcttgggaacgggaatcaaacagagcgatatggtcagacacatttatttcagcatttaataatcagcaaggaggaatcaaatgttgattgaaatacacatgatccaaaaccacagcccggccaacctgaaccgggacgacctgggcgcgcccaagacctgttatttcggtggggtgttgcggtcccgcatctccagccagtgcctaaagcggagcatcaggatgagcgatgaattcaaaaacttgctcgggggtatccgtacccgtcggttggccgagttgattacaaaagctacaggacaggactgcaggaatcaggcagaggaagttctgaacaaagccggtttgaaacacgaaaacggacatagtaagatgctggtgttcatgacccggaacaagatcgatgcccttgctcaaattgtcaccagcgaaggcctgagtgttgcagagaaagccaagaaagcggcagatgtaatatcgggggcaatacattcccctgacatcgctctgtgcggaagaatgctcgagcccgataccaaggacaagaacacagacaaggtcaagtgggaaaataccactgttgaagcagccctgcaggtgtcgcacgccatttcaacccacatcgcccgcccagaaatagattactatgtagcagctgatgacgagcctggcgacgacacaggtgctggattcatagacgaggcgatgtttgcttcggcctgtttctacaaatattactcaattgattggaataccttgataatcaacctccagggtaatgaaaagttggcagctcatactgtcggagcctttatccaggccgctgcactcactaatcccagcggaaagcagaacagctttgccgcacataaccttcccgatggaatattggtagaaataaaagagacacctgtcagctatgcaaatgcctttgtgcgaccggtgggaatcgttaaggattctgacttggtagaacaaagcattggccaactggccaactatgtgaaggatataagtgccggtttcttccctggacagatgaaaggcaacgctctgtggttctcgcccaatggacgttatcccctaaagcctcaacagggcacgctggacataaagccagtttgcaacctgctagaacttgttcgcgaagcagttgagatgttgggttttgaatgggatgatgtaaaaaacgagaaagtagagagttgaaatgtcttctccgcctaataccctgttcctgagattggaggctccccttcaggcctggggaagcaatgaggccaaattcgccgtgcgcaggacagccgacgcgcccaccaaatccggagtggcaggcctgctctgcgctgccctgggaatcagccgggccgaagccggacagtattggctgggtgaaattgccaaattgcgcatgggggtgcggatagaccgcccgggcatccgctggtgggattaccatactgtgggagcggagcagaagctgcgcatttctgacctgaaaatgcccaacggcctagttctggttggcactgccctggccaaaaacctgggcgcggacaagatcaaatccaaacccggggctttgctctcccgacgcgagtatttggctgatgccagcttcctggttgcgctccagggtgaaccggatatcgtggcacaactggctgaagcgctgaaaaaaccagtctggacgctttatctggggcgaaaatcctgtcccccctcccgtccggtggatgaacacccgccagggttttatgccagtctgaaagaggctttgcggtcgatcccggcgcaactgagggaaaaaggcgaaccgatacctgacagtgttccctgtgtgctcgactgggttccggcccatgatgacgtgcacgctccgccgaacgccgaagcgcattacgacgtgccggtgtcctttgagcctccccaccacttgccccggctggtgatccgctgtaacctgccattggaccgcaacttcgaggcagagaccgtgctttccggcaaagcctggcaaccgccccgcaaccgggcaaattacgacaatcctgaatacaaaagggtccgcgctgagcgtttggtgatggacaatgccgcctgcatgttctgcaaggcacccgccactactgtgcagcacgtgaattaccgacgcgccggaggcagcgagaagccggaggacttgcgcgccctctgccgcctctgccacgatgcctgcaccatgctggaatatggcagcggcatgaccatggaccgcatagatccctgtgaccccgcctggcgtgagcgcatcttggccaaacgcgaggaaataatcaaattccgctcgctggagcagcgcaggcgcaaactcgatccgaaggaggagaacggatgatgtatctatcccaactgctcatcgacacaggcggcaaccctgaccggccaaggcccgggcgcttgtggctgaacaatatctataatgtccaccggcggctcagcatggctttccccatgcgcaagcgcaaggaaggagacccgaggtttctgcagccctttgaccccgcagattttgaaaagcgccagttcctctttcgggtggacaacaacaccgatggagaaaatcaaagggcgatggttttggtgcagtcgtccctgccgccggattgggactgggctttccagaatgccacgggatttttggcagcccctccccaggttaaggaatacgatccccagttctcagcaggtcagcggctgcgcttccgcatcctcgtgaatgccagtgtcaaacgcaaaatcgacgagttgcgggaaggacccggaggaaaggaaaaaacgggaagggttctgcacaaacgggtcgcccttacctgggacacaaattccaacccaaaggatgcggtggcgcaatggtttgccgccaaggctggcagactgggcttcacgcccggggagaccgaactggtaagcctgggctgggtatacggttccaaaccggagccccggggaaattcgccccggcgtgagaacgaataccgtcccctgagataccgttccgccctgctggaaggttatctgacagtggatgatgcctttctgttccgggaagccttggaaaaaggtatcggcagcgccaaaggaatgggcttcggcctcctttccgtggttccggcaagtgatgcgtaacagagaccttcacctaatgccaaaaatgcgggaccgcttcacctatctctatgtggagcatgccaaaatagacaaagaacaacaggcaatcgcctttcacgatgccatgggctccactcctgttccctgcgctggactggccctgctgatgctggggccaggcgtatccatcacccatgcggccatccttgttttagcagaatgcggctgtttggtggcttgggtgggggaacagggagtccgcttttactcatccgggacagggaccacccgtagttccgccaaccttatgcgtcaggctgccgcctggtcaaatcgagatacgcatctgcggatagttcgcagaatgtatgaattgaggttcaaggaaaaactggacccaaccctctctcttgaacagataaggggaaaagagggagcgagagtacgggatacctatttcagactttcaaaagaattcgatgtgcccatgagtgcgaggaattacgacaggagcaactggaataaaaccgaccccatcaacagagccctgtccgttgccaattcctgtctctatggcatctgccacgccgcgatagtggccgctggctattcacctgccctgggtttcgttcatactggcaaacaactgtcatttgtttatgacattgccgatctttataaaatggaaacctccgtgcccgcggctttcatagccacagccgcaggggtcgataacctggacagaaggacacgcattgcctgccgtgaccagttctatcaatttggtctgctaaagaagatagtggccgacattcacgcccttttcggtattctggaaacttcggacgatgagccagaccttgctgatgtcgatccagccgtgccaggcgggctttggaacccagatgataaagtgagccccggcggcttgtcatggggtctggatgatcctggaggccatgatgatggttctggtgcttgaaaaagttccctctggcctgagaggagaaattacacgctggctcctcgaaatcaaggctggagtatttgtcggtcaggtatcggccatgataagggaaaagctgtgggacaaggccaggtctggttgtgccggtggaacttgtatcatgatttacagcaagcattgcgaacaaggctttggaattgagttttggggtgccgcggaaaggatagtgacagaatgggaaggattgaaattgatgaccaagcatccgtgatccatacttgaagcctgttcaatggcctcaaagcgtctactttcgaagtgtgttccccacctgcgtgggggtgaaccgcggattcgccaagcttgtccctaccgtgatgcgtgttccccacctgcgtgggggtgaaccgaagagcggttttgggcgtataacggcccgcttgtgttccccacctgcgtgggggtgaaccgcctctgggccttagctccgcacaggacaagcagtgttccccacctgcgtgggggtgaaccgctgagaccgctcgctccctgtccgtcattgacgtgttccccacctgcgtgggggtgaaccgtggggtgggggcggttgcccgccccgttccccgtgttccccacctgcgtgggggtgaaccggcaaccaaccgcataggcatagcgaaatcaaggtgttccccacctgcgtgggggtgaaccggacatctggaaagattgggtggcaatggcgatgtgttccccacctgcgtgggggtgaaccggtattcttgcccatcatggaaatgccgtgtccgtgttccccacctgcgtgggggtgaaccggtagctcaactacaagcggcgagccgaacctagtgttccccacctgcgtgggggtgaaccgactgccgctgctccagagtttatgaaacctctgtgttccccacctgcgtgggggtgaaccgatgttcgccggagaggcgctcgactacaccgagtgttccccacctgcgtgggggtgaaccgccctgaagatacaggagcagattgaccaggaagtgttccccacctgcgtgggggtgaaccgaacccaatgaacatggtgtaaaggaaatagaggtgttccccacctgcgtgggggtgaaccgaggtctgagtagtctgcgggccccaggatgaagtgttccccacctgcgtgggggtgaaccgtgatccggacggggctgggcgcggcggatgccgtgttccccacctgcgtgggggtgaaccggtggcttacatcagcctggtgaagaagccggcgtattccccacctgcgtgggggtgaagcggtagaagaacgttccggcaaacagagacgccagtattccccacctgcgtgggggtgaaccgggcgacacaacctctaccatacccgagggtcagtattccccacctgcgtgggggtaattccatttctgccggcgcacagacggcgccgggcagtccctgataatcgcttacttcagcagcagcatcctgatggttttggtttcgctggctgtgctcacccgggcgaaatacacaccgctggccactccccttccggtttcatcacgtccgtcccagcgcagcctgtggtttccgcccgcgagttttcctttgtgaagggagcgcactttctggccgcgaatgttgaagagatcgacgctcacctcgtttgagagggcaaggttgaaggcgatggtgacatccggattgaagggattgggataggccgatagcgcggatatggggctttggaccagatcctggagagcaacctggtaattgctcacccggatgtagccttcgtaggttcctgtagccggaggctcccaggtaaaagtatcctggccgttcagatagtggggaacgtcatccagcatcagcataatctgccattggtcgccggctccctcggtgctgaaactgatctcatgtggcccttccaggcccgcgtgggcatggatgttgaagtattcaacctgttccggcccgctgaagggctggcggtattcgctgcaaaggttccggatgtcagtggaatccgcgccggcatgatggatccagagagaggagcaatcagaaatcggaggacagggcgggctgggatggtcaaagcggaaatccacggcatttgtagccaggggatgcaggccgagttcaattccggcgggatgggctccctcgagttccatccgcagcctaaaaacgggttccggagccagcggcttgggaccgtcgcagaaaggcaggaaacgaatctgcggcgccaggtccggggagccgttgtaatagatgaggaaagcctcccagggctcgatacggctggttttttcgtaatcctcgccgcgccagacaaagacggcgggcgaaaccagttcctggcttagcatttcggtgaagctgtgcaactggccaagaagagtgaagctcaggtcctccaggtcgtaggcgcagagatgggggttgggcaaaaagttccagccggggaccaaatcaatataataagccccgctctggagcggcaagatgctgctgtagaaattgatatcgttggatgaaacccaataggcagtgccgaagtcgaaatccagcgtcatgccccagccgccattcggggtcatctgatagccgagggcggggccaaagacctgttcaaagctgaggttgctatccggccagggattggagcgcatcttcaagccggcttcgttataggccaggatcatctggggaagcagggaaaagcgatagggggatacaaacctgctacgcaccccatccaccgccacgatgtccaccacgaagcggcaatcctgcatttcagccacgttggccggcaccagccagggaaagctggtttgggtgggcgtcacggagtccgaaagcagcagactgtcggaagcgttgacaatagaaatttcggcatggtcgatgaggaagggatattggaaactccagccgaaggtgataacggttccgccctgatatactttgttttccagcgaggcaaaggaagcccggggctgcatgtttccccagtgaaggatcatggtgcggaagtcggaatttgtgttgctgtattggtagggcccggccagcaggttgtggtaggtgccgccattctgcaaatagagcttttcctcccggctgaagttgccggatgctgtgatgttgagcgtttcgatctggtcgctgcggaccctaagcacccaggtcttgatctcagaatcggcatcgaacattgccttaacttcccggcttaggttggtgccgctgttgctccaatactgttcgaagaaagcgccccagacgtaatttgaggcgccgggggtgcctttggtcacgtcccagtaagcgtcgtttccatcggtggcgaaggggttggcgctgaagaatacttcgtcggatagcgtccctgacatgttgctgacggtgaggctgtggatgggccttggttccgcgtcggcgggatagttgtgaaaatactccacgttctggaggtttgtgctgctgattttgtaggtgtagccgctgccgttgctcacatccgtatcccaccattcaaagttgtaactggagggatttgaaagggcggggttggtgagccaggaatccaccagagcaaagtcgccggcggcgtcctgacgatagaccttgaaaccctggttgctgacctgaccgttcacctgccagaaaaggcgcactgtgccatccaggccgtgggcggtgaaagaggtaatgccagccggggcaaggttggcgccaacttcgttggaaagggtggagtagttgccattcttgtctttggcgcgaatcctgaaatagtaggaattggagtttgtcaggttggtcaccgtgatcatctcgcaatcgggtgaggcgagaaaagagttgttatcccggttgaagacctggaagttgtcggtgccgatcgactccgtggcgtagagcacttcgtaggattcaaaatcgtaagcatggcttttctcccagctcagagtgacgctggtcagggactggttgtgcacggcgaggttttgcggcgcaggcggggtttggttgtcgttcatggcgaacatatctaccaggaccggctccagatcatagatccagcgtccgtaatattcgatgaagcggtcgaaaaggccatccatattccagctctggctggtcgcgtcccagccgaagaaccagtgatacacgttttccgtttcgtcatagcagttgggcagttcatccatttccagatggaagaaaggttcgtaaacgtcgtaatcggttaaaccgctctgggtgtaaagcatgtgctggttctgagtataggcgggcaggtccacctggtcgttcacgggatagctgttcacgccgtccgaaaaaatgaaatcgtgcgtgctgtagttcacgctgtaaaagtcgttcagatagacatcggcatgtatgccaatggtgttcgcgggaatcatcagatgctggccggcattgatcaggtcgcgcttcagaggcgaaaggtcccggatgggcaggttggggcaggggcgcggattaccggcagaaatctggcagttggcatagccctgatggcggttccagtcgtaggaatggatctgggcagaaaactccctcacgccaaactggtcgcggatggtgtcggcaaatttcttgtagagggtgttgaaaggatgggtggggttgcgcagggggtcggagagggatttggagttggtgtaagaaccctggttggtccagcgaacctcgcggccggagccgtttatcatcaggtagcgggcgtcccagtgcttcagagcttcatatcccatcgcgggagtgggaaaatcatcacagggatggggaacggtgatgattatgggtttgctgccctggggactgtagatgaaaagcccccagccatagacaaatgcgcccgattcgtcatcatcttccgtaaccgttccgttgtcgtcataataggcgggattgggaatctcgcgcagcatgatataggtgcgtccggtgtctgtgtcattgaactgcacaatctgaaaaggggcggaattggatgtgagtatggcctgtgcgccatcgtaatcctctgccacgaagagttccgccatgttgttccaatagatcaggtcagtggctgtgggaaggcggaaattcccaaatccgttggtttggacgtcgtaaggcgcgtagaggttgtaattggggctggctataccctcggcaatatgggaaatccagttgtcataggcgcaggcgggctcgctgcccagcagaaaagcgcggagagaaccgctctcggtgatgattgccggggccagtgccgccagcagacagagccagactgccaaaatagtttttttcatgctttcatccctgttcggaagctttttttcttatcgagcaaactacttaacaggggtgaaataagtcaagactttttctttcggctccgtccaaccttgctttcggacatacggccggactgctcccggtaaagtgcttgacagccggggcgaaattcattttatggatattcaagggagttcatgatgaagaaaacgatccgcaagacttacactttcgacgacgttctgctggtgccgcagcaatccaaagtgctgccatcctcggtttgcatccagaccaggatcagcgccaaactaagcctgaaaatcccggttctgagcgcggccatggatacggttacagaagccggaatggcgatcgcgatggcgcgggaaggtggcctgggaatcatccataaaaacctcagcattgaaaagcaggcggatgaagtgcgacgggtgaaacgcgctgaaagcggactcatcacccgcccctacacccttgctccgaacgacaccctggagagagtgcaccagatccgtgaagaacacagggtcggcggatttccggtgatggaaaagggaaagctggtgggcatcctgaccagccgggacattcgttttgagaccaacggcaaacggcttgtgaaagacctgatgacgccgcgtgaaaggctgatcaccgctccggaaggcacctccaacgaggattgcgtggccctcctgcaaaaacaccggatcgaaaaactcctgatcgtgacccccgattttggcctggccggcatgctcacggtgagggacatcctgaagcggataagctacccaaacgccgtacaggacgataagaaccgcctgctggtcggagccgcaatcggagttaccggcgattatctggaaagggcaaaggaacttgcgaaacagggtgtgaacctgctggtgatcgacaccgcccacggccaccatacaaatatccgcagcgcgatcaacaaggttaaggccgcctgtggcgtggaaatcctggccggcaacatagcgactgccaaagccgcccaatttctcatcgacaacggcgccgacgccatcaaggtgggcatcgggcccggctccatatgcaccaccagggttatcgccggaataggcgttcctcagctttcggccattatggactgctccgaggttgccgccaaagcgggaattccgcttattgccgacggcggtatcaaatactccggcgacatcgtgaaggcaattgccggaggagcggatgctgtaatgatcggctcgttgctggcaggaaccgacgaaagccctggcgaatatatcatttacaacggccgccgcttcaaaagctaccggggcatgggctccatcggcgcgatgcgcaaaggcagcagcgaccgctatttccaagaaggtaccgaggcaaacaagctggtcgccgaaggcatcgagggcatggtgccctacaaagggccactgaaagactttttgttccaactcacgggaggcttgcgctccggcatgggctactgcggcgcggaaaacattgcagctctgcg

SEQ ID NO: 1001 - DNA, 103325 bp, Artificial Sequence
  Synthetic Oligonucleotide
  misc_feature (1)..(87619): n is a, c, g, or t
nnnnnnnnnnnnnnnnnnnnnnnnnnnnnnnnnnnnnnnnnnnnnnnnnnnnnnnnnnnnnnnnnnnnnnnnnnnnnnnnnnnnnnnnnnnnnnnnnnnnnnnnnnnnnnnnnnnnnnnnnnnnnnnnnnnnnnnnnnnnnnnnnnnnnnnnnnnnnnnnnnnnnnnnnnnnnnnnnnnnnnnnnnnnnnnnnnnnnnnnnnnnnnnnnnnnnnnnnnnnnnnnnnnnnnnnnnnnnnnnnnnnnnnnnnnnnnnnnnnnnnnnnnnnnnnnnnnnnnnnnnnnnnnnnnnnnnnnnnnnnnnnnnnnnnnnnnnnnnnnnnnnnnnnnnnnnnnnnnnnnnnnnnnnnnnnnnnnnnnnnnnnnnnnnnnnnnnnnnnnnnnnnnnnnnnnnnnnnnnnnnnnnnnnnnnnnnnnnnnnnnnnnnnnnnnnnnnnnnnnnnnnnnnnnnnnnnnnnnnnnnnnnnnnnnnnnnnnnnnnnnnnnnnnnnnnnnnnnnnnnnnnnnnnnnnnnnnnnnnnnnnnnnnnnnnnnnnnnnnnnnnnnnnnnnnnnnnnnnnnnnnnnnnnnnnnnnnnnnnnnnnnnnnnnnnnnnnnnnnnnnnnnnnnnnnnnnnnnnnnnnnnnnnnnnnnnnnnnnnnnnnnnnnnnnnnnnnnnnnnnnnnnnnnnnnnnnnnnnnnnnnnnnnnnnnnnnnnnnnnnnnnnnnnnnnnnnnnnnnnnnnnnnnnnnnnnnnnnnnnnnnnnnnnnnnnnnnnnnnnnnnnnnnnnnnnnnnnnnnnnnnnnnnnnnnnnnnnnnnnnnnnnnnnnnnnnnnnnnnnnnnnnnnnnnnnnnnnnnnnnnnnnnnnnnnnnnnnnnnnnnnnnnnnnnnnnnnnnnnnnnnnnnnnnnnnnnnnnnnnnnnnnnnnnnnnnnnnnnnnnnnnnnnnnnnnnnnnnnnnnnnnnnnnnnnnnnnnnnnnnnnnnnnnnnnnnnnnnnnnnnnnnnnnnnnnnnnnnnnnnnnnnnnnnnnnnnnnnnnnnnnnnnnnnnnnnnnnnnnnnnnnnnnnnnnnnnnnnnnnnnnnnnnnnnnnnnnnnnnnnnnnnnnnnnnnnnnnnnnnnnnnnnnnnnnnnnnnnnnnnnnnnnnnnnnnnnnnnnnnnnnnnnnnnnnnnnnnnnnnnnnnnnnnnnnnnnnnnnnnnnnnnnnnnnnnnnnnnnnnnnnnnnnnnnnnnnnnnnnnnnnnnnnnnnnnnnnnnnnnnnnnnnnnnnnnnnnnnnnnnnnnnnnnnnnnnnnnnnnnnnnnnnnnnnnnnnnnnnnnnnnnnnnnnnnnnnnnnnnnnnnnnnnnnnnnnnnnnnnnnnnnnnnnnnnnnnnnnnnnnnnnnnnnnnnnnnnnnnnnnnnnnnnnnnnnnnnnnnnnnnnnnnnnnnnnnnnnnnnnnnnnnnnnnnnnnnnnnnnnnnnnnnnnnnnnnnnnnnnnnnnnnnnnnnnnnnnnnnnnnnnnnnnnnnnnnnnnnnnnnnnnnnnnnnnnnnnnnnnnnnnnnnnnnnnnnnnnnnnnnnnnnnnnnnnnnnnnnnnnnnnnnnnnnnnnnnnnnnnnnnnnnnnnnnnnnnnnnnnnnnnnnnnnnnnnnnnnnnnnnnnnnnnnnnnnnnnnnnnnnnnnnnnnnnnnnnnnnnnnnnnnnnnnnnnnnnnnnnnnnnnnnnnnnnnnnnnnnnnnnnnnnnnnnnnnnnnnnnnnnnnnnnnnnnnnnnnnnnnnnnnnnnnnnnnnnnnnnnnnnnnnnnnnnnnnnnnnnnnnnnnnnnnnnnnnnnnnnnnnnnnnnnnnnnnnnnnnnnnnnnnnnnnnnnnnnnnnnnnnnnnnnnnnnnnnnnnnnnnnnnnnnnnnnnnnnnnnnnnnnnnnnnnnnnnnnnnnnnnnnnnnnnnnnnnnnnnnnnnnnnnnnnnnnnnnnnnnnnnnnnnnnnnnnnnnnnnnnnnnnnnnnnnnnnnnnnnnnnnnnnnnnnnnnnnnnnnnnnnnnnnnnnnnnnnnnnnnnnnnnnnnnnnnnnnnnnnnnnnnnnnnnnnnnnnnnnnnnnnnnnnnnnnnnnnnnnnnnnnnnnnnnnnnnnnnnnnnnnnnnnnnnnnnnnnnnnnnnnnnnnnnnnnnnnnnnnnnnnnnnnnnnnnnnnnnnnnnnnnnnnnnnnnnnnnnnnnnnnnnnnnnnnnnnnnnnnnnnnnnnnnnnnnnnnnnnnnnnnnnnnnnnnnnnnnnnnnnnnnnnnnnnnnnnnnnnnnnnnnnnnnnnnnnnnnnnnnnnnnnnnnnnnnnnnnnnnnnnnnnnnnnnnnnnnnnnnnnnnnnnnnnnnnnnnnnnnnnnnnnnnnnnnnnnnnnnnnnnnnnnnnnnnnnnnnnnnnnnnnnnnnnnnnnnnnnnnnnnnnnnnnnnnnnnnnnnnnnnnnnnnnnnnnnnnnnnnnnnnnnnnnnnnnnnnnnnnnnnnnnnnnnnnnnnnnnnnnnnnnnnnnnnnnnnnnnnnnnnnnnnnnnnnnnnnnnnnnnnnnnnnnnnnnnnnnnnnnnnnnnnnnnnnnnnnnnnnnnnnnnnnnnnnnnnnnnnnnnnnnnnnnnnnnnnnnnnnnnnnnnnnnnnnnnnnnnnnnnnnnnnnnnnnnnnnnnnnnnnnnnnnnnnnnnnnnnnnnnnnnnnnnnnnnnnnnnnnnnnnnnnnnnnnnnnnnnnnnnnnnnnnnnnnnnnnnnnnnnnnnnnnnnnnnnnnnnnnnnnnnnnnnnnnnnnnnnnnnnnnnnnnnnnnnnnnnnnnnnnnnnnnnnnnnnnnnnnnnnnnnnnnnnnnnnnnnnnnnnnnnnnnnnnnnnnnnnnnnnnnnnnnnnnnnnnnnnnnnnnnnnnnnnnnnnnnnnnnnnnnnnnnnnnnnnnnnnnnnnnnnnnnnnnnnnnnnnnnnnnnnnnnnnnnnnnnnnnnnnnnnnnnnnnnnnnnnnnnnnnnnnnnnnnnnnnnnnnnnnnnnnnnnnnnnnnnnnnnnnnnnnnnnnnnnnnnnnnnnnnnnnnnnnnnnnnnnnnnnnnnnnnnnnnnnnnnnnnnnnnnnnnnnnnnnnnnnnnnnnnnnnnnnnnnnnnnnnnnnnnnnnnnnnnnnnnnnnnnnnnnnnnnnnnnnnnnnnnnnnnnnnnnnnnnnnnnnnnnnnnnnnnnnnnnnnnnnnnnnnnnnnnnnnnnnnnnnnnnnnnnnnnnnnnnnnnnnnnnnnnnnnnnnnnnnnnnnnnnnnnnnnnnnnnnnnnnnnnnnnnnnnnnnnnnnnnnnnnnnnnnnnnnnnnnnnnnnnnnnnnnnnnnnnnnnnnnnnnnnnnnnnnnnnnnnnnnnnnnnnnnnnnnnnnnnnnnnnnnnnnnnnnnnnnnnnnnnnnnnnnnnnnnnnnnnnnnnnnnnnnnnnnnnnnnnnnnnnnnnnnnnnnnnnnnnnnnnnnnnnnnnnnnnnnnnnnnnnnnnnnnnnnnnnnnnnnnnnnnnnnnnnnnnnnnnnnnnnnnnnnnnnnnnnnnnnnnnnnnnnnnnnnnnnnnnnnnnnnnnnnnnnnnnnnnnnnnnnnnnnnnnnnnnnnnnnnnnnnnnnnnnnnnnnnnnnnnnnnnnnnnnnnnnnnnnnnnnnnnnnnnnnnnnnnnnnnnnnnnnnnnnnnnnnnnnnnnnnnnnnnnnnnnnnnnnnnnnnnnnnnnnnnnnnnnnnnnnnnnnnnnnnnnnnnnnnnnnnnnnnnnnnnnnnnnnnnnnnnnnnnnnnnnnnnnnnnnnnnnnnnnnnnnnnnnnnnnnnnnnnnnnnnnnnnnnnnnnnnnnnnnnnnnnnnnnnnnnnnnnnnnnnnnnnnnnnnnnnnnnnnnnnnnnnnnnnnnnnnnnnnnnnnnnnnnnnnnnnnnnnnnnnnnnnnnnnnnnnnnnnnnnnnnnnnnnnnnnnnnnnnnnnnnnnnnnnnnnnnnnnnnnnnnnnnnnnnnnnnnnnnnnnnnnnnnnnnnnnnnnnnnnnnnnnnnnnnnnnnnnnnnnnnnnnnnnnnnnnnnnnnnnnnnnnnnnnnnnnnnnnnnnnnnnnnnnnnnnnnnnnnnnnnnnnnnnnnnnnnnnnnnnnnnnnnnnnnnnnnnnnnnnnnnnnnnnnnnnnnnnnnnnnnnnnnnnnnnnnnnnnnnnnnnnnnnnnnnnnnnnnnnnnnnnnnnnnnnnnnnnnnnnnnnnnnnnnnnnnnnnnnnnnnnnnnnnnnnnnnnnnnnnnnnnnnnnnnnnnnnnnnnnnnnnnnnnnnnnnnnnnnnnnnnnnnnnnnnnnnnnnnnnnnnnnnnnnnnnnnnnnnnnnnnnnnnnnnnnnnnnnnnnnnnnnnnnnnnnnnnnnnnnnnnnnnnnnnnnnnnnnnnnnnnnnnnnnnnnnnnnnnnnnnnnnnnnnnnnnnnnnnnnnnnnnnnnnnnnnnnnnnnnnnnnnnnnnnnnnnnnnnnnnnnnnnnnnnnnnnnnnnnnnnnnnnnnnnnnnnnnnnnnnnnnnnnnnnnnnnnnnnnnnnnnnnnnnnnnnnnnnnnnnnnnnnnnnnnnnnnnnnnnnnnnnnnnnnnnnnnnnnnnnnnnnnnnnnnnnnnnnnnnnnnnnnnnnnnnnnnnnnnnnnnnnnnnnnnnnnnnnnnnnnnnnnnnnnnnnnnnnnnnnnnnnnnnnnnnnnnnnnnnnnnnnnnnnnnnnnnnnnnnnnnnnnnnnnnnnnnnnnnnnnnnnnnnnnnnnnnnnnnnnnnnnnnnnnnnnnnnnnnnnnnnnnnnnnnnnnnnnnnnnnnnnnnnnnnnnnnnnnnnnnnnnnnnnnnnnnnnnnnnnnnnnnnnnnnnnnnnnnnnnnnnnnnnnnnnnnnnnnnnnnnnnnnnnnnnnnnnnnnnnnnnnnnnnnnnnnnnnnnnnnnnnnnnnnnnnnnnnnnnnnnnnnnnnnnnnnnnnnnnnnnnnnnnnnnnnnnnnnnnnnnnnnnnnnnnnnnnnnnnnnnnnnnnnnnnnnnnnnnnnnnnnnnnnnnnnnnnnnnnnnnnnnnnnnnnnnnnnnnnnnnnnnnnnnnnnnnnnnnnnnnnnnnnnnnnnnnnnnnnnnnnnnnnnnnnnnnnnnnnnnnnnnnnnnnnnnnnnnnnnnnnnnnnnnnnnnnnnnnnnnnnnnnnnnnnnnnnnnnnnnnnnnnnnnnnnnnnnnnnnnnnnnnnnnnnnnnnnnnnnnnnnnnnnnnnnnnnnnnnnnnnnnnnnnnnnnnnnnnnnnnnnnnnnnnnnnnnnnnnnnnnnnnnnnnnnnnnnnnnnnnnnnnnnnnnnnnnnnnnnnnnnnnnnnnnnnnnnnnnnnnnnnnnnnnnnnnnnnnnnnnnnnnnnnnnnnnnnnnnnnnnnnnnnnnnnnnnnnnnnnnnnnnnnnnnnnnnnnnnnnnnnnnnnnnnnnnnnnnnnnnnnnnnnnnnnnnnnnnnnnnnnnnnnnnnnnnnnnnnnnnnnnnnnnnnnnnnnnnnnnnnnnnnnnnnnnnnnnnnnnnnnnnnnnnnnnnnnnnnnnnnnnnnnnnnnnnnnnnnnnnnnnnnnnnnnnnnnnnnnnnnnnnnnnnnnnnnnnnnnnnnnnnnnnnnnnnnnnnnnnnnnnnnnnnnnnnnnnnnnnnnnnnnnnnnnnnnnnnnnnnnnnnnnnnnnnnnnnnnnnnnnnnnnnnnnnnnnnnnnnnnnnnnnnnnnnnnnnnnnnnnnnnnnnnnnnnnnnnnnnnnnnnnnnnnnnnnnnnnnnnnnnnnnnnnnnnnnnnnnnnnnnnnnnnnnnnnnnnnnnnnnnnnnnnnnnnnnnnnnnnnnnnnnnnnnnnnnnnnnnnnnnnnnnnnnnnnnnnnnnnnnnnnnnnnnnnnnnnnnnnnnnnnnnnnnnnnnnnnnnnnnnnnnnnnnnnnnnnnnnnnnnnnnnnnnnnnnnnnnnnnnnnnnnnnnnnnnnnnnnnnnnnnnnnnnnnnnnnnnnnnnnnnnnnnnnnnnnnnnnnnnnnnnnnnnnnnnnnnnnnnnnnnnnnnnnnnnnnnnnnnnnnnnnnnnnnnnnnnnnnnnnnnnnnnnnnnnnnnnnnnnnnnnnnnnnnnnnnnnnnnnnnnnnnnnnnnnnnnnnnnnnnnnnnnnnnnnnnnnnnnnnnnnnnnnnnnnnnnnnnnnnnnnnnnnnnnnnnnnnnnnnnnnnnnnnnnnnnnnnnnnnnnnnnnnnnnnnnnnnnnnnnnnnnnnnnnnnnnnnnnnnnnnnnnnnnnnnnnnnnnnnnnnnnnnnnnnnnnnnnnnnnnnnnnnnnnnnnnnnnnnnnnnnnnnnnnnnnnnnnnnnnnnnnnnnnnnnnnnnnnnnnnnnnnnnnnnnnnnnnnnnnnnnnnnnnnnnnnnnnnnnnnnnnnnnnnnnnnnnnnnnnnnnnnnnnnnnnnnnnnnnnnnnnnnnnnnnnnnnnnnnnnnnnnnnnnnnnnnnnnnnnnnnnnnnnnnnnnnnnnnnnnnnnnnnnnnnnnnnnnnnnnnnnnnnnnnnnnnnnnnnnnnnnnnnnnnnnnnnnnnnnnnnnnnnnnnnnnnnnnnnnnnnnnnnnnnnnnnnnnnnnnnnnnnnnnnnnnnnnnnnnnnnnnnnnnnnnnnnnnnnnnnnnnnnnnnnnnnnnnnnnnnnnnnnnnnnnnnnnnnnnnnnnnnnnnnnnnnnnnnnnnnnnnnnnnnnnnnnnnnnnnnnnnnnnnnnnnnnnnnnnnnnnnnnnnnnnnnnnnnnnnnnnnnnnnnnnnnnnnnnnnnnnnnnnnnnnnnnnnnnnnnnnnnnnnnnnnnnnnnnnnnnnnnnnnnnnnnnnnnnnnnnnnnnnnnnnnnnnnnnnnnnnnnnnnnnnnnnnnnnnnnnnnnnnnnnnnnnnnnnnnnnnnnnnnnnnnnnnnnnnnnnnnnnnnnnnnnnnnnnnnnnnnnnnnnnnnnnnnnnnnnnnnnnnnnnnnnnnnnnnnnnnnnnnnnnnnnnnnnnnnnnnnnnnnnnnnnnnnnnnnnnnnnnnnnnnnnnnnnnnnnnnnnnnnnnnnnnnnnnnnnnnnnnnnnnnnnnnnnnnnnnnnnnnnnnnnnnnnnnnnnnnnnnnnnnnnnnnnnnnnnnnnnnnnnnnnnnnnnnnnnnnnnnnnnnnnnnnnnnnnnnnnnnnnnnnnnnnnnnnnnnnnnnnnnnnnnnnnnnnnnnnnnnnnnnnnnnnnnnnnnnnnnnnnnnnnnnnnnnnnnnnnnnnnnnnnnnnnnnnnnnnnnnnnnnnnnnnnnnnnnnnnnnnnnnnnnnnnnnnnnnnnnnnnnnnnnnnnnnnnnnnnnnnnnnnnnnnnnnnnnnnnnnnnnnnnnnnnnnnnnnnnnnnnnnnnnnnnnnnnnnnnnnnnnnnnnnnnnnnnnnnnnnnnnnnnnnnnnnnnnnnnnnnnnnnnnnnnnnnnnnnnnnnnnnnnnnnnnnnnnnnnnnnnnnnnnnnnnnnnnnnnnnnnnnnnnnnnnnnnnnnnnnnnnnnnnnnnnnnnnnnnnnnnnnnnnnnnnnnnnnnnnnnnnnnnnnnnnnnnnnnnnnnnnnnnnnnnnnnnnnnnnnnnnnnnnnnnnnnnnnnnnnnnnnnnnnnnnnnnnnnnnnnnnnnnnnnnnnnnnnnnnnnnnnnnnnnnnnnnnnnnnnnnnnnnnnnnnnnnnnnnnnnnnnnnnnnnnnnnnnnnnnnnnnnnnnnnnnnnnnnnnnnnnnnnnnnnnnnnnnnnnnnnnnnnnnnnnnnnnnnnnnnnnnnnnnnnnnnnnnnnnnnnnnnnnnnnnnnnnnnnnnnnnnnnnnnnnnnnnnnnnnnnnnnnnnnnnnnnnnnnnnnnnnnnnnnnnnnnnnnnnnnnnnnnnnnnnnnnnnnnnnnnnnnnnnnnnnnnnnnnnnnnnnnnnnnnnnnnnnnnnnnnnnnnnnnnnnnnnnnnnnnnnnnnnnnnnnnnnnnnnnnnnnnnnnnnnnnnnnnnnnnnnnnnnnnnnnnnnnnnnnnnnnnnnnnnnnnnnnnnnnnnnnnnnnnnnnnnnnnnnnnnnnnnnnnnnnnnnnnnnnnnnnnnnnnnnnnnnnnnnnnnnnnnnnnnnnnnnnnnnnnnnnnnnnnnnnnnnnnnnnnnnnnnnnnnnnnnnnnnnnnnnnnnnnnnnnnnnnnnnnnnnnnnnnnnnnnnnnnnnnnnnnnnnnnnnnnnnnnnnnnnnnnnnnnnnnnnnnnnnnnnnnnnnnnnnnnnnnnnnnnnnnnnnnnnnnnnnnnnnnnnnnnnnnnnnnnnnnnnnnnnnnnnnnnnnnnnnnnnnnnnnnnnnnnnnnnnnnnnnnnnnnnnnnnnnnnnnnnnnnnnnnnnnnnnnnnnnnnnnnnnnnnnnnnnnnnnnnnnnnnnnnnnnnnnnnnnnnnnnnnnnnnnnnnnnnnnnnnnnnnnnnnnnnnnnnnnnnnnnnnnnnnnnnnnnnnnnnnnnnnnnnnnnnnnnnnnnnnnnnnnnnnnnnnnnnnnnnnnnnnnnnnnnnnnnnnnnnnnnnnnnnnnnnnnnnnnnnnnnnnnnnnnnnnnnnnnnnnnnnnnnnnnnnnnnnnnnnnnnnnnnnnnnnnnnnnnnnnnnnnnnnnnnnnnnnnnnnnnnnnnnnnnnnnnnnnnnnnnnnnnnnnnnnnnnnnnnnnnnnnnnnnnnnnnnnnnnnnnnnnnnnnnnnnnnnnnnnnnnnnnnnnnnnnnnnnnnnnnnnnnnnnnnnnnnnnnnnnnnnnnnnnnnnnnnnnnnnnnnnnnnnnnnnnnnnnnnnnnnnnnnnnnnnnnnnnnnnnnnnnnnnnnnnnnnnnnnnnnnnnnnnnnnnnnnnnnnnnnnnnnnnnnnnnnnnnnnnnnnnnnnnnnnnnnnnnnnnnnnnnnnnnnnnnnnnnnnnnnnnnnnnnnnnnnnnnnnnnnnnnnnnnnnnnnnnnnnnnnnnnnnnnnnnnnnnnnnnnnnnnnnnnnnnnnnnnnnnnnnnnnnnnnnnnnnnnnnnnnnnnnnnnnnnnnnnnnnnnnnnnnnnnnnnnnnnnnnnnnnnnnnnnnnnnnnnnnnnnnnnnnnnnnnnnnnnnnnnnnnnnnnnnnnnnnnnnnnnnnnnnnnnnnnnnnnnnnnnnnnnnnnnnnnnnnnnnnnnnnnnnnnnnnnnnnnnnnnnnnnnnnnnnnnnnnnnnnnnnnnnnnnnnnnnnnnnnnnnnnnnnnnnnnnnnnnnnnnnnnnnnnnnnnnnnnnnnnnnnnnnnnnnnnnnnnnnnnnnnnnnnnnnnnnnnnnnnnnnnnnnnnnnnnnnnnnnnnnnnnnnnnnnnnnnnnnnnnnnnnnnnnnnnnnnnnnnnnnnnnnnnnnnnnnnnnnnnnnnnnnnnnnnnnnnnnnnnnnnnnnnnnnnnnnnnnnnnnnnnnnnnnnnnnnnnnnnnnnnnnnnnnnnnnnnnnnnnnnnnnnnnnnnnnnnnnnnnnnnnnnnnnnnnnnnnnnnnnnnnnnnnnnnnnnnnnnnnnnnnnnnnnnnnnnnnnnnnnnnnnnnnnnnnnnnnnnnnnnnnnnnnnnnnnnnnnnnnnnnnnnnnnnnnnnnnnnnnnnnnnnnnnnnnnnnnnnnnnnnnnnnnnnnnnnnnnnnnnnnnnnnnnnnnnnnnnnnnnnnnnnnnnnnnnnnnnnnnnnnnnnnnnnnnnnnnnnnnnnnnnnnnnnnnnnnnnnnnnnnnnnnnnnnnnnnnnnnnnnnnnnnnnnnnnnnnnnnnnnnnnnnnnnnnnnnnnnnnnnnnnnnnnnnnnnnnnnnnnnnnnnnnnnnnnnnnnnnnnnnnnnnnnnnnnnnnnnnnnnnnnnnnnnnnnnnnnnnnnnnnnnnnnnnnnnnnnnnnnnnnnnnnnnnnnnnnnnnnnnnnnnnnnnnnnnnnnnnnnnnnnnnnnnnnnnnnnnnnnnnnnnnnnnnnnnnnnnnnnnnnnnnnnnnnnnnnnnnnnnnnnnnnnnnnnnnnnnnnnnnnnnnnnnnnnnnnnnnnnnnnnnnnnnnnnnnnnnnnnnnnnnnnnnnnnnnnnnnnnnnnnnnnnnnnnnnnnnnnnnnnnnnnnnnnnnnnnnnnnnnnnnnnnnnnnnnnnnnnnnnnnnnnnnnnnnnnnnnnnnnnnnnnnnnnnnnnnnnnnnnnnnnnnnnnnnnnnnnnnnnnnnnnnnnnnnnnnnnnnnnnnnnnnnnnnnnnnnnnnnnnnnnnnnnnnnnnnnnnnnnnnnnnnnnnnnnnnnnnnnnnnnnnnnnnnnnnnnnnnnnnnnnnnnnnnnnnnnnnnnnnnnnnnnnnnnnnnnnnnnnnnnnnnnnnnnnnnnnnnnnnnnnnnnnnnnnnnnnnnnnnnnnnnnnnnnnnnnnnnnnnnnnnnnnnnnnnnnnnnnnnnnnnnnnnnnnnnnnnnnnnnnnnnnnnnnnnnnnnnnnnnnnnnnnnnnnnnnnnnnnnnnnnnnnnnnnnnnnnnnnnnnnnnnnnnnnnnnnnnnnnnnnnnnnnnnnnnnnnnnnnnnnnnnnnnnnnnnnnnnnnnnnnnnnnnnnnnnnnnnnnnnnnnnnnnnnnnnnnnnnnnnnnnnnnnnnnnnnnnnnnnnnnnnnnnnnnnnnnnnnnnnnnnnnnnnnnnnnnnnnnnnnnnnnnnnnnnnnnnnnnnnnnnnnnnnnnnnnnnnnnnnnnnnnnnnnnnnnnnnnnnnnnnnnnnnnnnnnnnnnnnnnnnnnnnnnnnnnnnnnnnnnnnnnnnnnnnnnnnnnnnnnnnnnnnnnnnnnnnnnnnnnnnnnnnnnnnnnnnnnnnnnnnnnnnnnnnnnnnnnnnnnnnnnnnnnnnnnnnnnnnnnnnnnnnnnnnnnnnnnnnnnnnnnnnnnnnnnnnnnnnnnnnnnnnnnnnnnnnnnnnnnnnnnnnnnnnnnnnnnnnnnnnnnnnnnnnnnnnnnnnnnnnnnnnnnnnnnnnnnnnnnnnnnnnnnnnnnnnnnnnnnnnnnnnnnnnnnnnnnnnnnnnnnnnnnnnnnnnnnnnnnnnnnnnnnnnnnnnnnnnnnnnnnnnnnnnnnnnnnnnnnnnnnnnnnnnnnnnnnnnnnnnnnnnnnnnnnnnnnnnnnnnnnnnnnnnnnnnnnnnnnnnnnnnnnnnnnnnnnnnnnnnnnnnnnnnnnnnnnnnnnnnnnnnnnnnnnnnnnnnnnnnnnnnnnnnnnnnnnnnnnnnnnnnnnnnnnnnnnnnnnnnnnnnnnnnnnnnnnnnnnnnnnnnnnnnnnnnnnnnnnnnnnnnnnnnnnnnnnnnnnnnnnnnnnnnnnnnnnnnnnnnnnnnnnnnnnnnnnnnnnnnnnnnnnnnnnnnnnnnnnnnnnnnnnnnnnnnnnnnnnnnnnnnnnnnnnnnnnnnnnnnnnnnnnnnnnnnnnnnnnnnnnnnnnnnnnnnnnnnnnnnnnnnnnnnnnnnnnnnnnnnnnnnnnnnnnnnnnnnnnnnnnnnnnnnnnnnnnnnnnnnnnnnnnnnnnnnnnnnnnnnnnnnnnnnnnnnnnnnnnnnnnnnnnnnnnnnnnnnnnnnnnnnnnnnnnnnnnnnnnnnnnnnnnnnnnnnnnnnnnnnnnnnnnnnnnnnnnnnnnnnnnnnnnnnnnnnnnnnnnnnnnnnnnnnnnnnnnnnnnnnnnnnnnnnnnnnnnnnnnnnnnnnnnnnnnnnnnnnnnnnnnnnnnnnnnnnnnnnnnnnnnnnnnnnnnnnnnnnnnnnnnnnnnnnnnnnnnnnnnnnnnnnnnnnnnnnnnnnnnnnnnnnnnnnnnnnnnnnnnnnnnnnnnnnnnnnnnnnnnnnnnnnnnnnnnnnnnnnnnnnnnnnnnnnnnnnnnnnnnnnnnnnnnnnnnnnnnnnnnnnnnnnnnnnnnnnnnnnnnnnnnnnnnnnnnnnnnnnnnnnnnnnnnnnnnnnnnnnnnnnnnnnnnnnnnnnnnnnnnnnnnnnnnnnnnnnnnnnnnnnnnnnnnnnnnnnnnnnnnnnnnnnnnnnnnnnnnnnnnnnnnnnnnnnnnnnnnnnnnnnnnnnnnnnnnnnnnnnnnnnnnnnnnnnnnnnnnnnnnnnnnnnnnnnnnnnnnnnnnnnnnnnnnnnnnnnnnnnnnnnnnnnnnnnnnnnnnnnnnnnnnnnnnnnnnnnnnnnnnnnnnnnnnnnnnnnnnnnnnnnnnnnnnnnnnnnnnnnnnnnnnnnnnnnnnnnnnnnnnnnnnnnnnnnnnnnnnnnnnnnnnnnnnnnnnnnnnnnnnnnnnnnnnnnnnnnnnnnnnnnnnnnnnnnnnnnnnnnnnnnnnnnnnnnnnnnnnnnnnnnnnnnnnnnnnnnnnnnnnnnnnnnnnnnnnnnnnnnnnnnnnnnnnnnnnnnnnnnnnnnnnnnnnnnnnnnnnnnnnnnnnnnnnnnnnnnnnnnnnnnnnnnnnnnnnnnnnnnnnnnnnnnnnnnnnnnnnnnnnnnnnnnnnnnnnnnnnnnnnnnnnnnnnnnnnnnnnnnnnnnnnnnnnnnnnnnnnnnnnnnnnnnnnnnnnnnnnnnnnnnnnnnnnnnnnnnnnnnnnnnnnnnnnnnnnnnnnnnnnnnnnnnnnnnnnnnnnnnnnnnnnnnnnnnnnnnnnnnnnnnnnnnnnnnnnnnnnnnnnnnnnnnnnnnnnnnnnnnnnnnnnnnnnnnnnnnnnnnnnnnnnnnnnnnnnnnnnnnnnnnnnnnnnnnnnnnnnnnnnnnnnnnnnnnnnnnnnnnnnnnnnnnnnnnnnnnnnnnnnnnnnnnnnnnnnnnnnnnnnnnnnnnnnnnnnnnnnnnnnnnnnnnnnnnnnnnnnnnnnnnnnnnnnnnnnnnnnnnnnnnnnnnnnnnnnnnnnnnnnnnnnnnnnnnnnnnnnnnnnnnnnnnnnnnnnnnnnnnnnnnnnnnnnnnnnnnnnnnnnnnnnnnnnnnnnnnnnnnnnnnnnnnnnnnnnnnnnnnnnnnnnnnnnnnnnnnnnnnnnnnnnnnnnnnnnnnnnnnnnnnnnnnnnnnnnnnnnnnnnnnnnnnnnnnnnnnnnnnnnnnnnnnnnnnnnnnnnnnnnnnnnnnnnnnnnnnnnnnnnnnnnnnnnnnnnnnnnnnnnnnnnnnnnnnnnnnnnnnnnnnnnnnnnnnnnnnnnnnnnnnnnnnnnnnnnnnnnnnnnnnnnnnnnnnnnnnnnnnnnnnnnnnnnnnnnnnnnnnnnnnnnnnnnnnnnnnnnnnnnnnnnnnnnnnnnnnnnnnnnnnnnnnnnnnnnnnnnnnnnnnnnnnnnnnnnnnnnnnnnnnnnnnnnnnnnnnnnnnnnnnnnnnnnnnnnnnnnnnnnnnnnnnnnnnnnnnnnnnnnnnnnnnnnnnnnnnnnnnnnnnnnnnnnnnnnnnnnnnnnnnnnnnnnnnnnnnnnnnnnnnnnnnnnnnnnnnnnnnnnnnnnnnnnnnnnnnnnnnnnnnnnnnnnnnnnnnnnnnnnnnnnnnnnnnnnnnnnnnnnnnnnnnnnnnnnnnnnnnnnnnnnnnnnnnnnnnnnnnnnnnnnnnnnnnnnnnnnnnnnnnnnnnnnnnnnnnnnnnnnnnnnnnnnnnnnnnnnnnnnnnnnnnnnnnnnnnnnnnnnnnnnnnnnnnnnnnnnnnnnnnnnnnnnnnnnnnnnnnnnnnnnnnnnnnnnnnnnnnnnnnnnnnnnnnnnnnnnnnnnnnnnnnnnnnnnnnnnnnnnnnnnnnnnnnnnnnnnnnnnnnnnnnnnnnnnnnnnnnnnnnnnnnnnnnnnnnnnnnnnnnnnnnnnnnnnnnnnnnnnnnnnnnnnnnnnnnnnnnnnnnnnnnnnnnnnnnnnnnnnnnnnnnnnnnnnnnnnnnnnnnnnnnnnnnnnnnnnnnnnnnnnnnnnnnnnnnnnnnnnnnnnnnnnnnnnnnnnnnnnnnnnnnnnnnnnnnnnnnnnnnnnnnnnnnnnnnnnnnnnnnnnnnnnnnnnnnnnnnnnnnnnnnnnnnnnnnnnnnnnnnnnnnnnnnnnnnnnnnnnnnnnnnnnnnnnnnnnnnnnnnnnnnnnnnnnnnnnnnnnnnnnnnnnnnnnnnnnnnnnnnnnnnnnnnnnnnnnnnnnnnnnnnnnnnnnnnnnnnnnnnnnnnnnnnnnnnnnnnnnnnnnnnnnnnnnnnnnnnnnnnnnnnnnnnnnnnnnnnnnnnnnnnnnnnnnnnnnnnnnnnnnnnnnnnnnnnnnnnnnnnnnnnnnnnnnnnnnnnnnnnnnnnnnnnnnnnnnnnnnnnnnnnnnnnnnnnnnnnnnnnnnnnnnnnnnnnnnnnnnnnnnnnnnnnnnnnnnnnnnnnnnnnnnnnnnnnnnnnnnnnnnnnnnnnnnnnnnnnnnnnnnnnnnnnnnnnnnnnnnnnnnnnnnnnnnnnnnnnnnnnnnnnnnnnnnnnnnnnnnnnnnnnnnnnnnnnnnnnnnnnnnnnnnnnnnnnnnnnnnnnnnnnnnnnnnnnnnnnnnnnnnnnnnnnnnnnnnnnnnnnnnnnnnnnnnnnnnnnnnnnnnnnnnnnnnnnnnnnnnnnnnnnnnnnnnnnnnnnnnnnnnnnnnnnnnnnnnnnnnnnnnnnnnnnnnnnnnnnnnnnnnnnnnnnnnnnnnnnnnnnnnnnnnnnnnnnnnnnnnnnnnnnnnnnnnnnnnnnnnnnnnnnnnnnnnnnnnnnnnnnnnnnnnnnnnnnnnnnnnnnnnnnnnnnnnnnnnnnnnnnnnnnnnnnnnnnnnnnnnnnnnnnnnnnnnnnnnnnnnnnnnnnnnnnnnnnnnnnnnnnnnnnnnnnnnnnnnnnnnnnnnnnnnnnnnnnnnnnnnnnnnnnnnnnnnnnnnnnnnnnnnnnnnnnnnnnnnnnnnnnnnnnnnnnnnnnnnnnnnnnnnnnnnnnnnnnnnnnnnnnnnnnnnnnnnnnnnnnnnnnnnnnnnnnnnnnnnnnnnnnnnnnnnnnnnnnnnnnnnnnnnnnnnnnnnnnnnnnnnnnnnnnnnnnnnnnnnnnnnnnnnnnnnnnnnnnnnnnnnnnnnnnnnnnnnnnnnnnnnnnnnnnnnnnnnnnnnnnnnnnnnnnnnnnnnnnnnnnnnnnnnnnnnnnnnnnnnnnnnnnnnnnnnnnnnnnnnnnnnnnnnnnnnnnnnnnnnnnnnnnnnnnnnnnnnnnnnnnnnnnnnnnnnnnnnnnnnnnnnnnnnnnnnnnnnnnnnnnnnnnnnnnnnnnnnnnnnnnnnnnnnnnnnnnnnnnnnnnnnnnnnnnnnnnnnnnnnnnnnnnnnnnnnnnnnnnnnnnnnnnnnnnnnnnnnnnnnnnnnnnnnnnnnnnnnnnnnnnnnnnnnnnnnnnnnnnnnnnnnnnnnnnnnnnnnnnnnnnnnnnnnnnnnnnnnnnnnnnnnnnnnnnnnnnnnnnnnnnnnnnnnnnnnnnnnnnnnnnnnnnnnnnnnnnnnnnnnnnnnnnnnnnnnnnnnnnnnnnnnnnnnnnnnnnnnnnnnnnnnnnnnnnnnnnnnnnnnnnnnnnnnnnnnnnnnnnnnnnnnnnnnnnnnnnnnnnnnnnnnnnnnnnnnnnnnnnnnnnnnnnnnnnnnnnnnnnnnnnnnnnnnnnnnnnnnnnnnnnnnnnnnnnnnnnnnnnnnnnnnnnnnnnnnnnnnnnnnnnnnnnnnnnnnnnnnnnnnnnnnnnnnnnnnnnnnnnnnnnnnnnnnnnnnnnnnnnnnnnnnnnnnnnnnnnnnnnnnnnnnnnnnnnnnnnnnnnnnnnnnnnnnnnnnnnnnnnnnnnnnnnnnnnnnnnnnnnnnnnnnnnnnnnnnnnnnnnnnnnnnnnnnnnnnnnnnnnnnnnnnnnnnnnnnnnnnnnnnnnnnnnnnnnnnnnnnnnnnnnnnnnnnnnnnnnnnnnnnnnnnnnnnnnnnnnnnnnnnnnnnnnnnnnnnnnnnnnnnnnnnnnnnnnnnnnnnnnnnnnnnnnnnnnnnnnnnnnnnnnnnnnnnnnnnnnnnnnnnnnnnnnnnnnnnnnnnnnnnnnnnnnnnnnnnnnnnnnnnnnnnnnnnnnnnnnnnnnnnnnnnnnnnnnnnnnnnnnnnnnnnnnnnnnnnnnnnnnnnnnnnnnnnnnnnnnnnnnnnnnnnnnnnnnnnnnnnnnnnnnnnnnnnnnnnnnnnnnnnnnnnnnnnnnnnnnnnnnnnnnnnnnnnnnnnnnnnnnnnnnnnnnnnnnnnnnnnnnnnnnnnnnnnnnnnnnnnnnnnnnnnnnnnnnnnnnnnnnnnnnnnnnnnnnnnnnnnnnnnnnnnnnnnnnnnnnnnnnnnnnnnnnnnnnnnnnnnnnnnnnnnnnnnnnnnnnnnnnnnnnnnnnnnnnnnnnnnnnnnnnnnnnnnnnnnnnnnnnnnnnnnnnnnnnnnnnnnnnnnnnnnnnnnnnnnnnnnnnnnnnnnnnnnnnnnnnnnnnnnnnnnnnnnnnnnnnnnnnnnnnnnnnnnnnnnnnnnnnnnnnnnnnnnnnnnnnnnnnnnnnnnnnnnnnnnnnnnnnnnnnnnnnnnnnnnnnnnnnnnnnnnnnnnnnnnnnnnnnnnnnnnnnnnnnnnnnnnnnnnnnnnnnnnnnnnnnnnnnnnnnnnnnnnnnnnnnnnnnnnnnnnnnnnnnnnnnnnnnnnnnnnnnnnnnnnnnnnnnnnnnnnnnnnnnnnnnnnnnnnnnnnnnnnnnnnnnnnnnnnnnnnnnnnnnnnnnnnnnnnnnnnnnnnnnnnnnnnnnnnnnnnnnnnnnnnnnnnnnnnnnnnnnnnnnnnnnnnnnnnnnnnnnnnnnnnnnnnnnnnnnnnnnnnnnnnnnnnnnnnnnnnnnnnnnnnnnnnnnnnnnnnnnnnnnnnnnnnnnnnnnnnnnnnnnnnnnnnnnnnnnnnnnnnnnnnnnnnnnnnnnnnnnnnnnnnnnnnnnnnnnnnnnnnnnnnnnnnnnnnnnnnnnnnnnnnnnnnnnnnnnnnnnnnnnnnnnnnnnnnnnnnnnnnnnnnnnnnnnnnnnnnnnnnnnnnnnnnnnnnnnnnnnnnnnnnnnnnnnnnnnnnnnnnnnnnnnnnnnnnnnnnnnnnnnnnnnnnnnnnnnnnnnnnnnnnnnnnnnnnnnnnnnnnnnnnnnnnnnnnnnnnnnnnnnnnnnnnnnnnnnnnnnnnnnnnnnnnnnnnnnnnnnnnnnnnnnnnnnnnnnnnnnnnnnnnnnnnnnnnnnnnnnnnnnnnnnnnnnnnnnnnnnnnnnnnnnnnnnnnnnnnnnnnnnnnnnnnnnnnnnnnnnnnnnnnnnnnnnnnnnnnnnnnnnnnnnnnnnnnnnnnnnnnnnnnnnnnnnnnnnnnnnnnnnnnnnnnnnnnnnnnnnnnnnnnnnnnnnnnnnnnnnnnnnnnnnnnnnnnnnnnnnnnnnnnnnnnnnnnnnnnnnnnnnnnnnnnnnnnnnnnnnnnnnnnnnnnnnnnnnnnnnnnnnnnnnnnnnnnnnnnnnnnnnnnnnnnnnnnnnnnnnnnnnnnnnnnnnnnnnnnnnnnnnnnnnnnnnnnnnnnnnnnnnnnnnnnnnnnnnnnnnnnnnnnnnnnnnnnnnnnnnnnnnnnnnnnnnnnnnnnnnnnnnnnnnnnnnnnnnnnnnnnnnnnnnnnnnnnnnnnnnnnnnnnnnnnnnnnnnnnnnnnnnnnnnnnnnnnnnnnnnnnnnnnnnnnnnnnnnnnnnnnnnnnnnnnnnnnnnnnnnnnnnnnnnnnnnnnnnnnnnnnnnnnnnnnnnnnnnnnnnnnnnnnnnnnnnnnnnnnnnnnnnnnnnnnnnnnnnnnnnnnnnnnnnnnnnnnnnnnnnnnnnnnnnnnnnnnnnnnnnnnnnnnnnnnnnnnnnnnnnnnnnnnnnnnnnnnnnnnnnnnnnnnnnnnnnnnnnnnnnnnnnnnnnnnnnnnnnnnnnnnnnnnnnnnnnnnnnnnnnnnnnnnnnnnnnnnnnnnnnnnnnnnnnnnnnnnnnnnnnnnnnnnnnnnnnnnnnnnnnnnnnnnnnnnnnnnnnnnnnnnnnnnnnnnnnnnnnnnnnnnnnnnnnnnnnnnnnnnnnnnnnnnnnnnnnnnnnnnnnnnnnnnnnnnnnnnnnnnnnnnnnnnnnnnnnnnnnnnnnnnnnnnnnnnnnnnnnnnnnnnnnnnnnnnnnnnnnnnnnnnnnnnnnnnnnnnnnnnnnnnnnnnnnnnnnnnnnnnnnnnnnnnnnnnnnnnnnnnnnnnnnnnnnnnnnnnnnnnnnnnnnnnnnnnnnnnnnnnnnnnnnnnnnnnnnnnnnnnnnnnnnnnnnnnnnnnnnnnnnnnnnnnnnnnnnnnnnnnnnnnnnnnnnnnnnnnnnnnnnnnnnnnnnnnnnnnnnnnnnnnnnnnnnnnnnnnnnnnnnnnnnnnnnnnnnnnnnnnnnnnnnnnnnnnnnnnnnnnnnnnnnnnnnnnnnnnnnnnnnnnnnnnnnnnnnnnnnnnnnnnnnnnnnnnnnnnnnnnnnnnnnnnnnnnnnnnnnnnnnnnnnnnnnnnnnnnnnnnnnnnnnnnnnnnnnnnnnnnnnnnnnnnnnnnnnnnnnnnnnnnnnnnnnnnnnnnnnnnnnnnnnnnnnnnnnnnnnnnnnnnnnnnnnnnnnnnnnnnnnnnnnnnnnnnnnnnnnnnnnnnnnnnnnnnnnnnnnnnnnnnnnnnnnnnnnnnnnnnnnnnnnnnnnnnnnnnnnnnnnnnnnnnnnnnnnnnnnnnnnnnnnnnnnnnnnnnnnnnnnnnnnnnnnnnnnnnnnnnnnnnnnnnnnnnnnnnnnnnnnnnnnnnnnnnnnnnnnnnnnnnnnnnnnnnnnnnnnnnnnnnnnnnnnnnnnnnnnnnnnnnnnnnnnnnnnnnnnnnnnnnnnnnnnnnnnnnnnnnnnnnnnnnnnnnnnnnnnnnnnnnnnnnnnnnnnnnnnnnnnnnnnnnnnnnnnnnnnnnnnnnnnnnnnnnnnnnnnnnnnnnnnnnnnnnnnnnnnnnnnnnnnnnnnnnnnnnnnnnnnnnnnnnnnnnnnnnnnnnnnnnnnnnnnnnnnnnnnnnnnnnnnnnnnnnnnnnnnnnnnnnnnnnnnnnnnnnnnnnnnnnnnnnnnnnnnnnnnnnnnnnnnnnnnnnnnnnnnnnnnnnnnnnnnnnnnnnnnnnnnnnnnnnnnnnnnnnnnnnnnnnnnnnnnnnnnnnnnnnnnnnnnnnnnnnnnnnnnnnnnnnnnnnnnnnnnnnnnnnnnnnnnnnnnnnnnnnnnnnnnnnnnnnnnnnnnnnnnnnnnnnnnnnnnnnnnnnnnnnnnnnnnnnnnnnnnnnnnnnnnnnnnnnnnnnnnnnnnnnnnnnnnnnnnnnnnnnnnnnnnnnnnnnnnnnnnnnnnnnnnnnnnnnnnnnnnnnnnnnnnnnnnnnnnnnnnnnnnnnnnnnnnnnnnnnnnnnnnnnnnnnnnnnnnnnnnnnnnnnnnnnnnnnnnnnnnnnnnnnnnnnnnnnnnnnnnnnnnnnnnnnnnnnnnnnnnnnnnnnnnnnnnnnnnnnnnnnnnnnnnnnnnnnnnnnnnnnnnnnnnnnnnnnnnnnnnnnnnnnnnnnnnnnnnnnnnnnnnnnnnnnnnnnnnnnnnnnnnnnnnnnnnnnnnnnnnnnnnnnnnnnnnnnnnnnnnnnnnnnnnnnnnnnnnnnnnnnnnnnnnnnnnnnnnnnnnnnnnnnnnnnnnnnnnnnnnnnnnnnnnnnnnnnnnnnnnnnnnnnnnnnnnnnnnnnnnnnnnnnnnnnnnnnnnnnnnnnnnnnnnnnnnnnnnnnnnnnnnnnnnnnnnnnnnnnnnnnnnnnnnnnnnnnnnnnnnnnnnnnnnnnnnnnnnnnnnnnnnnnnnnnnnnnnnnnnnnnnnnnnnnnnnnnnnnnnnnnnnnnnnnnnnnnnnnnnnnnnnnnnnnnnnnnnnnnnnnnnnnnnnnnnnnnnnnnnnnnnnnnnnnnnnnnnnnnnnnnnnnnnnnnnnnnnnnnnnnnnnnnnnnnnnnnnnnnnnnnnnnnnnnnnnnnnnnnnnnnnnnnnnnnnnnnnnnnnnnnnnnnnnnnnnnnnnnnnnnnnnnnnnnnnnnnnnnnnnnnnnnnnnnnnnnnnnnnnnnnnnnnnnnnnnnnnnnnnnnnnnnnnnnnnnnnnnnnnnnnnnnnnnnnnnnnnnnnnnnnnnnnnnnnnnnnnnnnnnnnnnnnnnnnnnnnnnnnnnnnnnnnnnnnnnnnnnnnnnnnnnnnnnnnnnnnnnnnnnnnnnnnnnnnnnnnnnnnnnnnnnnnnnnnnnnnnnnnnnnnnnnnnnnnnnnnnnnnnnnnnnnnnnnnnnnnnnnnnnnnnnnnnnnnnnnnnnnnnnnnnnnnnnnnnnnnnnnnnnnnnnnnnnnnnnnnnnnnnnnnnnnnnnnnnnnnnnnnnnnnnnnnnnnnnnnnnnnnnnnnnnnnnnnnnnnnnnnnnnnnnnnnnnnnnnnnnnnnnnnnnnnnnnnnnnnnnnnnnnnnnnnnnnnnnnnnnnnnnnnnnnnnnnnnnnnnnnnnnnnnnnnnnnnnnnnnnnnnnnnnnnnnnnnnnnnnnnnnnnnnnnnnnnnnnnnnnnnnnnnnnnnnnnnnnnnnnnnnnnnnnnnnnnnnnnnnnnnnnnnnnnnnnnnnnnnnnnnnnnnnnnnnnnnnnnnnnnnnnnnnnnnnnnnnnnnnnnnnnnnnnnnnnnnnnnnnnnnnnnnnnnnnnnnnnnnnnnnnnnnnnnnnnnnnnnnnnnnnnnnnnnnnnnnnnnnnnnnnnnnnnnnnnnnnnnnnnnnnnnnnnnnnnnnnnnnnnnnnnnnnnnnnnnnnnnnnnnnnnnnnnnnnnnnnnnnnnnnnnnnnnnnnnnnnnnnnnnnnnnnnnnnnnnnnnnnnnnnnnnnnnnnnnnnnnnnnnnnnnnnnnnnnnnnnnnnnnnnnnnnnnnnnnnnnnnnnnnnnnnnnnnnnnnnnnnnnnnnnnnnnnnnnnnnnnnnnnnnnnnnnnnnnnnnnnnnnnnnnnnnnnnnnnnnnnnnnnnnnnnnnnnnnnnnnnnnnnnnnnnnnnnnnnnnnnnnnnnnnnnnnnnnnnnnnnnnnnnnnnnnnnnnnnnnnnnnnnnnnnnnnnnnnnnnnnnnnnnnnnnnnnnnnnnnnnnnnnnnnnnnnnnnnnnnnnnnnnnnnnnnnnnnnnnnnnnnnnnnnnnnnnnnnnnnnnnnnnnnnnnnnnnnnnnnnnnnnnnnnnnnnnnnnnnnnnnnnnnnnnnnnnnnnnnnnnnnnnnnnnnnnnnnnnnnnnnnnnnnnnnnnnnnnnnnnnnnnnnnnnnnnnnnnnnnnnnnnnnnnnnnnnnnnnnnnnnnnnnnnnnnnnnnnnnnnnnnnnnnnnnnnnnnnnnnnnnnnnnnnnnnnnnnnnnnnnnnnnnnnnnnnnnnnnnnnnnnnnnnnnnnnnnnnnnnnnnnnnnnnnnnnnnnnnnnnnnnnnnnnnnnnnnnnnnnnnnnnnnnnnnnnnnnnnnnnnnnnnnnnnnnnnnnnnnnnnnnnnnnnnnnnnnnnnnnnnnnnnnnnnnnnnnnnnnnnnnnnnnnnnnnnnnnnnnnnnnnnnnnnnnnnnnnnnnnnnnnnnnnnnnnnnnnnnnnnnnnnnnnnnnnnnnnnnnnnnnnnnnnnnnnnnnnnnnnnnnnnnnnnnnnnnnnnnnnnnnnnnnnnnnnnnnnnnnnnnnnnnnnnnnnnnnnnnnnnnnnnnnnnnnnnnnnnnnnnnnnnnnnnnnnnnnnnnnnnnnnnnnnnnnnnnnnnnnnnnnnnnnnnnnnnnnnnnnnnnnnnnnnnnnnnnnnnnnnnnnnnnnnnnnnnnnnnnnnnnnnnnnnnnnnnnnnnnnnnnnnnnnnnnnnnnnnnnnnnnnnnnnnnnnnnnnnnnnnnnnnnnnnnnnnnnnnnnnnnnnnnnnnnnnnnnnnnnnnnnnnnnnnnnnnnnnnnnnnnnnnnnnnnnnnnnnnnnnnnnnnnnnnnnnnnnnnnnnnnnnnnnnnnnnnnnnnnnnnnnnnnnnnnnnnnnnnnnnnnnnnnnnnnnnnnnnnnnnnnnnnnnnnnnnnnnnnnnnnnnnnnnnnnnnnnnnnnnnnnnnnnnnnnnnnnnnnnnnnnnnnnnnnnnnnnnnnnnnnnnnnnnnnnnnnnnnnnnnnnnnnnnnnnnnnnnnnnnnnnnnnnnnnnnnnnnnnnnnnnnnnnnnnnnnnnnnnnnnnnnnnnnnnnnnnnnnnnnnnnnnnnnnnnnnnnnnnnnnnnnnnnnnnnnnnnnnnnnnnnnnnnnnnnnnnnnnnnnnnnnnnnnnnnnnnnnnnnnnnnnnnnnnnnnnnnnnnnnnnnnnnnnnnnnnnnnnnnnnnnnnnnnnnnnnnnnnnnnnnnnnnnnnnnnnnnnnnnnnnnnnnnnnnnnnnnnnnnnnnnnnnnnnnnnnnnnnnnnnnnnnnnnnnnnnnnnnnnnnnnnnnnnnnnnnnnnnnnnnnnnnnnnnnnnnnnnnnnnnnnnnnnnnnnnnnnnnnnnnnnnnnnnnnnnnnnnnnnnnnnnnnnnnnnnnnnnnnnnnnnnnnnnnnnnnnnnnnnnnnnnnnnnnnnnnnnnnnnnnnnnnnnnnnnnnnnnnnnnnnnnnnnnnnnnnnnnnnnnnnnnnnnnnnnnnnnnnnnnnnnnnnnnnnnnnnnnnnnnnnnnnnnnnnnnnnnnnnnnnnnnnnnnnnnnnnnnnnnnnnnnnnnnnnnnnnnnnnnnnnnnnnnnnnnnnnnnnnnnnnnnnnnnnnnnnnnnnnnnnnnnnnnnnnnnnnnnnnnnnnnnnnnnnnnnnnnnnnnnnnnnnnnnnnnnnnnnnnnnnnnnnnnnnnnnnnnnnnnnnnnnnnnnnnnnnnnnnnnnnnnnnnnnnnnnnnnnnnnnnnnnnnnnnnnnnnnnnnnnnnnnnnnnnnnnnnnnnnnnnnnnnnnnnnnnnnnnnnnnnnnnnnnnnnnnnnnnnnnnnnnnnnnnnnnnnnnnnnnnnnnnnnnnnnnnnnnnnnnnnnnnnnnnnnnnnnnnnnnnnnnnnnnnnnnnnnnnnnnnnnnnnnnnnnnnnnnnnnnnnnnnnnnnnnnnnnnnnnnnnnnnnnnnnnnnnnnnnnnnnnnnnnnnnnnnnnnnnnnnnnnnnnnnnnnnnnnnnnnnnnnnnnnnnnnnnnnnnnnnnnnnnnnnnnnnnnnnnnnnnnnnnnnnnnnnnnnnnnnnnnnnnnnnnnnnnnnnnnnnnnnnnnnnnnnnnnnnnnnnnnnnnnnnnnnnnnnnnnnnnnnnnnnnnnnnnnnnnnnnnnnnnnnnnnnnnnnnnnnnnnnnnnnnnnnnnnnnnnnnnnnnnnnnnnnnnnnnnnnnnnnnnnnnnnnnnnnnnnnnnnnnnnnnnnnnnnnnnnnnnnnnnnnnnnnnnnnnnnnnnnnnnnnnnnnnnnnnnnnnnnnnnnnnnnnnnnnnnnnnnnnnnnnnnnnnnnnnnnnnnnnnnnnnnnnnnnnnnnnnnnnnnnnnnnnnnnnnnnnnnnnnnnnnnnnnnnnnnnnnnnnnnnnnnnnnnnnnnnnnnnnnnnnnnnnnnnnnnnnnnnnnnnnnnnnnnnnnnnnnnnnnnnnnnnnnnnnnnnnnnnnnnnnnnnnnnnnnnnnnnnnnnnnnnnnnnnnnnnnnnnnnnnnnnnnnnnnnnnnnnnnnnnnnnnnnnnnnnnnnnnnnnnnnnnnnnnnnnnnnnnnnnnnnnnnnnnnnnnnnnnnnnnnnnnnnnnnnnnnnnnnnnnnnnnnnnnnnnnnnnnnnnnnnnnnnnnnnnnnnnnnnnnnnnnnnnnnnnnnnnnnnnnnnnnnnnnnnnnnnnnnnnnnnnnnnnnnnnnnnnnnnnnnnnnnnnnnnnnnnnnnnnnnnnnnnnnnnnnnnnnnnnnnnnnnnnnnnnnnnnnnnnnnnnnnnnnnnnnnnnnnnnnnnnnnnnnnnnnnnnnnnnnnnnnnnnnnnnnnnnnnnnnnnnnnnnnnnnnnnnnnnnnnnnnnnnnnnnnnnnnnnnnnnnnnnnnnnnnnnnnnnnnnnnnnnnnnnnnnnnnnnnnnnnnnnnnnnnnnnnnnnnnnnnnnnnnnnnnnnnnnnnnnnnnnnnnnnnnnnnnnnnnnnnnnnnnnnnnnnnnnnnnnnnnnnnnnnnnnnnnnnnnnnnnnnnnnnnnnnnnnnnnnnnnnnnnnnnnnnnnnnnnnnnnnnnnnnnnnnnnnnnnnnnnnnnnnnnnnnnnnnnnnnnnnnnnnnnnnnnnnnnnnnnnnnnnnnnnnnnnnnnnnnnnnnnnnnnnnnnnnnnnnnnnnnnnnnnnnnnnnnnnnnnnnnnnnnnnnnnnnnnnnnnnnnnnnnnnnnnnnnnnnnnnnnnnnnnnnnnnnnnnnnnnnnnnnnnnnnnnnnnnnnnnnnnnnnnnnnnnnnnnnnnnnnnnnnnnnnnnnnnnnnnnnnnnnnnnnnnnnnnnnnnnnnnnnnnnnnnnnnnnnnnnnnnnnnnnnnnnnnnnnnnnnnnnnnnnnnnnnnnnnnnnnnnnnnnnnnnnnnnnnnnnnnnnnnnnnnnnnnnnnnnnnnnnnnnnnnnnnnnnnnnnnnnnnnnnnnnnnnnnnnnnnnnnnnnnnnnnnnnnnnnnnnnnnnnnnnnnnnnnnnnnnnnnnnnnnnnnnnnnnnnnnnnnnnnnnnnnnnnnnnnnnnnnnnnnnnnnnnnnnnnnnnnnnnnnnnnnnnnnnnnnnnnnnnnnnnnnnnnnnnnnnnnnnnnnnnnnnnnnnnnnnnnnnnnnnnnnnnnnnnnnnnnnnnnnnnnnnnnnnnnnnnnnnnnnnnnnnnnnnnnnnnnnnnnnnnnnnnnnnnnnnnnnnnnnnnnnnnnnnnnnnnnnnnnnnnnnnnnnnnnnnnnnnnnnnnnnnnnnnnnnnnnnnnnnnnnnnnnnnnnnnnnnnnnnnnnnnnnnnnnnnnnnnnnnnnnnnnnnnnnnnnnnnnnnnnnnnnnnnnnnnnnnnnnnnnnnnnnnnnnnnnnnnnnnnnnnnnnnnnnnnnnnnnnnnnnnnnnnnnnnnnnnnnnnnnnnnnnnnnnnnnnnnnnnnnnnnnnnnnnnnnnnnnnnnnnnnnnnnnnnnnnnnnnnnnnnnnnnnnnnnnnnnnnnnnnnnnnnnnnnnnnnnnnnnnnnnnnnnnnnnnnnnnnnnnnnnnnnnnnnnnnnnnnnnnnnnnnnnnnnnnnnnnnnnnnnnnnnnnnnnnnnnnnnnnnnnnnnnnnnnnnnnnnnnnnnnnnnnnnnnnnnnnnnnnnnnnnnnnnnnnnnnnnnnnnnnnnnnnnnnnnnnnnnnnnnnnnnnnnnnnnnnnnnnnnnnnnnnnnnnnnnnnnnnnnnnnnnnnnnnnnnnnnnnnnnnnnnnnnnnnnnnnnnnnnnnnnnnnnnnnnnnnnnnnnnnnnnnnnnnnnnnnnnnnnnnnnnnnnnnnnnnnnnnnnnnnnnnnnnnnnnnnnnnnnnnnnnnnnnnnnnnnnnnnnnnnnnnnnnnnnnnnnnnnnnnnnnnnnnnnnnnnnnnnnnnnnnnnnnnnnnnnnnnnnnnnnnnnnnnnnnnnnnnnnnnnnnnnnnnnnnnnnnnnnnnnnnnnnnnnnnnnnnnnnnnnnnnnnnnnnnnnnnnnnnnnnnnnnnnnnnnnnnnnnnnnnnnnnnnnnnnnnnnnnnnnnnnnnnnnnnnnnnnnnnnnnnnnnnnnnnnnnnnnnnnnnnnnnnnnnnnnnnnnnnnnnnnnnnnnnnnnnnnnnnnnnnnnnnnnnnnnnnnnnnnnnnnnnnnnnnnnnnnnnnnnnnnnnnnnnnnnnnnnnnnnnnnnnnnnnnnnnnnnnnnnnnnnnnnnnnnnnnnnnnnnnnnnnnnnnnnnnnnnnnnnnnnnnnnnnnnnnnnnnnnnnnnnnnnnnnnnnnnnnnnnnnnnnnnnnnnnnnnnnnnnnnnnnnnnnnnnnnnnnnnnnnnnnnnnnnnnnnnnnnnnnnnnnnnnnnnnnnnnnnnnnnnnnnnnnnnnnnnnnnnnnnnnnnnnnnnnnnnnnnnnnnnnnnnnnnnnnnnnnnnnnnnnnnnnnnnnnnnnnnnnnnnnnnnnnnnnnnnnnnnnnnnnnnnnnnnnnnnnnnnnnnnnnnnnnnnnnnnnnnnnnnnnnnnnnnnnnnnnnnnnnnnnnnnnnnnnnnnnnnnnnnnnnnnnnnnnnnnnnnnnnnnnnnnnnnnnnnnnnnnnnnnnnnnnnnnnnnnnnnnnnnnnnnnnnnnnnnnnnnnnnnnnnnnnnnnnnnnnnnnnnnnnnnnnnnnnnnnnnnnnnnnnnnnnnnnnnnnnnnnnnnnnnnnnnnnnnnnnnnnnnnnnnnnnnnnnnnnnnnnnnnnnnnnnnnnnnnnnnnnnnnnnnnnnnnnnnnnnnnnnnnnnnnnnnnnnnnnnnnnnnnnnnnnnnnnnnnnnnnnnnnnnnnnnnnnnnnnnnnnnnnnnnnnnnnnnnnnnnnnnnnnnnnnnnnnnnnnnnnnnnnnnnnnnnnnnnnnnnnnnnnnnnnnnnnnnnnnnnnnnnnnnnnnnnnnnnnnnnnnnnnnnnnnnnnnnnnnnnnnnnnnnnnnnnnnnnnnnnnnnnnnnnnnnnnnnnnnnnnnnnnnnnnnnnnnnnnnnnnnnnnnnnnnnnnnnnnnnnnnnnnnnnnnnnnnnnnnnnnnnnnnnnnnnnnnnnnnnnnnnnnnnnnnnnnnnnnnnnnnnnnnnnnnnnnnnnnnnnnnnnnnnnnnnnnnnnnnnnnnnnnnnnnnnnnnnnnnnnnnnnnnnnnnnnnnnnnnnnnnnnnnnnnnnnnnnnnnnnnnnnnnnnnnnnnnnnnnnnnnnnnnnnnnnnnnnnnnnnnnnnnnnnnnnnnnnnnnnnnnnnnnnnnnnnnnnnnnnnnnnnnnnnnnnnnnnnnnnnnnnnnnnnnnnnnnnnnnnnnnnnnnnnnnnnnnnnnnnnnnnnnnnnnnnnnnnnnnnnnnnnnnnnnnnnnnnnnnnnnnnnnnnnnnnnnnnnnnnnnnnnnnnnnnnnnnnnnnnnnnnnnnnnnnnnnnnnnnnnnnnnnnnnnnnnnnnnnnnnnnnnnnnnnnnnnnnnnnnnnnnnnnnnnnnnnnnnnnnnnnnnnnnnnnnnnnnnnnnnnnnnnnnnnnnnnnnnnnnnnnnnnnnnnnnnnnnnnnnnnnnnnnnnnnnnnnnnnnnnnnnnnnnnnnnnnnnnnnnnnnnnnnnnnnnnnnnnnnnnnnnnnnnnnnnnnnnnnnnnnnnnnnnnnnnnnnnnnnnnnnnnnnnnnnnnnnnnnnnnnnnnnnnnnnnnnnnnnnnnnnnnnnnnnnnnnnnnnnnnnnnnnnnnnnnnnnnnnnnnnnnnnnnnnnnnnnnnnnnnnnnnnnnnnnnnnnnnnnnnnnnnnnnnnnnnnnnnnnnnnnnnnnnnnnnnnnnnnnnnnnnnnnnnnnnnnnnnnnnnnnnnnnnnnnnnnnnnnnnnnnnnnnnnnnnnnnnnnnnnnnnnnnnnnnnnnnnnnnnnnnnnnnnnnnnnnnnnnnnnnnnnnnnnnnnnnnnnnnnnnnnnnnnnnnnnnnnnnnnnnnnnnnnnnnnnnnnnnnnnnnnnnnnnnnnnnnnnnnnnnnnnnnnnnnnnnnnnnnnnnnnnnnnnnnnnnnnnnnnnnnnnnnnnnnnnnnnnnnnnnnnnnnnnnnnnnnnnnnnnnnnnnnnnnnnnnnnnnnnnnnnnnnnnnnnnnnnnnnnnnnnnnnnnnnnnnnnnnnnnnnnnnnnnnnnnnnnnnnnnnnnnnnnnnnnnnnnnnnnnnnnnnnnnnnnnnnnnnnnnnnnnnnnnnnnnnnnnnnnnnnnnnnnnnnnnnnnnnnnnnnnnnnnnnnnnnnnnnnnnnnnnnnnnnnnnnnnnnnnnnnnnnnnnnnnnnnnnnnnnnnnnnnnnnnnnnnnnnnnnnnnnnnnnnnnnnnnnnnnnnnnnnnnnnnnnnnnnnnnnnnnnnnnnnnnnnnnnnnnnnnnnnnnnnnnnnnnnnnnnnnnnnnnnnnnnnnnnnnnnnnnnnnnnnnnnnnnnnnnnnnnnnnnnnnnnnnnnnnnnnnnnnnnnnnnnnnnnnnnnnnnnnnnnnnnnnnnnnnnnnnnnnnnnnnnnnnnnnnnnnnnnnnnnnnnnnnnnnnnnnnnnnnnnnnnnnnnnnnnnnnnnnnnnnnnnnnnnnnnnnnnnnnnnnnnnnnnnnnnnnnnnnnnnnnnnnnnnnnnnnnnnnnnnnnnnnnnnnnnnnnnnnnnnnnnnnnnnnnnnnnnnnnnnnnnnnnnnnnnnnnnnnnnnnnnnnnnnnnnnnnnnnnnnnnnnnnnnnnnnnnnnnnnnnnnnnnnnnnnnnnnnnnnnnnnnnnnnnnnnnnnnnnnnnnnnnnnnnnnnnnnnnnnnnnnnnnnnnnnnnnnnnnnnnnnnnnnnnnnnnnnnnnnnnnnnnnnnnnnnnnnnnnnnnnnnnnnnnnnnnnnnnnnnnnnnnnnnnnnnnnnnnnnnnnnnnnnnnnnnnnnnnnnnnnnnnnnnnnnnnnnnnnnnnnnnnnnnnnnnnnnnnnnnnnnnnnnnnnnnnnnnnnnnnnnnnnnnnnnnnnnnnnnnnnnnnnnnnnnnnnnnnnnnnnnnnnnnnnnnnnnnnnnnnnnnnnnnnnnnnnnnnnnnnnnnnnnnnnnnnnnnnnnnnnnnnnnnnnnnnnnnnnnnnnnnnnnnnnnnnnnnnnnnnnnnnnnnnnnnnnnnnnnnnnnnnnnnnnnnnnnnnnnnnnnnnnnnnnnnnnnnnnnnnnnnnnnnnnnnnnnnnnnnnnnnnnnnnnnnnnnnnnnnnnnnnnnnnnnnnnnnnnnnnnnnnnnnnnnnnnnnnnnnnnnnnnnnnnnnnnnnnnnnnnnnnnnnnnnnnnnnnnnnnnnnnnnnnnnnnnnnnnnnnnnnnnnnnnnnnnnnnnnnnnnnnnnnnnnnnnnnnnnnnnnnnnnnnnnnnnnnnnnnnnnnnnnnnnnnnnnnnnnnnnnnnnnnnnnnnnnnnnnnnnnnnnnnnnnnnnnnnnnnnnnnnnnnnnnnnnnnnnnnnnnnnnnnnnnnnnnnnnnnnnnnnnnnnnnnnnnnnnnnnnnnnnnnnnnnnnnnnnnnnnnnnnnnnnnnnnnnnnnnnnnnnnnnnnnnnnnnnnnnnnnnnnnnnnnnnnnnnnnnnnnnnnnnnnnnnnnnnnnnnnnnnnnnnnnnnnnnnnnnnnnnnnnnnnnnnnnnnnnnnnnnnnnnnnnnnnnnnnnnnnnnnnnnnnnnnnnnnnnnnnnnnnnnnnnnnnnnnnnnnnnnnnnnnnnnnnnnnnnnnnnnnnnnnnnnnnnnnnnnnnnnnnnnnnnnnnnnnnnnnnnnnnnnnnnnnnnnnnnnnnnnnnnnnnnnnnnnnnnnnnnnnnnnnnnnnnnnnnnnnnnnnnnnnnnnnnnnnnnnnnnnnnnnnnnnnnnnnnnnnnnnnnnnnnnnnnnnnnnnnnnnnnnnnnnnnnnnnnnnnnnnnnnnnnnnnnnnnnnnnnnnnnnnnnnnnnnnnnnnnnnnnnnnnnnnnnnnnnnnnnnnnnnnnnnnnnnnnnnnnnnnnnnnnnnnnnnnnnnnnnnnnnnnnnnnnnnnnnnnnnnnnnnnnnnnnnnnnnnnnnnnnnnnnnnnnnnnnnnnnnnnnnnnnnnnnnnnnnnnnnnnnnnnnnnnnnnnnnnnnnnnnnnnnnnnnnnnnnnnnnnnnnnnnnnnnnnnnnnnnnnnnnnnnnnnnnnnnnnnnnnnnnnnnnnnnnnnnnnnnnnnnnnnnnnnnnnnnnnnnnnnnnnnnnnnnnnnnnnnnnnnnnnnnnnnnnnnnnnnnnnnnnnnnnnnnnnnnnnnnnnnnnnnnnnnnnnnnnnnnnnnnnnnnnnnnnnnnnnnnnnnnnnnnnnnnnnnnnnnnnnnnnnnnnnnnnnnnnnnnnnnnnnnnnnnnnnnnnnnnnnnnnnnnnnnnnnnnnnnnnnnnnnnnnnnnnnnnnnnnnnnnnnnnnnnnnnnnnnnnnnnnnnnnnnnnnnnnnnnnnnnnnnnnnnnnnnnnnnnnnnnnnnnnnnnnnnnnnnnnnnnnnnnnnnnnnnnnnnnnnnnnnnnnnnnnnnnnnnnnnnnnnnnnnnnnnnnnnnnnnnnnnnnnnnnnnnnnnnnnnnnnnnnnnnnnnnnnnnnnnnnnnnnnnnnnnnnnnnnnnnnnnnnnnnnnnnnnnnnnnnnnnnnnnnnnnnnnnnnnnnnnnnnnnnnnnnnnnnnnnnnnnnnnnnnnnnnnnnnnnnnnnnnnnnnnnnnnnnnnnnnnnnnnnnnnnnnnnnnnnnnnnnnnnnnnnnnnnnnnnnnnnnnnnnnnnnnnnnnnnnnnnnnnnnnnnnnnnnnnnnnnnnnnnnnnnnnnnnnnnnnnnnnnnnnnnnnnnnnnnnnnnnnnnnnnnnnnnnnnnnnnnnnnnnnnnnnnnnnnnnnnnnnnnnnnnnnnnnnnnnnnnnnnnnnnnnnnnnnnnnnnnnnnnnnnnnnnnnnnnnnnnnnnnnnnnnnnnnnnnnnnnnnnnnnnnnnnnnnnnnnnnnnnnnnnnnnnnnnnnnnnnnnnnnnnnnnnnnnnnnnnnnnnnnnnnnnnnnnnnnnnnnnnnnnnnnnnnnnnnnnnnnnnnnnnnnnnnnnnnnnnnnnnnnnnnnnnnnnnnnnnnnnnnnnnnnnnnnnnnnnnnnnnnnnnnnnnnnnnnnnnnnnnnnnnnnnnnnnnnnnnnnnnnnnnnnnnnnnnnnnnnnnnnnnnnnnnnnnnnnnnnnnnnnnnnnnnnnnnnnnnnnnnnnnnnnnnnnnnnnnnnnnnnnnnnnnnnnnnnnnnnnnnnnnnnnnnnnnnnnnnnnnnnnnnnnnnnnnnnnnnnnnnnnnnnnnnnnnnnnnnnnnnnnnnnnnnnnnnnnnnnnnnnnnnnnnnnnnnnnnnnnnnnnnnnnnnnnnnnnnnnnnnnnnnnnnnnnnnnnnnnnnnnnnnnnnnnnnnnnnnnnnnnnnnnnnnnnnnnnnnnnnnnnnnnnnnnnnnnnnnnnnnnnnnnnnnnnnnnnnnnnnnnnnnnnnnnnnnnnnnnnnnnnnnnnnnnnnnnnnnnnnnnnnnnnnnnnnnnnnnnnnnnnnnnnnnnnnnnnnnnnnnnnnnnnnnnnnnnnnnnnnnnnnnnnnnnnnnnnnnnnnnnnnnnnnnnnnnnnnnnnnnnnnnnnnnnnnnnnnnnnnnnnnnnnnnnnnnnnnnnnnnnnnnnnnnnnnnnnnnnnnnnnnnnnnnnnnnnnnnnnnnnnnnnnnnnnnnnnnnnnnnnnnnnnnnnnnnnnnnnnnnnnnnnnnnnnnnnnnnnnnnnnnnnnnnnnnnnnnnnnnnnnnnnnnnnnnnnnnnnnnnnnnnnnnnnnnnnnnnnnnnnnnnnnnnnnnnnnnnnnnnnnnnnnnnnnnnnnnnnnnnnnnnnnnnnnnnnnnnnnnnnnnnnnnnnnnnnnnnnnnnnnnnnnnnnnnnnnnnnnnnnnnnnnnnnnnnnnnnnnnnnnnnnnnnnnnnnnnnnnnnnnnnnnnnnnnnnnnnnnnnnnnnnnnnnnnnnnnnnnnnnnnnnnnnnnnnnnnnnnnnnnnnnnnnnnnnnnnnnnnnnnnnnnnnnnnnnnnnnnnnnnnnnnnnnnnnnnnnnnnnnnnnnnnnnnnnnnnnnnnnnnnnnnnnnnnnnnnnnnnnnnnnnnnnnnnnnnnnnnnnnnnnnnnnnnnnnnnnnnnnnnnnnnnnnnnnnnnnnnnnnnnnnnnnnnnnnnnnnnnnnnnnnnnnnnnnnnnnnnnnnnnnnnnnnnnnnnnnnnnnnnnnnnnnnnnnnnnnnnnnnnnnnnnnnnnnnnnnnnnnnnnnnnnnnnnnnnnnnnnnnnnnnnnnnnnnnnnnnnnnnnnnnnnnnnnnnnnnnnnnnnnnnnnnnnnnnnnnnnnnnnnnnnnnnnnnnnnnnnnnnnnnnnnnnnnnnnnnnnnnnnnnnnnnnnnnnnnnnnnnnnnnnnnnnnnnnnnnnnnnnnnnnnnnnnnnnnnnnnnnnnnnnnnnnnnnnnnnnnnnnnnnnnnnnnnnnnnnnnnnnnnnnnnnnnnnnnnnnnnnnnnnnnnnnnnnnnnnnnnnnnnnnnnnnnnnnnnnnnnnnnnnnnnnnnnnnnnnnnnnnnnnnnnnnnnnnnnnnnnnnnnnnnnnnnnnnnnnnnnnnnnnnnnnnnnnnnnnnnnnnnnnnnnnnnnnnnnnnnnnnnnnnnnnnnnnnnnnnnnnnnnnnnnnnnnnnnnnnnnnnnnnnnnnnnnnnnnnnnnnnnnnnnnnnnnnnnnnnnnnnnnnnnnnnnnnnnnnnnnnnnnnnnnnnnnnnnnnnnnnnnnnnnnnnnnnnnnnnnnnnnnnnnnnnnnnnnnnnnnnnnnnnnnnnnnnnnnnnnnnnnnnnnnnnnnnnnnnnnnnnnnnnnnnnnnnnnnnnnnnnnnnnnnnnnnnnnnnnnnnnnnnnnnnnnnnnnnnnnnnnnnnnnnnnnnnnnnnnnnnnnnnnnnnnnnnnnnnnnnnnnnnnnnnnnnnnnnnnnnnnnnnnnnnnnnnnnnnnnnnnnnnnnnnnnnnnnnnnnnnnnnnnnnnnnnnnnnnnnnnnnnnnnnnnnnnnnnnnnnnnnnnnnnnnnnnnnnnnnnnnnnnnnnnnnnnnnnnnnnnnnnnnnnnnnnnnnnnnnnnnnnnnnnnnnnnnnnnnnnnnnnnnnnnnnnnnnnnnnnnnnnnnnnnnnnnnnnnnnnnnnnnnnnnnnnnnnnnnnnnnnnnnnnnnnnnnnnnnnnnnnnnnnnnnnnnnnnnnnnnnnnnnnnnnnnnnnnnnnnnnnnnnnnnnnnnnnnnnnnnnnnnnnnnnnnnnnnnnnnnnnnnnnnnnnnnnnnnnnnnnnnnnnnnnnnnnnnnnnnnnnnnnnnnnnnnnnnnnnnnnnnnnnnnnnnnnnnnnnnnnnnnnnnnnnnnnnnnnnnnnnnnnnnnnnnnnnnnnnnnnnnnnnnnnnnnnnnnnnnnnnnnnnnnnnnnnnnnnnnnnnnnnnnnnnnnnnnnnnnnnnnnnnnnnnnnnnnnnnnnnnnnnnnnnnnnnnnnnnnnnnnnnnnnnnnnnnnnnnnnnnnnnnnnnnnnnnnnnnnnnnnnnnnnnnnnnnnnnnnnnnnnnnnnnnnnnnnnnnnnnnnnnnnnnnnnnnnnnnnnnnnnnnnnnnnnnnnnnnnnnnnnnnnnnnnnnnnnnnnnnnnnnnnnnnnnnnnnnnnnnnnnnnnnnnnnnnnnnnnnnnnnnnnnnnnnnnnnnnnnnnnnnnnnnnnnnnnnnnnnnnnnnnnnnnnnnnnnnnnnnnnnnnnnnnnnnnnnnnnnnnnnnnnnnnnnnnnnnnnnnnnnnnnnnnnnnnnnnnnnnnnnnnnnnnnnnnnnnnnnnnnnnnnnnnnnnnnnnnnnnnnnnnnnnnnnnnnnnnnnnnnnnnnnnnnnnnnnnnnnnnnnnnnnnnnnnnnnnnnnnnnnnnnnnnnnnnnnnnnnnnnnnnnnnnnnnnnnnnnnnnnnnnnnnnnnnnnnnnnnnnnnnnnnnnnnnnnnnnnnnnnnnnnnnnnnnnnnnnnnnnnnnnnnnnnnnnnnnnnnnnnnnnnnnnnnnnnnnnnnnnnnnnnnnnnnnnnnnnnnnnnnnnnnnnnnnnnnnnnnnnnnnnnnnnnnnnnnnnnnnnnnnnnnnnnnnnnnnnnnnnnnnnnnnnnnnnnnnnnnnnnnnnnnnnnnnnnnnnnnnnnnnnnnnnnnnnnnnnnnnnnnnnnnnnnnnnnnnnnnnnnnnnnnnnnnnnnnnnnnnnnnnnnnnnnnnnnnnnnnnnnnnnnnnnnnnnnnnnnnnnnnnnnnnnnnnnnnnnnnnnnnnnnnnnnnnnnnnnnnnnnnnnnnnnnnnnnnnnnnnnnnnnnnnnnnnnnnnnnnnnnnnnnnnnnnnnnnnnnnnnnnnnnnnnnnnnnnnnnnnnnnnnnnnnnnnnnnnnnnnnnnnnnnnnnnnnnnnnnnnnnnnnnnnnnnnnnnnnnnnnnnnnnnnnnnnnnnnnnnnnnnnnnnnnnnnnnnnnnnnnnnnnnnnnnnnnnnnnnnnnnnnnnnnnnnnnnnnnnnnnnnnnnnnnnnnnnnnnnnnnnnnnnnnnnnnnnnnnnnnnnnnnnnnnnnnnnnnnnnnnnnnnnnnnnnnnnnnnnnnnnnnnnnnnnnnnnnnnnnnnnnnnnnnnnnnnnnnnnnnnnnnnnnnnnnnnnnnnnnnnnnnnnnnnnnnnnnnnnnnnnnnnnnnnnnnnnnnnnnnnnnnnnnnnnnnnnnnnnnnnnnnnnnnnnnnnnnnnnnnnnnnnnnnnnnnnnnnnnnnnnnnnnnnnnnnnnnnnnnnnnnnnnnnnnnnnnnnnnnnnnnnnnnnnnnnnnnnnnnnnnnnnnnnnnnnnnnnnnnnnnnnnnnnnnnnnnnnnnnnnnnnnnnnnnnnnnnnnnnnnnnnnnnnnnnnnnnnnnnnnnnnnnnnnnnnnnnnnnnnnnnnnnnnnnnnnnnnnnnnnnnnnnnnnnnnnnnnnnnnnnnnnnnnnnnnnnnnnnnnnnnnnnnnnnnnnnnnnnnnnnnnnnnnnnnnnnnnnnnnnnnnnnnnnnnnnnnnnnnnnnnnnnnnnnnnnnnnnnnnnnnnnnnnnnnnnnnnnnnnnnnnnnnnnnnnnnnnnnnnnnnnnnnnnnnnnnnnnnnnnnnnnnnnnnnnnnnnnnnnnnnnnnnnnnnnnnnnnnnnnnnnnnnnnnnnnnnnnnnnnnnnnnnnnnnnnnnnnnnnnnnnnnnnnnnnnnnnnnnnnnnnnnnnnnnnnnnnnnnnnnnnnnnnnnnnnnnnnnnnnnnnnnnnnnnnnnnnnnnnnnnnnnnnnnnnnnnnnnnnnnnnnnnnnnnnnnnnnnnnnnnnnnnnnnnnnnnnnnnnnnnnnnnnnnnnnnnnnnnnnnnnnnnnnnnnnnnnnnnnnnnnnnnnnnnnnnnnnnnnnnnnnnnnnnnnnnnnnnnnnnnnnnnnnnnnnnnnnnnnnnnnnnnnnnnnnnnnnnnnnnnnnnnnnnnnnnnnnnnnnnnnnnnnnnnnnnnnnnnnnnnnnnnnnnnnnnnnnnnnnnnnnnnnnnnnnnnnnnnnnnnnnnnnnnnnnnnnnnnnnnnnnnnnnnnnnnnnnnnnnnnnnnnnnnnnnnnnnnnnnnnnnnnnnnnnnnnnnnnnnnnnnnnnnnnnnnnnnnnnnnnnnnnnnnnnnnnnnnnnnnnnnnnnnnnnnnnnnnnnnnnnnnnnnnnnnnnnnnnnnnnnnnnnnnnnnnnnnnnnnnnnnnnnnnnnnnnnnnnnnnnnnnnnnnnnnnnnnnnnnnnnnnnnnnnnnnnnnnnnnnnnnnnnnnnnnnnnnnnnnnnnnnnnnnnnnnnnnnnnnnnnnnnnnnnnnnnnnnnnnnnnnnnnnnnnnnnnnnnnnnnnnnnnnnnnnnnnnnnnnnnnnnnnnnnnnnnnnnnnnnnnnnnnnnnnnnnnnnnnnnnnnnnnnnnnnnnnnnnnnnnnnnnnnnnnnnnnnnnnnnnnnnnnnnnnnnnnnnnnnnnnnnnnnnnnnnnnnnnnnnnnnnnnnnnnnnnnnnnnnnnnnnnnnnnnnnnnnnnnnnnnnnnnnnnnnnnnnnnnnnnnnnnnnnnnnnnnnnnnnnnnnnnnnnnnnnnnnnnnnnnnnnnnnnnnnnnnnnnnnnnnnnnnnnnnnnnnnnnnnnnnnnnnnnnnnnnnnnnnnnnnnnnnnnnnnnnnnnnnnnnnnnnnnnnnnnnnnnnnnnnnnnnnnnnnnnnnnnnnnnnnnnnnnnnnnnnnnnnnnnnnnnnnnnnnnnnnnnnnnnnnnnnnnnnnnnnnnnnnnnnnnnnnnnnnnnnnnnnnnnnnnnnnnnnnnnnnnnnnnnnnnnnnnnnnnnnnnnnnnnnnnnnnnnnnnnnnnnnnnnnnnnnnnnnnnnnnnnnnnnnnnnnnnnnnnnnnnnnnnnnnnnnnnnnnnnnnnnnnnnnnnnnnnnnnnnnnnnnnnnnnnnnnnnnnnnnnnnnnnnnnnnnnnnnnnnnnnnnnnnnnnnnnnnnnnnnnnnnnnnnnnnnnnnnnnnnnnnnnnnnnnnnnnnnnnnnnnnnnnnnnnnnnnnnnnnnnnnnnnnnnnnnnnnnnnnnnnnnnnnnnnnnnnnnnnnnnnnnnnnnnnnnnnnnnnnnnnnnnnnnnnnnnnnnnnnnnnnnnnnnnnnnnnnnnnnnnnnnnnnnnnnnnnnnnnnnnnnnnnnnnnnnnnnnnnnnnnnnnnnnnnnnnnnnnnnnnnnnnnnnnnnnnnnnnnnnnnnnnnnnnnnnnnnnnnnnnnnnnnnnnnnnnnnnnnnnnnnnnnnnnnnnnnnnnnnnnnnnnnnnnnnnnnnnnnnnnnnnnnnnnnnnnnnnnnnnnnnnnnnnnnnnnnnnnnnnnnnnnnnnnnnnnnnnnnnnnnnnnnnnnnnnnnnnnnnnnnnnnnnnnnnnnnnnnnnnnnnnnnnnnnnnnnnnnnnnnnnnnnnnnnnnnnnnnnnnnnnnnnnnnnnnnnnnnnnnnnnnnnnnnnnnnnnnnnnnnnnnnnnnnnnnnnnnnnnnnnnnnnnnnnnnnnnnnnnnnnnnnnnnnnnnnnnnnnnnnnnnnnnnnnnnnnnnnnnnnnnnnnnnnnnnnnnnnnnnnnnnnnnnnnnnnnnnnnnnnnnnnnnnnnnnnnnnnnnnnnnnnnnnnnnnnnnnnnnnnnnnnnnnnnnnnnnnnnnnnnnnnnnnnnnnnnnnnnnnnnnnnnnnnnnnnnnnnnnnnnnnnnnnnnnnnnnnnnnnnnnnnnnnnnnnnnnnnnnnnnnnnnnnnnnnnnnnnnnnnnnnnnnnnnnnnnnnnnnnnnnnnnnnnnnnnnnnnnnnnnnnnnnnnnnnnnnnnnnnnnnnnnnnnnnnnnnnnnnnnnnnnnnnnnnnnnnnnnnnnnnnnnnnnnnnnnnnnnnnnnnnnnnnnnnnnnnnnnnnnnnnnnnnnnnnnnnnnnnnnnnnnnnnnnnnnnnnnnnnnnnnnnnnnnnnnnnnnnnnnnnnnnnnnnnnnnnnnnnnnnnnnnnnnnnnnnnnnnnnnnnnnnnnnnnnnnnnnnnnnnnnnnnnnnnnnnnnnnnnnnnnnnnnnnnnnnnnnnnnnnnnnnnnnnnnnnnnnnnnnnnnnnnnnnnnnnnnnnnnnnnnnnnnnnnnnnnnnnnnnnnnnnnnnnnnnnnnnnnnnnnnnnnnnnnnnnnnnnnnnnnnnnnnnnnnnnnnnnnnnnnnnnnnnnnnnnnnnnnnnnnnnnnnnnnnnnnnnnnnnnnnnnnnnnnnnnnnnnnnnnnnnnnnnnnnnnnnnnnnnnnnnnnnnnnnnnnnnnnnnnnnnnnnnnnnnnnnnnnnnnnnnnnnnnnnnnnnnnnnnnnnnnnnnnnnnnnnnnnnnnnnnnnnnnnnnnnnnnnnnnnnnnnnnnnnnnnnnnnnnnnnnnnnnnnnnnnnnnnnnnnnnnnnnnnnnnnnnnnnnnnnnnnnnnnnnnnnnnnnnnnnnnnnnnnnnnnnnnnnnnnnnnnnnnnnnnnnnnnnnnnnnnnnnnnnnnnnnnnnnnnnnnnnnnnnnnnnnnnnnnnnnnnnnnnnnnnnnnnnnnnnnnnnnnnnnnnnnnnnnnnnnnnnnnnnnnnnnnnnnnnnnnnnnnnnnnnnnnnnnnnnnnnnnnnnnnnnnnnnnnnnnnnnnnnnnnnnnnnnnnnnnnnnnnnnnnnnnnnnnnnnnnnnnnnnnnnnnnnnnnnnnnnnnnnnnnnnnnnnnnnnnnnnnnnnnnnnnnnnnnnnnnnnnnnnnnnnnnnnnnnnnnnnnnnnnnnnnnnnnnnnnnnnnnnnnnnnnnnnnnnnnnnnnnnnnnnnnnnnnnnnnnnnnnnnnnnnnnnnnnnnnnnnnnnnnnnnnnnnnnnnnnnnnnnnnnnnnnnnnnnnnnnnnnnnnnnnnnnnnnnnnnnnnnnnnnnnnnnnnnnnnnnnnnnnnnnnnnnnnnnnnnnnnnnnnnnnnnnnnnnnnnnnnnnnnnnnnnnnnnnnnnnnnnnnnnnnnnnnnnnnnnnnnnnnnnnnnnnnnnnnnnnnnnnnnnnnnnnnnnnnnnnnnnnnnnnnnnnnnnnnnnnnnnnnnnnnnnnnnnnnnnnnnnnnnnnnnnnnnnnnnnnnnnnnnnnnnnnnnnnnnnnnnnnnnnnnnnnnnnnnnnnnnnnnnnnnnnnnnnnnnnnnnnnnnnnnnnnnnnnnnnnnnnnnnnnnnnnnnnnnnnnnnnnnnnnnnnnnnnnnnnnnnnnnnnnnnnnnnnnnnnnnnnnnnnnnnnnnnnnnnnnnnnnnnnnnnnnnnnnnnnnnnnnnnnnnnnnnnnnnnnnnnnnnnnnnnnnnnnnnnnnnnnnnnnnnnnnnnnnnnnnnnnnnnnnnnnnnnnnnnnnnnnnnnnnnnnnnnnnnnnnnnnnnnnnnnnnnnnnnnnnnnnnnnnnnnnnnnnnnnnnnnnnnnnnnnnnnnnnnnnnnnnnnnnnnnnnnnnnnnnnnnnnnnnnnnnnnnnnnnnnnnnnnnnnnnnnnnnnnnnnnnnnnnnnnnnnnnnnnnnnnnnnnnnnnnnnnnnnnnnnnnnnnnnnnnnnnnnnnnnnnnnnnnnnnnnnnnnnnnnnnnnnnnnnnnnnnnnnnnnnnnnnnnnnnnnnnnnnnnnnnnnnnnnnnnnnnnnnnnnnnnnnnnnnnnnnnnnnnnnnnnnnnnnnnnnnnnnnnnnnnnnnnnnnnnnnnnnnnnnnnnnnnnnnnnnnnnnnnnnnnnnnnnnnnnnnnnnnnnnnnnnnnnnnnnnnnnnnnnnnnnnnnnnnnnnnnnnnnnnnnnnnnnnnnnnnnnnnnnnnnnnnnnnnnnnnnnnnnnnnnnnnnnnnnnnnnnnnnnnnnnnnnnnnnnnnnnnnnnnnnnnnnnnnnnnnnnnnnnnnnnnnnnnnnnnnnnnnnnnnnnnnnnnnnnnnnnnnnnnnnnnnnnnnnnnnnnnnnnnnnnnnnnnnnnnnnnnnnnnnnnnnnnnnnnnnnnnnnnnnnnnnnnnnnnnnnnnnnnnnnnnnnnnnnnnnnnnnnnnnnnnnnnnnnnnnnnnnnnnnnnnnnnnnnnnnnnnnnnnnnnnnnnnnnnnnnnnnnnnnnnnnnnnnnnnnnnnnnnnnnnnnnnnnnnnnnnnnnnnnnnnnnnnnnnnnnnnnnnnnnnnnnnnnnnnnnnnnnnnnnnnnnnnnnnnnnnnnnnnnnnnnnnnnnnnnnnnnnnnnnnnnnnnnnnnnnnnnnnnnnnnnnnnnnnnnnnnnnnnnnnnnnnnnnnnnnnnnnnnnnnnnnnnnnnnnnnnnnnnnnnnnnnnnnnnnnnnnnnnnnnnnnnnnnnnnnnnnnnnnnnnnnnnnnnnnnnnnnnnnnnnnnnnnnnnnnnnnnnnnnnnnnnnnnnnnnnnnnnnnnnnnnnnnnnnnnnnnnnnnnnnnnnnnnnnnnnnnnnnnnnnnnnnnnnnnnnnnnnnnnnnnnnnnnnnnnnnnnnnnnnnnnnnnnnnnnnnnnnnnnnnnnnnnnnnnnnnnnnnnnnnnnnnnnnnnnnnnnnnnnnnnnnnnnnnnnnnnnnnnnnnnnnnnnnnnnnnnnnnnnnnnnnnnnnnnnnnnnnnnnnnnnnnnnnnnnnnnnnnnnnnnnnnnnnnnnnnnnnnnnnnnnnnnnnnnnnnnnnnnnnnnnnnnnnnnnnnnnnnnnnnnnnnnnnnnnnnnnnnnnnnnnnnnnnnnnnnnnnnnnnnnnnnnnnnnnnnnnnnnnnnnnnnnnnnnnnnnnnnnnnnnnnnnnnnnnnnnnnnnnnnnnnnnnnnnnnnnnnnnnnnnnnnnnnnnnnnnnnnnnnnnnnnnnnnnnnnnnnnnnnnnnnnnnnnnnnnnnnnnnnnnnnnnnnnnnnnnnnnnnnnnnnnnnnnnnnnnnnnnnnnnnnnnnnnnnnnnnnnnnnnnnnnnnnnnnnnnnnnnnnnnnnnnnnnnnnnnnnnnnnnnnnnnnnnnnnnnnnnnnnnnnnnnnnnnnnnnnnnnnnnnnnnnnnnnnnnnnnnnnnnnnnnnnnnnnnnnnnnnnnnnnnnnnnnnnnnnnnnnnnnnnnnnnnnnnnnnnnnnnnnnnnnnnnnnnnnnnnnnnnnnnnnnnnnnnnnnnnnnnnnnnnnnnnnnnnnnnnnnnnnnnnnnnnnnnnnnnnnnnnnnnnnnnnnnnnnnnnnnnnnnnnnnnnnnnnnnnnnnnnnnnnnnnnnnnnnnnnnnnnnnnnnnnnnnnnnnnnnnnnnnnnnnnnnnnnnnnnnnnnnnnnnnnnnnnnnnnnnnnnnnnnnnnnnnnnnnnnnnnnnnnnnnnnnnnnnnnnnnnnnnnnnnnnnnnnnnnnnnnnnnnnnnnnnnnnnnnnnnnnnnnnnnnnnnnnnnnnnnnnnnnnnnnnnnnnnnnnnnnnnnnnnnnnnnnnnnnnnnnnnnnnnnnnnnnnnnnnnnnnnnnnnnnnnnnnnnnnnnnnnnnnnnnnnnnnnnnnnnnnnnnnnnnnnnnnnnnnnnnnnnnnnnnnnnnnnnnnnnnnnnnnnnnnnnnnnnnnnnnnnnnnnnnnnnnnnnnnnnnnnnnnnnnnnnnnnnnnnnnnnnnnnnnnnnnnnnnnnnnnnnnnnnnnnnnnnnnnnnnnnnnnnnnnnnnnnnnnnnnnnnnnnnnnnnnnnnnnnnnnnnnnnnnnnnnnnnnnnnnnnnnnnnnnnnnnnnnnnnnnnnnnnnnnnnnnnnnnnnnnnnnnnnnnnnnnnnnnnnnnnnnnnnnnnnnnnnnnnnnnnnnnnnnnnnnnnnnnnnnnnnnnnnnnnnnnnnnnnnnnnnnnnnnnnnnnnnnnnnnnnnnnnnnnnnnnnnnnnnnnnnnnnnnnnnnnnnnnnnnnnnnnnnnnnnnnnnnnnnnnnnnnnnnnnnnnnnnnnnnnnnnnnnnnnnnnnnnnnnnnnnnnnnnnnnnnnnnnnnnnnnnnnnnnnnnnnnnnnnnnnnnnnnnnnnnnnnnnnnnnnnnnnnnnnnnnnnnnnnnnnnnnnnnnnnnnnnnnnnnnnnnnnnnnnnnnnnnnnnnnnnnnnnnnnnnnnnnnnnnnnnnnnnnnnnnnnnnnnnnnnnnnnnnnnnnnnnnnnnnnnnnnnnnnnnnnnnnnnnnnnnnnnnnnnnnnnnnnnnnnnnnnnnnnnnnnnnnnnnnnnnnnnnnnnnnnnnnnnnnnnnnnnnnnnnnnnnnnnnnnnnnnnnnnnnnnnnnnnnnnnnnnnnnnnnnnnnnnnnnnnnnnnnnnnnnnnnnnnnnnnnnnnnnnnnnnnnnnnnnnnnnnnnnnnnnnnnnnnnnnnnnnnnnnnnnnnnnnnnnnnnnnnnnnnnnnnnnnnnnnnnnnnnnnnnnnnnnnnnnnnnnnnnnnnnnnnnnnnnnnnnnnnnnnnnnnnnnnnnnnnnnnnnnnnnnnnnnnnnnnnnnnnnnnnnnnnnnnnnnnnnnnnnnnnnnnnnnnnnnnnnnnnnnnnnnnnnnnnnnnnnnnnnnnnnnnnnnnnnnnnnnnnnnnnnnnnnnnnnnnnnnnnnnnnnnnnnnnnnnnnnnnnnnnnnnnnnnnnnnnnnnnnnnnnnnnnnnnnnnnnnnnnnnnnnnnnnnnnnnnnnnnnnnnnnnnnnnnnnnnnnnnnnnnnnnnnnnnnnnnnnnnnnnnnnnnnnnnnnnnnnnnnnnnnnnnnnnnnnnnnnnnnnnnnnnnnnnnnnnnnnnnnnnnnnnnnnnnnnnnnnnnnnnnnnnnnnnnnnnnnnnnnnnnnnnnnnnnnnnnnnnnnnnnnnnnnnnnnnnnnnnnnnnnnnnnnnnnnnnnnnnnnnnnnnnnnnnnnnnnnnnnnnnnnnnnnnnnnnnnnnnnnnnnnnnnnnnnnnnnnnnnnnnnnnnnnnnnnnnnnnnnnnnnnnnnnnnnnnnnnnnnnnnnnnnnnnnnnnnnnnnnnnnnnnnnnnnnnnnnnnnnnnnnnnnnnnnnnnnnnnnnnnnnnnnnnnnnnnnnnnnnnnnnnnnnnnnnnnnnnnnnnnnnnnnnnnnnnnnnnnnnnnnnnnnnnnnnnnnnnnnnnnnnnnnnnnnnnnnnnnnnnnnnnnnnnnnnnnnnnnnnnnnnnnnnnnnnnnnnnnnnnnnnnnnnnnnnnnnnnnnnnnnnnnnnnnnnnnnnnnnnnnnnnnnnnnnnnnnnnnnnnnnnnnnnnnnnnnnnnnnnnnnnnnnnnnnnnnnnnnnnnnnnnnnnnnnnnnnnnnnnnnnnnnnnnnnnnnnnnnnnnnnnnnnnnnnnnnnnnnnnnnnnnnnnnnnnnnnnnnnnnnnnnnnnnnnnnnnnnnnnnnnnnnnnnnnnnnnnnnnnnnnnnnnnnnnnnnnnnnnnnnnnnnnnnnnnnnnnnnnnnnnnnnnnnnnnnnnnnnnnnnnnnnnnnnnnnnnnnnnnnnnnnnnnnnnnnnnnnnnnnnnnnnnnnnnnnnnnnnnnnnnnnnnnnnnnnnnnnnnnnnnnnnnnnnnnnnnnnnnnnnnnnnnnnnnnnnnnnnnnnnnnnnnnnnnnnnnnnnnnnnnnnnnnnnnnnnnnnnnnnnnnnnnnnnnnnnnnnnnnnnnnnnnnnnnnnnnnnnnnnnnnnnnnnnnnnnnnnnnnnnnnnnnnnnnnnnnnnnnnnnnnnnnnnnnnnnnnnnnnnnnnnnnnnnnnnnnnnnnnnnnnnnnnnnnnnnnnnnnnnnnnnnnnnnnnnnnnnnnnnnnnnnnnnnnnnnnnnnnnnnnnnnnnnnnnnnnnnnnnnnnnnnnnnnnnnnnnnnnnnnnnnnnnnnnnnnnnnnnnnnnnnnnnnnnnnnnnnnnnnnnnnnnnnnnnnnnnnnnnnnnnnnnnnnnnnnnnnnnnnnnnnnnnnnnnnnnnnnnnnnnnnnnnnnnnnnnnnnnnnnnnnnnnnnnnnnnnnnnnnnnnnnnnnnnnnnnnnnnnnnnnnnnnnnnnnnnnnnnnnnnnnnnnnnnnnnnnnnnnnnnnnnnnnnnnnnnnnnnnnnnnnnnnnnnnnnnnnnnnnnnnnnnnnnnnnnnnnnnnnnnnnnnnnnnnnnnnnnnnnnnnnnnnnnnnnnnnnnnnnnnnnnnnnnnnnnnnnnnnnnnnnnnnnnnnnnnnnnnnnnnnnnnnnnnnnnnnnnnnnnnnnnnnnnnnnnnnnnnnnnnnnnnnnnnnnnnnnnnnnnnnnnnnnnnnnnnnnnnnnnnnnnnnnnnnnnnnnnnnnnnnnnnnnnnnnnnnnnnnnnnnnnnnnnnnnnnnnnnnnnnnnnnnnnnnnnnnnnnnnnnnnnnnnnnnnnnnnnnnnnnnnnnnnnnnnnnnnnnnnnnnnnnnnnnnnnnnnnnnnnnnnnnnnnnnnnnnnnnnnnnnnnnnnnnnnnnnnnnnnnnnnnnnnnnnnnnnnnnnnnnnnnnnnnnnnnnnnnnnnnnnnnnnnnnnnnnnnnnnnnnnnnnnnnnnnnnnnnnnnnnnnnnnnnnnnnnnnnnnnnnnnnnnnnnnnnnnnnnnnnnnnnnnnnnnnnnnnnnnnnnnnnnnnnnnnnnnnnnnnnnnnnnnnnnnnnnnnnnnnnnnnnnnnnnnnnnnnnnnnnnnnnnnnnnnnnnnnnnnnnnnnnnnnnnnnnnnnnnnnnnnnnnnnnnnnnnnnnnnnnnnnnnnnnnnnnnnnnnnnnnnnnnnnnnnnnnnnnnnnnnnnnnnnnnnnnnnnnnnnnnnnnnnnnnnnnnnnnnnnnnnnnnnnnnnnnnnnnnnnnnnnnnnnnnnnnnnnnnnnnnnnnnnnnnnnnnnnnnnnnnnnnnnnnnnnnnnnnnnnnnnnnnnnnnnnnnnnnnnnnnnnnnnnnnnnnnnnnnnnnnnnnnnnnnnnnnnnnnnnnnnnnnnnnnnnnnnnnnnnnnnnnnnnnnnnnnnnnnnnnnnnnnnnnnnnnnnnnnnnnnnnnnnnnnnnnnnnnnnnnnnnnnnnnnnnnnnnnnnnnnnnnnnnnnnnnnnnnnnnnnnnnnnnnnnnnnnnnnnnnnnnnnnnnnnnnnnnnnnnnnnnnnnnnnnnnnnnnnnnnnnnnnnnnnnnnnnnnnnnnnnnnnnnnnnnnnnnnnnnnnnnnnnnnnnnnnnnnnnnnnnnnnnnnnnnnnnnnnnnnnnnnnnnnnnnnnnnnnnnnnnnnnnnnnnnnnnnnnnnnnnnnnnnnnnnnnnnnnnnnnnnnnnnnnnnnnnnnnnnnnnnnnnnnnnnnnnnnnnnnnnnnnnnnnnnnnnnnnnnnnnnnnnnnnnnnnnnnnnnnnnnnnnnnnnnnnnnnnnnnnnnnnnnnnnnnnnnnnnnnnnnnnnnnnnnnnnnnnnnnnnnnnnnnnnnnnnnnnnnnnnnnnnnnnnnnnnnnnnnnnnnnnnnnnnnnnnnnnnnnnnnnnnnnnnnnnnnnnnnnnnnnnnnnnnnnnnnnnnnnnnnnnnnnnnnnnnnnnnnnnnnnnnnnnnnnnnnnnnnnnnnnnnnnnnnnnnnnnnnnnnnnnnnnnnnnnnnnnnnnnnnnnnnnnnnnnnnnnnnnnnnnnnnnnnnnnnnnnnnnnnnnnnnnnnnnnnnnnnnnnnnnnnnnnnnnnnnnnnnnnnnnnnnnnnnnnnnnnnnnnnnnnnnnnnnnnnnnnnnnnnnnnnnnnnnnnnnnnnnnnnnnnnnnnnnnnnnnnnnnnnnnnnnnnnnnnnnnnnnnnnnnnnnnnnnnnnnnnnnnnnnnnnnnnnnnnnnnnnnnnnnnnnnnnnnnnnnnnnnnnnnnnnnnnnnnnnnnnnnnnnnnnnnnnnnnnnnnnnnnnnnnnnnnnnnnnnnnnnnnnnnnnnnnnnnnnnnnnnnnnnnnnnnnnnnnnnnnnnnnnnnnnnnnnnnnnnnnnnnnnnnnnnnnnnnnnnnnnnnnnnnnnnnnnnnnnnnnnnnnnnnnnnnnnnnnnnnnnnnnnnnnnnnnnnnnnnnnnnnnnnnnnnnnnnnnnnnnnnnnnnnnnnnnnnnnnnnnnnnnnnnnnnnnnnnnnnnnnnnnnnnnnnnnnnnnnnnnnnnnnnnnnnnnnnnnnnnnnnnnnnnnnnnnnnnnnnnnnnnnnnnnnnnnnnnnnnnnnnnnnnnnnnnnnnnnnnnnnnnnnnnnnnnnnnnnnnnnnnnnnnnnnnnnnnnnnnnnnnnnnnnnnnnnnnnnnnnnnnnnnnnnnnnnnnnnnnnnnnnnnnnnnnnnnnnnnnnnnnnnnnnnnnnnnnnnnnnnnnnnnnnnnnnnnnnnnnnnnnnnnnnnnnnnnnnnnnnnnnnnnnnnnnnnnnnnnnnnnnnnnnnnnnnnnnnnnnnnnnnnnnnnnnnnnnnnnnnnnnnnnnnnnnnnnnnnnnnnnnnnnnnnnnnnnnnnnnnnnnnnnnnnnnnnnnnnnnnnnnnnnnnnnnnnnnnnnnnnnnnnnnnnnnnnnnnnnnnnnnnnnnnnnnnnnnnnnnnnnnnnnnnnnnnnnnnnnnnnnnnnnnnnnnnnnnnnnnnnnnnnnnnnnnnnnnnnnnnnnnnnnnnnnnnnnnnnnnnnnnnnnnnnnnnnnnnnnnnnnnnnnnnnnnnnnnnnnnnnnnnnnnnnnnnnnnnnnnnnnnnnnnnnnnnnnnnnnnnnnnnnnnnnnnnnnnnnnnnnnnnnnnnnnnnnnnnnnnnnnnnnnnnnnnnnnnnnnnnnnnnnnnnnnnnnnnnnnnnnnnnnnnnnnnnnnnnnnnnnnnnnnnnnnnnnnnnnnnnnnnnnnnnnnnnnnnnnnnnnnnnnnnnnnnnnnnnnnnnnnnnnnnnnnnnnnnnnnnnnnnnnnnnnnnnnnnnnnnnnnnnnnnnnnnnnnnnnnnnnnnnnnnnnnnnnnnnnnnnnnnnnnnnnnnnnnnnnnnnnnnnnnnnnnnnnnnnnnnnnnnnnnnnnnnnnnnnnnnnnnnnnnnnnnnnnnnnnnnnnnnnnnnnnnnnnnnnnnnnnnnnnnnnnnnnnnnnnnnnnnnnnnnnnnnnnnnnnnnnnnnnnnnnnnnnnnnnnnnnnnnnnnnnnnnnnnnnnnnnnnnnnnnnnnnnnnnnnnnnnnnnnnnnnnnnnnnnnnnnnnnnnnnnnnnnnnnnnnnnnnnnnnnnnnnnnnnnnnnnnnnnnnnnnnnnnnnnnnnnnnnnnnnnnnnnnnnnnnnnnnnnnnnnnnnnnnnnnnnnnnnnnnnnnnnnnnnnnnnnnnnnnnnnnnnnnnnnnnnnnnnnnnnnnnnnnnnnnnnnnnnnnnnnnnnnnnnnnnnnnnnnnnnnnnnnnnnnnnnnnnnnnnnnnnnnnnnnnnnnnnnnnnnnnnnnnnnnnnnnnnnnnnnnnnnnnnnnnnnnnnnnnnnnnnnnnnnnnnnnnnnnnnnnnnnnnnnnnnnnnnnnnnnnnnnnnnnnnnnnnnnnnnnnnnnnnnnnnnnnnnnnnnnnnnnnnnnnnnnnnnnnnnnnnnnnnnnnnnnnnnnnnnnnnnnnnnnnnnnnnnnnnnnnnnnnnnnnnnnnnnnnnnnnnnnnnnnnnnnnnnnnnnnnnnnnnnnnnnnnnnnnnnnnnnnnnnnnnnnnnnnnnnnnnnnnnnnnnnnnnnnnnnnnnnnnnnnnnnnnnnnnnnnnnnnnnnnnnnnnnnnnnnnnnnnnnnnnnnnnnnnnnnnnnnnnnnnnnnnnnnnnnnnnnnnnnnnnnnnnnnnnnnnnnnnnnnnnnnnnnnnnnnnnnnnnnnnnnnnnnnnnnnnnnnnnnnnnnnnnnnnnnnnnnnnnnnnnnnnnnnnnnnnnnnnnnnnnnnnnnnnnnnnnnnnnnnnnnnnnnnnnnnnnnnnnnnnnnnnnnnnnnnnnnnnnnnnnnnnnnnnnnnnnnnnnnnnnnnnnnnnnnnnnnnnnnnnnnnnnnnnnnnnnnnnnnnnnnnnnnnnnnnnnnnnnnnnnnnnnnnnnnnnnnnnnnnnnnnnnnnnnnnnnnnnnnnnnnnnnnnnnnnnnnnnnnnnnnnnnnnnnnnnnnnnnnnnnnnnnnnnnnnnnnnnnnnnnnnnnnnnnnnnnnnnnnnnnnnnnnnnnnnnnnnnnnnnnnnnnnnnnnnnnnnnnnnnnnnnnnnnnnnnnnnnnnnnnnnnnnnnnnnnnnnnnnnnnnnnnnnnnnnnnnnnnnnnnnnnnnnnnnnnnnnnnnnnnnnnnnnnnnnnnnnnnnnnnnnnnnnnnnnnnnnnnnnnnnnnnnnnnnnnnnnnnnnnnnnnnnnnnnnnnnnnnnnnnnnnnnnnnnnnnnnnnnnnnnnnnnnnnnnnnnnnnnnnnnnnnnnnnnnnnnnnnnnnnnnnnnnnnnnnnnnnnnnnnnnnnnnnnnnnnnnnnnnnnnnnnnnnnnnnnnnnnnnnnnnnnnnnnnnnnnnnnnnnnnnnnnnnnnnnnnnnnnnnnnnnnnnnnnnnnnnnnnnnnnnnnnnnnnnnnnnnnnnnnnnnnnnnnnnnnnnnnnnnnnnnnnnnnnnnnnnnnnnnnnnnnnnnnnnnnnnnnnnnnnnnnnnnnnnnnnnnnnnnnnnnnnnnnnnnnnnnnnnnnnnnnnnnnnnnnnnnnnnnnnnnnnnnnnnnnnnnnnnnnnnnnnnnnnnnnnnnnnnnnnnnnnnnnnnnnnnnnnnnnnnnnnnnnnnnnnnnnnnnnnnnnnnnnnnnnnnnnnnnnnnnnnnnnnnnnnnnnnnnnnnnnnnnnnnnnnnnnnnnnnnnnnnnnnnnnnnnnnnnnnnnnnnnnnnnnnnnnnnnnnnnnnnnnnnnnnnnnnnnnnnnnnnnnnnnnnnnnnnnnnnnnnnnnnnnnnnnnnnnnnnnnnnnnnnnnnnnnnnnnnnnnnnnnnnnnnnnnnnnnnnnnnnnnnnnnnnnnnnnnnnnnnnnnnnnnnnnnnnnnnnnnnnnnnnnnnnnnnnnnnnnnnnnnnnnnnnnnnnnnnnnnnnnnnnnnnnnnnnnnnnnnnnnnnnnnnnnnnnnnnnnnnnnnnnnnnnnnnnnnnnnnnnnnnnnnnnnnnnnnnnnnnnnnnnnnnnnnnnnnnnnnnnnnnnnnnnnnnnnnnnnnnnnnnnnnnnnnnnnnnnnnnnnnnnnnnnnnnnnnnnnnnnnnnnnnnnnnnnnnnnnnnnnnnnnnnnnnnnnnnnnnnnnnnnnnnnnnnnnnnnnnnnnnnnnnnnnnnnnnnnnnnnnnnnnnnnnnnnnnnnnnnnnnnnnnnnnnnnnnnnnnnnnnnnnnnnnnnnnnnnnnnnnnnnnnnnnnnnnnnnnnnnnnnnnnnnnnnnnnnnnnnnnnnnnnnnnnnnnnnnnnnnnnnnnnnnnnnnnnnnnnnnnnnnnnnnnnnnnnnnnnnnnnnnnnnnnnnnnnnnnnnnnnnnnnnnnnnnnnnnnnnnnnnnnnnnnnnnnnnnnnnnnnnnnnnnnnnnnnnnnnnnnnnnnnnnnnnnnnnnnnnnnnnnnnnnnnnnnnnnnnnnnnnnnnnnnnnnnnnnnnnnnnnnnnnnnnnnnnnnnnnnnnnnnnnnnnnnnnnnnnnnnnnnnnnnnnnnnnnnnnnnnnnnnnnnnnnnnnnnnnnnnnnnnnnnnnnnnnnnnnnnnnnnnnnnnnnnnnnnnnnnnnnnnnnnnnnnnnnnnnnnnnnnnnnnnnnnnnnnnnnnnnnnnnnnnnnnnnnnnnnnnnnnnnnnnnnnnnnnnnnnnnnnnnnnnnnnnnnnnnnnnnnnnnnnnnnnnnnnnnnnnnnnnnnnnnnnnnnnnnnnnnnnnnnnnnnnnnnnnnnnnnnnnnnnnnnnnnnnnnnnnnnnnnnnnnnnnnnnnnnnnnnnnnnnnnnnnnnnnnnnnnnnnnnnnnnnnnnnnnnnnnnnnnnnnnnnnnnnnnnnnnnnnnnnnnnnnnnnnnnnnnnnnnnnnnnnnnnnnnnnnnnnnnnnnnnnnnnnnnnnnnnnnnnnnnnnnnnnnnnnnnnnnnnnnnnnnnnnnnnnnnnnnnnnnnnnnnnnnnnnnnnnnnnnnnnnnnnnnnnnnnnnnnnnnnnnnnnnnnnnnnnnnnnnnnnnnnnnnnnnnnnnnnnnnnnnnnnnnnnnnnnnnnnnnnnnnnnnnnnnnnnnnnnnnnnnnnnnnnnnnnnnnnnnnnnnnnnnnnnnnnnnnnnnnnnnnnnnnnnnnnnnnnnnnnnnnnnnnnnnnnnnnnnnnnnnnnnnnnnnnnnnnnnnnnnnnnnnnnnnnnnnnnnnnnnnnnnnnnnnnnnnnnnnnnnnnnnnnnnnnnnnnnnnnnnnnnnnnnnnnnnnnnnnnnnnnnnnnnnnnnnnnnnnnnnnnnnnnnnnnnnnnnnnnnnnnnnnnnnnnnnnnnnnnnnnnnnnnnnnnnnnnnnnnnnnnnnnnnnnnnnnnnnnnnnnnnnnnnnnnnnnnnnnnnnnnnnnnnnnnnnnnnnnnnnnnnnnnnnnnnnnnnnnnnnnnnnnnnnnnnnnnnnnnnnnnnnnnnnnnnnnnnnnnnnnnnnnnnnnnnnnnnnnnnnnnnnnnnnnnnnnnnnnnnnnnnnnnnnnnnnnnnnnnnnnnnnnnnnnnnnnnnnnnnnnnnnnnnnnnnnnnnnnnnnnnnnnnnnnnnnnnnnnnnnnnnnnnnnnnnnnnnnnnnnnnnnnnnnnnnnnnnnnnnnnnnnnnnnnnnnnnnnnnnnnnnnnnnnnnnnnnnnnnnnnnnnnnnnnnnnnnnnnnnnnnnnnnnnnnnnnnnnnnnnnnnnnnnnnnnnnnnnnnnnnnnnnnnnnnnnnnnnnnnnnnnnnnnnnnnnnnnnnnnnnnnnnnnnnnnnnnnnnnnnnnnnnnnnnnnnnnnnnnnnnnnnnnnnnnnnnnnnnnnnnnnnnnnnnnnnnnnnnnnnnnnnnnnnnnnnnnnnnnnnnnnnnnnnnnnnnnnnnnnnnnnnnnnnnnnnnnnnnnnnnnnnnnnnnnnnnnnnnnnnnnnnnnnnnnnnnnnnnnnnnnnnnnnnnnnnnnnnnnnnnnnnnnnnnnnnnnnnnnnnnnnnnnnnnnnnnnnnnnnnnnnnnnnnnnnnnnnnnnnnnnnnnnnnnnnnnnnnnnnnnnnnnnnnnnnnnnnnnnnnnnnnnnnnnnnnnnnnnnnnnnnnnnnnnnnnnnnnnnnnnnnnnnnnnnnnnnnnnnnnnnnnnnnnnnnnnnnnnnnnnnnnnnnnnnnnnnnnnnnnnnnnnnnnnnnnnnnnnnnnnnnnnnnnnnnnnnnnnnnnnnnnnnnnnnnnnnnnnnnnnnnnnnnnnnnnnnnnnnnnnnnnnnnnnnnnnnnnnnnnnnnnnnnnnnnnnnnnnnnnnnnnnnnnnnnnnnnnnnnnnnnnnnnnnnnnnnnnnnnnnnnnnnnnnnnnnnnnnnnnnnnnnnnnnnnnnnnnnnnnnnnnnnnnnnnnnnnnnnnnnnnnnnnnnnnnnnnnnnnnnnnnnnnnnnnnnnnnnnnnnnnnnnnnnnnnnnnnnnnnnnnnnnnnnnnnnnnnnnnnnnnnnnnnnnnnnnnnnnnnnnnnnnnnnnnnnnnnnnnnnnnnnnnnnnnnnnnnnnnnnnnnnnnnnnnnnnnnnnnnnnnnnnnnnnnnnnnnnnnnnnnnnnnnnnnnnnnnnnnnnnnnnnnnnnnnnnnnnnnnnnnnnnnnnnnnnnnnnnnnnnnnnnnnnnnnnnnnnnnnnnnnnnnnnnnnnnnnnnnnnnnnnnnnnnnnnnnnnnnnnnnnnnnnnnnnnnnnnnnnnnnnnnnnnnnnnnnnnnnnnnnnnnnnnnnnnnnnnnnnnnnnnnnnnnnnnnnnnnnnnnnnnnnnnnnnnnnnnnnnnnnnnnnnnnnnnnnnnnnnnnnnnnnnnnnnnnnnnnnnnnnnnnnnnnnnnnnnnnnnnnnnnnnnnnnnnnnnnnnnnnnnnnnnnnnnnnnnnnnnnnnnnnnnnnnnnnnnnnnnnnnnnnnnnnnnnnnnnnnnnnnnnnnnnnnnnnnnnnnnnnnnnnnnnnnnnnnnnnnnnnnnnnnnnnnnnnnnnnnnnnnnnnnnnnnnnnnnnnnnnnnnnnnnnnnnnnnnnnnnnnnnnnnnnnnnnnnnnnnnnnnnnnnnnnnnnnnnnnnnnnnnnnnnnnnnnnnnnnnnnnnnnnnnnnnnnnnnnnnnnnnnnnnnnnnnnnnnnnnnnnnnnnnnnnnnnnnnnnnnnnnnnnnnnnnnnnnnnnnnnnnnnnnnnnnnnnnnnnnnnnnnnnnnnnnnnnnnnnnnnnnnnnnnnnnnnnnnnnnnnnnnnnnnnnnnnnnnnnnnnnnnnnnnnnnnnnnnnnnnnnnnnnnnnnnnnnnnnnnnnnnnnnnnnnnnnnnnnnnnnnnnnnnnnnnnnnnnnnnnnnnnnnnnnnnnnnnnnnnnnnnnnnnnnnnnnnnnnnnnnnnnnnnnnnnnnnnnnnnnnnnnnnnnnnnnnnnnnnnnnnnnnnnnnnnnnnnnnnnnnnnnnnnnnnnnnnnnnnnnnnnnnnnnnnnnnnnnnnnnnnnnnnnnnnnnnnnnnnnnnnnnnnnnnnnnnnnnnnnnnnnnnnnnnnnnnnnnnnnnnnnnnnnnnnnnnnnnnnnnnnnnnnnnnnnnnnnnnnnnnnnnnnnnnnnnnnnnnnnnnnnnnnnnnnnnnnnnnnnnnnnnnnnnnnnnnnnnnnnnnnnnnnnnnnnnnnnnnnnnnnnnnnnnnnnnnnnnnnnnnnnnnnnnnnnnnnnnnnnnnnnnnnnnnnnnnnnnnnnnnnnnnnnnnnnnnnnnnnnnnnnnnnnnnnnnnnnnnnnnnnnnnnnnnnnnnnnnnnnnnnnnnnnnnnnnnnnnnnnnnnnnnnnnnnnnnnnnnnnnnnnnnnnnnnnnnnnnnnnnnnnnnnnnnnnnnnnnnnnnnnnnnnnnnnnnnnnnnnnnnnnnnnnnnnnnnnnnnnnnnnnnnnnnnnnnnnnnnnnnnnnnnnnnnnnnnnnnnnnnnnnnnnnnnnnnnnnnnnnnnnnnnnnnnnnnnnnnnnnnnnnnnnnnnnnnnnnnnnnnnnnnnnnnnnnnnnnnnnnnnnnnnnnnnnnnnnnnnnnnnnnnnnnnnnnnnnnnnnnnnnnnnnnnnnnnnnnnnnnnnnnnnnnnnnnnnnnnnnnnnnnnnnnnnnnnnnnnnnnnnnnnnnnnnnnnnnnnnnnnnnnnnnnnnnnnnnnnnnnnnnnnnnnnnnnnnnnnnnnnnnnnnnnnnnnnnnnnnnnnnnnnnnnnnnnnnnnnnnnnnnnnnnnnnnnnnnnnnnnnnnnnnnnnnnnnnnnnnnnnnnnnnnnnnnnnnnnnnnnnnnnnnnnnnnnnnnnnnnnnnnnnnnnnnnnnnnnnnnnnnnnnnnnnnnnnnnnnnnnnnnnnnnnnnnnnnnnnnnnnnnnnnnnnnnnnnnnnnnnnnnnnnnnnnnnnnnnnnnnnnnnnnnnnnnnnnnnnnnnnnnnnnnnnnnnnnnnnnnnnnnnnnnnnnnnnnnnnnnnnnnnnnnnnnnnnnnnnnnnnnnnnnnnnnnnnnnnnnnnnnnnnnnnnnnnnnnnnnnnnnnnnnnnnnnnnnnnnnnnnnnnnnnnnnnnnnnnnnnnnnnnnnnnnnnnnnnnnnnnnnnnnnnnnnnnnnnnnnnnnnnnnnnnnnnnnnnnnnnnnnnnnnnnnnnnnnnnnnnnnnnnnnnnnnnnnnnnnnnnnnnnnnnnnnnnnnnnnnnnnnnnnnnnnnnnnnnnnnnnnnnnnnnnnnnnnnnnnnnnnnnnnnnnnnnnnnnnnnnnnnnnnnnnnnnnnnnnnnnnnnnnnnnnnnnnnnnnnnnnnnnnnnnnnnnnnnnnnnnnnnnnnnnnnnnnnnnnnnnnnnnnnnnnnnnnnnnnnnnnnnnnnnnnnnnnnnnnnnnnnnnnnnnnnnnnnnnnnnnnnnnnnnnnnnnnnnnnnnnnnnnnnnnnnnnnnnnnnnnnnnnnnnnnnnnnnnnnnnnnnnnnnnnnnnnnnnnnnnnnnnnnnnnnnnnnnnnnnnnnnnnnnnnnnnnnnnnnnnnnnnnnnnnnnnnnnnnnnnnnnnnnnnnnnnnnnnnnnnnnnnnnnnnnnnnnnnnnnnnnnnnnnnnnnnnnnnnnnnnnnnnnnnnnnnnnnnnnnnnnnnnnnnnnnnnnnnnnnnnnnnnnnnnnnnnnnnnnnnnnnnnnnnnnnnnnnnnnnnnnnnnnnnnnnnnnnnnnnnnnnnnnnnnnnnnnnnnnnnnnnnnnnnnnnnnnnnnnnnnnnnnnnnnnnnnnnnnnnnnnnnnnnnnnnnnnnnnnnnnnnnnnnnnnnnnnnnnnnnnnnnnnnnnnnnnnnnnnnnnnnnnnnnnnnnnnnnnnnnnnnnnnnnnnnnnnnnnnnnnnnnnnnnnnnnnnnnnnnnnnnnnnnnnnnnnnnnnnnnnnnnnnnnnnnnnnnnnnnnnnnnnnnnnnnnnnnnnnnnnnnnnnnnnnnnnnnnnnnnnnnnnnnnnnnnnnnnnnnnnnnnnnnnnnnnnnnnnnnnnnnnnnnnnnnnnnnnnnnnnnnnnnnnnnnnnnnnnnnnnnnnnnnnnnnnnnnnnnnnnnnnnnnnnnnnnnnnnnnnnnnnnnnnnnnnnnnnnnnnnnnnnnnnnnnnnnnnnnnnnnnnnnnnnnnnnnnnnnnnnnnnnnnnnnnnnnnnnnnnnnnnnnnnnnnnnnnnnnnnnnnnnnnnnnnnnnnnnnnnnnnnnnnnnnnnnnnnnnnnnnnnnnnnnnnnnnnnnnnnnnnnnnnnnnnnnnnnnnnnnnnnnnnnnnnnnnnnnnnnnnnnnnnnnnnnnnnnnnnnnnnnnnnnnnnnnnnnnnnnnnnnnnnnnnnnnnnnnnnnnnnnnnnnnnnnnnnnnnnnnnnnnnnnnnnnnnnnnnnnnnnnnnnnnnnnnnnnnnnnnnnnnnnnnnnnnnnnnnnnnnnnnnnnnnnnnnnnnnnnnnnnnnnnnnnnnnnnnnnnnnnnnnnnnnnnnnnnnnnnnnnnnnnnnnnnnnnnnnnnnnnnnnnnnnnnnnnnnnnnnnnnnnnnnnnnnnnnnnnnnnnnnnnnnnnnnnnnnnnnnnnnnnnnnnnnnnnnnnnnnnnnnnnnnnnnnnnnnnnnnnnnnnnnnnnnnnnnnnnnnnnnnnnnnnnnnnnnnnnnnnnnnnnnnnnnnnnnnnnnnnnnnnnnnnnnnnnnnnnnnnnnnnnnnnnnnnnnnnnnnnnnnnnnnnnnnnnnnnnnnnnnnnnnnnnnnnnnnnnnnnnnnnnnnnnnnnnnnnnnnnnnnnnnnnnnnnnnnnnnnnnnnnnnnnnnnnnnnnnnnnnnnnnnnnnnnnnnnnnnnnnnnnnnnnnnnnnnnnnnnnnnnnnnnnnnnnnnnnnnnnnnnnnnnnnnnnnnnnnnnnnnnnnnnnnnnnnnnnnnnnnnnnnnnnnnnnnnnnnnnnnnnnnnnnnnnnnnnnnnnnnnnnnnnnnnnnnnnnnnnnnnnnnnnnnnnnnnnnnnnnnnnnnnnnnnnnnnnnnnnnnnnnnnnnnnnnnnnnnnnnnnnnnnnnnnnnnnnnnnnnnnnnnnnnnnnnnnnnnnnnnnnnnnnnnnnnnnnnnnnnnnnnnnnnnnnnnnnnnnnnnnnnnnnnnnnnnnnnnnnnnnnnnnnnnnnnnnnnnnnnnnnnnnnnnnnnnnnnnnnnnnnnnnnnnnnnnnnnnnnnnnnnnnnnnnnnnnnnnnnnnnnnnnnnnnnnnnnnnnnnnnnnnnnnnnnnnnnnnnnnnnnnnnnnnnnnnnnnnnnnnnnnnnnnnnnnnnnnnnnnnnnnnnnnnnnnnnnnnnnnnnnnnnnnnnnnnnnnnnnnnnnnnnnnnnnnnnnnnnnnnnnnnnnnnnnnnnnnnnnnnnnnnnnnnnnnnnnnnnnnnnnnnnnnnnnnnnnnnnnnnnnnnnnnnnnnnnnnnnnnnnnnnnnnnnnnnnnnnnnnnnnnnnnnnnnnnnnnnnnnnnnnnnnnnnnnnnnnnnnnnnnnnnnnnnnnnnnnnnnnnnnnnnnnnnnnnnnnnnnnnnnnnnnnnnnnnnnnnnnnnnnnnnnnnnnnnnnnnnnnnnnnnnnnnnnnnnnnnnnnnnnnnnnnnnnnnnnnnnnnnnnnnnnnnnnnnnnnnnnnnnnnnnnnnnnnnnnnnnnnnnnnnnnnnnnnnnnnnnnnnnnnnnnnnnnnnnnnnnnnnnnnnnnnnnnnnnnnnnnnnnnnnnnnnnnnnnnnnnnnnnnnnnnnnnnnnnnnnnnnnnnnnnnnnnnnnnnnnnnnnnnnnnnnnnnnnnnnnnnnnnnnnnnnnnnnnnnnnnnnnnnnnnnnnnnnnnnnnnnnnnnnnnnnnnnnnnnnnnnnnnnnnnnnnnnnnnnnnnnnnnnnnnnnnnnnnnnnnnnnnnnnnnnnnnnnnnnnnnnnnnnnnnnnnnnnnnnnnnnnnnnnnnnnnnnnnnnnnnnnnnnnnnnnnnnnnnnnnnnnnnnnnnnnnnnnnnnnnnnnnnnnnnnnnnnnnnnnnnnnnnnnnnnnnnnnnnnnnnnnnnnnnnnnnnnnnnnnnnnnnnnnnnnnnnnnnnnnnnnnnnnnnnnnnnnnnnnnnnnnnnnnnnnnnnnnnnnnnnnnnnnnnnnnnnnnnnnnnnnnnnnnnnnnnnnnnnnnnnnnnnnnnnnnnnnnnnnnnnnnnnnnnnnnnnnnnnnnnnnnnnnnnnnnnnnnnnnnnnnnnnnnnnnnnnnnnnnnnnnnnnnnnnnnnnnnnnnnnnnnnnnnnnnnnnnnnnnnnnnnnnnnnnnnnnnnnnnnnnnnnnnnnnnnnnnnnnnnnnnnnnnnnnnnnnnnnnnnnnnnnnnnnnnnnnnnnnnnnnnnnnnnnnnnnnnnnnnnnnnnnnnnnnnnnnnnnnnnnnnnnnnnnnnnnnnnnnnnnnnnnnnnnnnnnnnnnnnnnnnnnnnnnnnnnnnnnnnnnnnnnnnnnnnnnnnnnnnnnnnnnnnnnnnnnnnnnnnnnnnnnnnnnnnnnnnnnnnnnnnnnnnnnnnnnnnnnnnnnnnnnnnnnnnnnnnnnnnnnnnnnnnnnnnnnnnnnnnnnnnnnnnnnnnnnnnnnnnnnnnnnnnnnnnnnnnnnnnnnnnnnnnnnnnnnnnnnnnnnnnnnnnnnnnnnnnnnnnnnnnnnnnnnnnnnnnnnnnnnnnnnnnnnnnnnnnnnnnnnnnnnnnnnnnnnnnnnnnnnnnnnnnnnnnnnnnnnnnnnnnnnnnnnnnnnnnnnnnnnnnnnnnnnnnnnnnnnnnnnnnnnnnnnnnnnnnnnnnnnnnnnnnnnnnnnnnnnnnnnnnnnnnnnnnnnnnnnnnnnnnnnnnnnnnnnnnnnnnnnnnnnnnnnnnnnnnnnnnnnnnnnnnnnnnnnnnnnnnnnnnnnnnnnnnnnnnnnnnnnnnnnnnnnnnnnnnnnnnnnnnnnnnnnnnnnnnnnnnnnnnnnnnnnnnnnnnnnnnnnnnnnnnnnnnnnnnnnnnnnnnnnnnnnnnnnnnnnnnnnnnnnnnnnnnnnnnnnnnnnnnnnnnnnnnnnnnnnnnnnnnnnnnnnnnnnnnnnnnnnnnnnnnnnnnnnnnnnnnnnnnnnnnnnnnnnnnnnnnnnnnnnnnnnnnnnnnnnnnnnnnnnnnnnnnnnnnnnnnnnnnnnnnnnnnnnnnnnnnnnnnnnnnnnnnnnnnnnnnnnnnnnnnnnnnnnnnnnnnnnnnnnnnnnnnnnnnnnnnnnnnnnnnnnnnnnnnnnnnnnnnnnnnnnnnnnnnnnnnnnnnnnnnnnnnnnnnnnnnnnnnnnnnnnnnnnnnnnnnnnnnnnnnnnnnnnnnnnnnnnnnnnnnnnnnnnnnnnnnnnnnnnnnnnnnnnnnnnnnnnnnnnnnnnnnnnnnnnnnnnnnnnnnnnnnnnnnnnnnnnnnnnnnnnnnnnnnnnnnnnnnnnnnnnnnnnnnnnnnnnnnnnnnnnnnnnnnnnnnnnnnnnnnnnnnnnnnnnnnnnnnnnnnnnnnnnnnnnnnnnnnnnnnnnnnnnnnnnnnnnnnnnnnnnnnnnnnnnnnnnnnnnnnnnnnnnnnnnnnnnnnnnnnnnnnnnnnnnnnnnnnnnnnnnnnnnnnnnnnnnnnnnnnnnnnnnnnnnnnnnnnnnnnnnnnnnnnnnnnnnnnnnnnnnnnnnnnnnnnnnnnnnnnnnnnnnnnnnnnnnnnnnnnnnnnnnnnnnnnnnnnnnnnnnnnnnnnnnnnnnnnnnnnnnnnnnnnnnnnnnnnnnnnnnnnnnnnnnnnnnnnnnnnnnnnnnnnnnnnnnnnnnnnnnnnnnnnnnnnnnnnnnnnnnnnnnnnnnnnnnnnnnnnnnnnnnnnnnnnnnnnnnnnnnnnnnnnnnnnnnnnnnnnnnnnnnnnnnnnnnnnnnnnnnnnnnnnnnnnnnnnnnnnnnnnnnnnnnnnnnnnnnnnnnnnnnnnnnnnnnnnnnnnnnnnnnnnnnnnnnnnnnnnnnnnnnnnnnnnnnnnnnnnnnnnnnnnnnnnnnnnnnnnnnnnnnnnnnnnnnnnnnnnnnnnnnnnnnnnnnnnnnnnnnnnnnnnnnnnnnnnnnnnnnnnnnnnnnnnnnnnnnnnnnnnnnnnnnnnnnnnnnnnnnnnnnnnnnnnnnnnnnnnnnnnnnnnnnnnnnnnnnnnnnnnnnnnnnnnnnnnnnnnnnnnnnnnnnnnnnnnnnnnnnnnnnnnnnnnnnnnnnnnnnnnnnnnnnnnnnnnnnnnnnnnnnnnnnnnnnnnnnnnnnnnnnnnnnnnnnnnnnnnnnnnnnnnnnnnnnnnnnnnnnnnnnnnnnnnnnnnnnnnnnnnnnnnnnnnnnnnnnnnnnnnnnnnnnnnnnnnnnnnnnnnnnnnnnnnnnnnnnnnnnnnnnnnnnnnnnnnnnnnnnnnnnnnnnnnnnnnnnnnnnnnnnnnnnnnnnnnnnnnnnnnnnnnnnnnnnnnnnnnnnnnnnnnnnnnnnnnnnnnnnnnnnnnnnnnnnnnnnnnnnnnnnnnnnnnnnnnnnnnnnnnnnnnnnnnnnnnnnnnnnnnnnnnnnnnnnnnnnnnnnnnnnnnnnnnnnnnnnnnnnnnnnnnnnnnnnnnnnnnnnnnnnnnnnnnnnnnnnnnnnnnnnnnnnnnnnnnnnnnnnnnnnnnnnnnnnnnnnnnnnnnnnnnnnnnnnnnnnnnnnnnnnnnnnnnnnnnnnnnnnnnnnnnnnnnnnnnnnnnnnnnnnnnnnnnnnnnnnnnnnnnnnnnnnnnnnnnnnnnnnnnnnnnnnnnnnnnnnnnnnnnnnnnnnnnnnnnnnnnnnnnnnnnnnnnnnnnnnnnnnnnnnnnnnnnnnnnnnnnnnnnnnnnnnnnnnnnnnnnnnnnnnnnnnnnnnnnnnnnnnnnnnnnnnnnnnnnnnnnnnnnnnnnnnnnnnnnnnnnnnnnnnnnnnnnnnnnnnnnnnnnnnnnnnnnnnnnnnnnnnnnnnnnnnnnnnnnnnnnnnnnnnnnnnnnnnnnnnnnnnnnnnnnnnnnnnnnnnnnnnnnnnnnnnnnnnnnnnnnnnnnnnnnnnnnnnnnnnnnnnnnnnnnnnnnnnnnnnnnnnnnnnnnnnnnnnnnnnnnnnnnnnnnnnnnnnnnnnnnnnnnnnnnnnnnnnnnnnnnnnnnnnnnnnnnnnnnnnnnnnnnnnnnnnnnnnnnnnnnnnnnnnnnnnnnnnnnnnnnnnnnnnnnnnnnnnnnnnnnnnnnnnnnnnnnnnnnnnnnnnnnnnnnnnnnnnnnnnnnnnnnnnnnnnnnnnnnnnnnnnnnnnnnnnnnnnnnnnnnnnnnnnnnnnnnnnnnnnnnnnnnnnnnnnnnnnnnnnnnnnnnnnnnnnnnnnnnnnnnnnnnnnnnnnnnnnnnnnnnnnnnnnnnnnnnnnnnnnnnnnnnnnnnnnnnnnnnnnnnnnnnnnnnnnnnnnnnnnnnnnnnnnnnnnnnnnnnnnnnnnnnnnnnnnnnnnnnnnnnnnnnnnnnnnnnnnnnnnnnnnnnnnnnnnnnnnnnnnnnnnnnnnnnnnnnnnnnnnnnnnnnnnnnnnnnnnnnnnnnnnnnnnnnnnnnnnnnnnnnnnnnnnnnnnnnnnnnnnnnnnnnnnnnnnnnnnnnnnnnnnnnnnnnnnnnnnnnnnnnnnnnnnnnnnnnnnnnnnnnnnnnnnnnnnnnnnnnnnnnnnnnnnnnnnnnnnnnnnnnnnnnnnnnnnnnnnnnnnnnnnnnnnnnnnnnnnnnnnnnnnnnnnnnnnnnnnnnnnnnnnnnnnnnnnnnnnnnnnnnnnnnnnnnnnnnnnnnnnnnnnnnnnnnnnnnnnnnnnnnnnnnnnnnnnnnnnnnnnnnnnnnnnnnnnnnnnnnnnnnnnnnnnnnnnnnnnnnnnnnnnnnnnnnnnnnnnnnnnnnnnnnnnnnnnnnnnnnnnnnnnnnnnnnnnnnnnnnnnnnnnnnnnnnnnnnnnnnnnnnnnnnnnnnnnnnnnnnnnnnnnnnnnnnnnnnnnnnnnnnnnnnnnnnnnnnnnnnnnnnnnnnnnnnnnnnnnnnnnnnnnnnnnnnnnnnnnnnnnnnnnnnnnnnnnnnnnnnnnnnnnnnnnnnnnnnnnnnnnnnnnnnnnnnnnnnnnnnnnnnnnnnnnnnnnnnnnnnnnnnnnnnnnnnnnnnnnnnnnnnnnnnnnnnnnnnnnnnnnnnnnnnnnnnnnnnnnnnnnnnnnnnnnnnnnnnnnnnnnnnnnnnnnnnnnnnnnnnnnnnnnnnnnnnnnnnnnnnnnnnnnnnnnnnnnnnnnnnnnnnnnnnnnnnnnnnnnnnnnnnnnnnnnnnnnnnnnnnnnnnnnnnnnnnnnnnnnnnnnnnnnnnnnnnnnnnnnnnnnnnnnnnnnnnnnnnnnnnnnnnnnnnnnnnnnnnnnnnnnnnnnnnnnnnnnnnnnnnnnnnnnnnnnnnnnnnnnnnnnnnnnnnnnnnnnnnnnnnnnnnnnnnnnnnnnnnnnnnnnnnnnnnnnnnnnnnnnnnnnnnnnnnnnnnnnnnnnnnnnnnnnnnnnnnnnnnnnnnnnnnnnnnnnnnnnnnnnnnnnnnnnnnnnnnnnnnnnnnnnnnnnnnnnnnnnnnnnnnnnnnnnnnnnnnnnnnnnnnnnnnnnnnnnnnnnnnnnnnnnnnnnnnnnnnnnnnnnnnnnnnnnnnnnnnnnnnnnnnnnnnnnnnnnnnnnnnnnnnnnnnnnnnnnnnnnnnnnnnnnnnnnnnnnnnnnnnnnnnnnnnnnnnnnnnnnnnnnnnnnnnnnnnnnnnnnnnnnnnnnnnnnnnnnnnnnnnnnnnnnnnnnnnnnnnnnnnnnnnnnnnnnnnnnnnnnnnnnnnnnnnnnnnnnnnnnnnnnnnnnnnnnnnnnnnnnnnnnnnnnnnnnnnnnnnnnnnnnnnnnnnnnnnnnnnnnnnnnnnnnnnnnnnnnnnnnnnnnnnnnnnnnnnnnnnnnnnnnnnnnnnnnnnnnnnnnnnnnnnnnnnnnnnnnnnnnnnnnnnnnnnnnnnnnnnnnnnnnnnnnnnnnnnnnnnnnnnnnnnnnnnnnnnnnnnnnnnnnnnnnnnnnnnnnnnnnnnnnnnnnnnnnnnnnnnnnnnnnnnnnnnnnnnnnnnnnnnnnnnnnnnnnnnnnnnnnnnnnnnnnnnnnnnnnnnnnnnnnnnnnnnnnnnnnnnnnnnnnnnnnnnnnnnnnnnnnnnnnnnnnnnnnnnnnnnnnnnnnnnnnnnnnnnnnnnnnnnnnnnnnnnnnnnnnnnnnnnnnnnnnnnnnnnnnnnnnnnnnnnnnnnnnnnnnnnnnnnnnnnnnnnnnnnnnnnnnnnnnnnnnnnnnnnnnnnnnnnnnnnnnnnnnnnnnnnnnnnnnnnnnnnnnnnnnnnnnnnnnnnnnnnnnnnnnnnnnnnnnnnnnnnnnnnnnnnnnnnnnnnnnnnnnnnnnnnnnnnnnnnnnnnnnnnnnnnnnnnnnnnnnnnnnnnnnnnnnnnnnnnnnnnnnnnnnnnnnnnnnnnnnnnnnnnnnnnnnnnnnnnnnnnnnnnnnnnnnnnnnnnnnnnnnnnnnnnnnnnnnnnnnnnnnnnnnnnnnnnnnnnnnnnnnnnnnnnnnnnnnnnnnnnnnnnnnnnnnnnnnnnnnnnnnnnnnnnnnnnnnnnnnnnnnnnnnnnnnnnnnnnnnnnnnnnnnnnnnnnnnnnnnnnnnnnnnnnnnnnnnnnnnnnnnnnnnnnnnnnnnnnnnnnnnnnnnnnnnnnnnnnnnnnnnnnnnnnnnnnnnnnnnnnnnnnnnnnnnnnnnnnnnnnnnnnnnnnnnnnnnnnnnnnnnnnnnnnnnnnnnnnnnnnnnnnnnnnnnnnnnnnnnnnnnnnnnnnnnnnnnnnnnnnnnnnnnnnnnnnnnnnnnnnnnnnnnnnnnnnnnnnnnnnnnnnnnnnnnnnnnnnnnnnnnnnnnnnnnnnnnnnnnnnnnnnnnnnnnnnnnnnnnnnnnnnnnnnnnnnnnnnnnnnnnnnnnnnnnnnnnnnnnnnnnnnnnnnnnnnnnnnnnnnnnnnnnnnnnnnnnnnnnnnnnnnnnnnnnnnnnnnnnnnnnnnnnnnnnnnnnnnnnnnnnnnnnnnnnnnnnnnnnnnnnnnnnnnnnnnnnnnnnnnnnnnnnnnnnnnnnnnnnnnnnnnnnnnnnnnnnnnnnnnnnnnnnnnnnnnnnnnnnnnnnnnnnnnnnnnnnnnnnnnnnnnnnnnnnnnnnnnnnnnnnnnnnnnnnnnnnnnnnnnnnnnnnnnnnnnnnnnnnnnnnnnnnnnnnnnnnnnnnnnnnnnnnnnnnnnnnnnnnnnnnnnnnnnnnnnnnnnnnnnnnnnnnnnnnnnnnnnnnnnnnnnnnnnnnnnnnnnnnnnnnnnnnnnnnnnnnnnnnnnnnnnnnnnnnnnnnnnnnnnnnnnnnnnnnnnnnnnnnnnnnnnnnnnnnnnnnnnnnnnnnnnnnnnnnnnnnnnnnnnnnnnnnnnnnnnnnnnnnnnnnnnnnnnnnnnnnnnnnnnnnnnnnnnnnnnnnnnnnnnnnnnnnnnnnnnnnnnnnnnnnnnnnnnnnnnnnnnnnnnnnnnnnnnnnnnnnnnnnnnnnnnnnnnnnnnnnnnnnnnnnnnnnnnnnnnnnnnnnnnnnnnnnnnnnnnnnnnnnnnnnnnnnnnnnnnnnnnnnnnnnnnnnnnnnnnnnnnnnnnnnnnnnnnnnnnnnnnnnnnnnnnnnnnnnnnnnnnnnnnnnnnnnnnnnnnnnnnnnnnnnnnnnnnnnnnnnnnnnnnnnnnnnnnnnnnnnnnnnnnnnnnnnnnnnnnnnnnnnnnnnnnnnnnnnnnnnnnnnnnnnnnnnnnnnnnnnnnnnnnnnnnnnnnnnnnnnnnnnnnnnnnnnnnnnnnnnnnnnnnnnnnnnnnnnnnnnnnnnnnnnnnnnnnnnnnnnnnnnnnnnnnnnnnnnnnnnnnnnnnnnnnnnnnnnnnnnnnnnnnnnnnnnnnnnnnnnnnnnnnnnnnnnnnnnnnnnnnnnnnnnnnnnnnnnnnnnnnnnnnnnnnnnnnnnnnnnnnnnnnnnnnnnnnnnnnnnnnnnnnnnnnnnnnnnnnnnnnnnnnnnnnnnnnnnnnnnnnnnnnnnnnnnnnnnnnnnnnnnnnnnnnnnnnnnnnnnnnnnnnnnnnnnnnnnnnnnnnnnnnnnnnnnnnnnnnnnnnnnnnnnnnnnnnnnnnnnnnnnnnnnnnnnnnnnnnnnnnnnnnnnnnnnnnnnnnnnnnnnnnnnnnnnnnnnnnnnnnnnnnnnnnnnnnnnnnnnnnnnnnnnnnnnnnnnnnnnnnnnnnnnnnnnnnnnnnnnnnnnnnnnnnnnnnnnnnnnnnnnnnnnnnnnnnnnnnnnnnnnnnnnnnnnnnnnnnnnnnnnnnnnnnnnnnnnnnnnnnnnnnnnnnnnnnnnnnnnnnnnnnnnnnnnnnnnnnnnnnnnnnnnnnnnnnnnnnnnnnnnnnnnnnnnnnnnnnnnnnnnnnnnnnnnnnnnnnnnnnnnnnnnnnnnnnnnnnnnnnnnnnnnnnnnnnnnnnnnnnnnnnnnnnnnnnnnnnnnnnnnnnnnnnnnnnnnnnnnnnnnnnnnnnnnnnnnnnnnnnnnnnnnnnnnnnnnnnnnnnnnnnnnnnnnnnnnnnnnnnnnnnnnnnnnnnnnnnnnnnnnnnnnnnnnnnnnnnnnnnnnnnnnnnnnnnnnnnnnnnnnnnnnnnnnnnnnnnnnnnnnnnnnnnnnnnnnnnnnnnnnnnnnnnnnnnnnnnnnnnnnnnnnnnnnnnnnnnnnnnnnnnnnnnnnnnnnnnnnnnnnnnnnnnnnnnnnnnnnnnnnnnnnnnnnnnnnnnnnnnnnnnnnnnnnnnnnnnnnnnnnnnnnnnnnnnnnnnnnnnnnnnnnnnnnnnnnnnnnnnnnnnnnnnnnnnnnnnnnnnnnnnnnnnnnnnnnnnnnnnnnnnnnnnnnnnnnnnnnnnnnnnnnnnnnnnnnnnnnnnnnnnnnnnnnnnnnnnnnnnnnnnnnnnnnnnnnnnnnnnnnnnnnnnnnnnnnnnnnnnnnnnnnnnnnnnnnnnnnnnnnnnnnnnnnnnnnnnnnnnnnnnnnnnnnnnnnnnnnnnnnnnnnnnnnnnnnnnnnnnnnnnnnnnnnnnnnnnnnnnnnnnnnnnnnnnnnnnnnnnnnnnnnnnnnnnnnnnnnnnnnnnnnnnnnnnnnnnnnnnnnnnnnnnnnnnnnnnnnnnnnnnnnnnnnnnnnnnnnnnnnnnnnnnnnnnnnnnnnnnnnnnnnnnnnnnnnnnnnnnnnnnnnnnnnnnnnnnnnnnnnnnnnnnnnnnnnnnnnnnnnnnnnnnnnnnnnnnnnnnnnnnnnnnnnnnnnnnnnnnnnnnnnnnnnnnnnnnnnnnnnnnnnnnnnnnnnnnnnnnnnnnnnnnnnnnnnnnnnnnnnnnnnnnnnnnnnnnnnnnnnnnnnnnnnnnnnnnnnnnnnnnnnnnnnnnnnnnnnnnnnnnnnnnnnnnnnnnnnnnnnnnnnnnnnnnnnnnnnnnnnnnnnnnnnnnnnnnnnnnnnnnnnnnnnnnnnnnnnnnnnnnnnnnnnnnnnnnnnnnnnnnnnnnnnnnnnnnnnnnnnnnnnnnnnnnnnnnnnnnnnnnnnnnnnnnnnnnnnnnnnnnnnnnnnnnnnnnnnnnnnnnnnnnnnnnnnnnnnnnnnnnnnnnnnnnnnnnnnnnnnnnnnnnnnnnnnnnnnnnnnnnnnnnnnnnnnnnnnnnnnnnnnnnnnnnnnnnnnnnnnnnnnnnnnnnnnnnnnnnnnnnnnnnnnnnnnnnnnnnnnnnnnnnnnnnnnnnnnnnnnnnnnnnnnnnnnnnnnnnnnnnnnnnnnnnnnnnnnnnnnnnnnnnnnnnnnnnnnnnnnnnnnnnnnnnnnnnnnnnnnnnnnnnnnnnnnnnnnnnnnnnnnnnnnnnnnnnnnnnnnnnnnnnnnnnnnnnnnnnnnnnnnnnnnnnnnnnnnnnnnnnnnnnnnnnnnnnnnnnnnnnnnnnnnnnnnnnnnnnnnnnnnnnnnnnnnnnnnnnnnnnnnnnnnnnnnnnnnnnnnnnnnnnnnnnnnnnnnnnnnnnnnnnnnnnnnnnnnnnnnnnnnnnnnnnnnnnnnnnnnnnnnnnnnnnnnnnnnnnnnnnnnnnnnnnnnnnnnnnnnnnnnnnnnnnnnnnnnnnnnnnnnnnnnnnnnnnnnnnnnnnnnnnnnnnnnnnnnnnnnnnnnnnnnnnnnnnnnnnnnnnnnnnnnnnnnnnnnnnnnnnnnnnnnnnnnnnnnnnnnnnnnnnnnnnnnnnnnnnnnnnnnnnnnnnnnnnnnnnnnnnnnnnnnnnnnnnnnnnnnnnnnnnnnnnnnnnnnnnnnnnnnnnnnnnnnnnnnnnnnnnnnnnnnnnnnnnnnnnnnnnnnnnnnnnnnnnnnnnnnnnnnnnnnnnnnnnnnnnnnnnnnnnnnnnnnnnnnnnnnnnnnnnnnnnnnnnnnnnnnnnnnnnnnnnnnnnnnnnnnnnnnnnnnnnnnnnnnnnnnnnnnnnnnnnnnnnnnnnnnnnnnnnnnnnnnnnnnnnnnnnnnnnnnnnnnnnnnnnnnnnnnnnnnnnnnnnnnnnnnnnnnnnnnnnnnnnnnnnnnnnnnnnnnnnnnnnnnnnnnnnnnnnnnnnnnnnnnnnnnnnnnnnnnnnnnnnnnnnnnnnnnnnnnnnnnnnnnnnnnnnnnnnnnnnnnnnnnnnnnnnnnnnnnnnnnnnnnnnnnnnnnnnnnnnnnnnnnnnnnnnnnnnnnnnnnnnnnnnnnnnnnnnnnnnnnnnnnnnnnnnnnnnnnnnnnnnnnnnnnnnnnnnnnnnnnnnnnnnnnnnnnnnnnnnnnnnnnnnnnnnnnnnnnnnnnnnnnnnnnnnnnnnnnnnnnnnnnnnnnnnnnnnnnnnnnnnnnnnnnnnnnnnnnnnnnnnnnnnnnnnnnnnnnnnnnnnnnnnnnnnnnnnnnnnnnnnnnnnnnnnnnnnnnnnnnnnnnnnnnnnnnnnnnnnnnnnnnnnnnnnnnnnnnnnnnnnnnnnnnnnnnnnnnnnnnnnnnnnnnnnnnnnnnnnnnnnnnnnnnnnnnnnnnnnnnnnnnnnnnnnnnnnnnnnnnnnnnnnnnnnnnnnnnnnnnnnnnnnnnnnnnnnnnnnnnnnnnnnnnnnnnnnnnnnnnnnnnnnnnnnnnnnnnnnnnnnnnnnnnnnnnnnnnnnnnnnnnnnnnnnnnnnnnnnnnnnnnnnnnnnnnnnnnnnnnnnnnnnnnnnnnnnnnnnnnnnnnnnnnnnnnnnnnnnnnnnnnnnnnnnnnnnnnnnnnnnnnnnnnnnnnnnnnnnnnnnnnnnnnnnnnnnnnnnnnnnnnnnnnnnnnnnnnnnnnnnnnnnnnnnnnnnnnnnnnnnnnnnnnnnnnnnnnnnnnnnnnnnnnnnnnnnnnnnnnnnnnnnnnnnnnnnnnnnnnnnnnnnnnnnnnnnnnnnnnnnnnnnnnnnnnnnnnnnnnnnnnnnnnnnnnnnnnnnnnnnnnnnnnnnnnnnnnnnnnnnnnnnnnnnnnnnnnnnnnnnnnnnnnnnnnnnnnnnnnnnnnnnnnnnnnnnnnnnnnnnnnnnnnnnnnnnnnnnnnnnnnnnnnnnnnnnnnnnnnnnnnnnnnnnnnnnnnnnnnnnnnnnnnnnnnnnnnnnnnnnnnnnnnnnnnnnnnnnnnnnnnnnnnnnnnnnnnnnnnnnnnnnnnnnnnnnnnnnnnnnnnnnnnnnnnnnnnnnnnnnnnnnnnnnnnnnnnnnnnnnnnnnnnnnnnnnnnnnnnnnnnnnnnnnnnnnnnnnnnnnnnnnnnnnnnnnnnnnnnnnnnnnnnnnnnnnnnnnnnnnnnnnnnnnnnnnnnnnnnnnnnnnnnnnnnnnnnnnnnnnnnnnnnnnnnnnnnnnnnnnnnnnnnnnnnnnnnnnnnnnnnnnnnnnnnnnnnnnnnnnnnnnnnnnnnnnnnnnnnnnnnnnnnnnnnnnnnnnnnnnnnnnnnnnnnnnnnnnnnnnnnnnnnnnnnnnnnnnnnnnnnnnnnnnnnnnnnnnnnnnnnnnnnnnnnnnnnnnnnnnnnnnnnnnnnnnnnnnnnnnnnnnnnnnnnnnnnnnnnnnnnnnnnnnnnnnnnnnnnnnnnnnnnnnnnnnnnnnnnnnnnnnnnnnnnnnnnnnnnnnnnnnnnnnnnnnnnnnnnnnnnnnnnnnnnnnnnnnnnnnnnnnnnnnnnnnnnnnnnnnnnnnnnnnnnnnnnnnnnnnnnnnnnnnnnnnnnnnnnnnnnnnnnnnnnnnnnnnnnnnnnnnnnnnnnnnnnnnnnnnnnnnnnnnnnnnnnnnnnnnnnnnnnnnnnnnnnnnnnnnnnnnnnnnnnnnnnnnnnnnnnnnnnnnnnnnnnnnnnnnnnnnnnnnnnnnnnnnnnnnnnnnnnnnnnnnnnnnnnnnnnnnnnnnnnnnnnnnnnnnnnnnnnnnnnnnnnnnnnnnnnnnnnnnnnnnnnnnnnnnnnnnnnnnnnnnnnnnnnnnnnnnnnnnnnnnnnnnnnnnnnnnnnnnnnnnnnnnnnnnnnnnnnnnnnnnnnnnnnnnnnnnnnnnnnnnnnnnnnnnnnnnnnnnnnnnnnnnnnnnnnnnnnnnnnnnnnnnnnnnnnnnnnnnnnnnnnnnnnnnnnnnnnnnnnnnnnnnnnnnnnnnnnnnnnnnnnnnnnnnnnnnnnnnnnnnnnnnnnnnnnnnnnnnnnnnnnnnnnnnnnnnnnnnnnnnnnnnnnnnnnnnnnnnnnnnnnnnnnnnnnnnnnnnnnnnnnnnnnnnnnnnnnnnnnnnnnnnnnnnnnnnnnnnnnnnnnnnnnnnnnnnnnnnnnnnnnnnnnnnnnnnnnnnnnnnnnnnnnnnnnnnnnnnnnnnnnnnnnnnnnnnnnnnnnnnnnnnnnnnnnnnnnnnnnnnnnnnnnnnnnnnnnnnnnnnnnnnnnnnnnnnnnnnnnnnnnnnnnnnnnnnnnnnnnnnnnnnnnnnnnnnnnnnnnnnnnnnnnnnnnnnnnnnnnnnnnnnnnnnnnnnnnnnnnnnnnnnnnnnnnnnnnnnnnnnnnnnnnnnnnnnnnnnnnnnnnnnnnnnnnnnnnnnnnnnnnnnnnnnnnnnnnnnnnnnnnnnnnnnnnnnnnnnnnnnnnnnnnnnnnnnnnnnnnnnnnnnnnnnnnnnnnnnnnnnnnnnnnnnnnnnnnnnnnnnnnnnnnnnnnnnnnnnnnnnnnnnnnnnnnnnnnnnnnnnnnnnnnnnnnnnnnnnnnnnnnnnnnnnnnnnnnnnnnnnnnnnnnnnnnnnnnnnnnnnnnnnnnnnnnnnnnnnnnnnnnnnnnnnnnnnnnnnnnnnnnnnnnnnnnnnnnnnnnnnnnnnnnnnnnnnnnnnnnnnnnnnnnnnnnnnnnnnnnnnnnnnnnnnnnnnnnnnnnnnnnnnnnnnnnnnnnnnnnnnnnnnnnnnnnnnnnnnnnnnnnnnnnnnnnnnnnnnnnnnnnnnnnnnnnnnnnnnnnnnnnnnnnnnnnnnnnnnnnnnnnnnnnnnnnnnnnnnnnnnnnnnnnnnnnnnnnnnnnnnnnnnnnnnnnnnnnnnnnnnnnnnnnnnnnnnnnnnnnnnnnnnnnnnnnnnnnnnnnnnnnnnnnnnnnnnnnnnnnnnnnnnnnnnnnnnnnnnnnnnnnnnnnnnnnnnnnnnnnnnnnnnnnnnnnnnnnnnnnnnnnnnnnnnnnnnnnnnnnnnnnnnnnnnnnnnnnnnnnnnnnnnnnnnnnnnnnnnnnnnnnnnnnnnnnnnnnnnnnnnnnnnnnnnnnnnnnnnnnnnnnnnnnnnnnnnnnnnnnnnnnnnnnnnnnnnnnnnnnnnnnnnnnnnnnnnnnnnnnnnnnnnnnnnnnnnnnnnnnnnnnnnnnnnnnnnnnnnnnnnnnnnnnnnnnnnnnnnnnnnnnnnnnnnnnnnnnnnnnnnnnnnnnnnnnnnnnnnnnnnnnnnnnnnnnnnnnnnnnnnnnnnnnnnnnnnnnnnnnnnnnnnnnnnnnnnnnnnnnnnnnnnnnnnnnnnnnnnnnnnnnnnnnnnnnnnnnnnnnnnnnnnnnnnnnnnnnnnnnnnnnnnnnnnnnnnnnnnnnnnnnnnnnnnnnnnnnnnnnnnnnnnnnnnnnnnnnnnnnnnnnnnnnnnnnnnnnnnnnnnnnnnnnnnnnnnnnnnnnnnnnnnnnnnnnnnnnnnnnnnnnnnnnnnnnnnnnnnnnnnnnnnnnnnnnnnnnnnnnnnnnnnnnnnnnnnnnnnnnnnnnnnnnnnnnnnnnnnnnnnnnnnnnnnnnnnnnnnnnnnnnnnnnnnnnnnnnnnnnnnnnnnnnnnnnnnnnnnnnnnnnnnnnnnnnnnnnnnnnnnnnnnnnnnnnnnnnnnnnnnnnnnnnnnnnnnnnnnnnnnnnnnnnnnnnnnnnnnnnnnnnnnnnnnnnnnnnnnnnnnnnnnnnnnnnnnnnnnnnnnnnnnnnnnnnnnnnnnnnnnnnnnnnnnnnnnnnnnnnnnnnnnnnnnnnnnnnnnnnnnnnnnnnnnnnnnnnnnnnnnnnnnnnnnnnnnnnnnnnnnnnnnnnnnnnnnnnnnnnnnnnnnnnnnnnnnnnnnnnnnnnnnnnnnnnnnnnnnnnnnnnnnnnnnnnnnnnnnnnnnnnnnnnnnnnnnnnnnnnnnnnnnnnnnnnnnnnnnnnnnnnnnnnnnnnnnnnnnnnnnnnnnnnnnnnnnnnnnnnnnnnnnnnnnnnnnnnnnnnnnnnnnnnnnnnnnnnnnnnnnnnnnnnnnnnnnnnnnnnnnnnnnnnnnnnnnnnnnnnnnnnnnnnnnnnnnnnnnnnnnnnnnnnnnnnnnnnnnnnnnnnnnnnnnnnnnnnnnnnnnnnnnnnnnnnnnnnnnnnnnnnnnnnnnnnnnnnnnnnnnnnnnnnnnnnnnnnnnnnnnnnnnnnnnnnnnnnnnnnnnnnnnnnnnnnnnnnnnnnnnnnnnnnnnnnnnnnnnnnnnnnnnnnnnnnnnnnnnnnnnnnnnnnnnnnnnnnnnnnnnnnnnnnnnnnnnnnnnnnnnnnnnnnnnnnnnnnnnnnnnnnnnnnnnnnnnnnnnnnnnnnnnnnnnnnnnnnnnnnnnnnnnnnnnnnnnnnnnnnnnnnnnnnnnnnnnnnnnnnnnnnnnnnnnnnnnnnnnnnnnnnnnnnnnnnnnnnnnnnnnnnnnnnnnnnnnnnnnnnnnnnnnnnnnnnnnnnnnnnnnnnnnnnnnnnnnnnnnnnnnnnnnnnnnnnnnnnnnnnnnnnnnnnnnnnnnnnnnnnnnnnnnnnnnnnnnnnnnnnnnnnnnnnnnnnnnnnnnnnnnnnnnnnnnnnnnnnnnnnnnnnnnnnnnnnnnnnnnnnnnnnnnnnnnnnnnnnnnnnnnnnnnnnnnnnnnnnnnnnnnnnnnnnnnnnnnnnnnnnnnnnnnnnnnnnnnnnnnnnnnnnnnnnnnnnnnnnnnnnnnnnnnnnnnnnnnnnnnnnnnnnnnnnnnnnnnnnnnnnnnnnnnnnnnnnnnnnnnnnnnnnnnnnnnnnnnnnnnnnnnnnnnnnnnnnnnnnnnnnnnnnnnnnnnnnnnnnnnnnnnnnnnnnnnnnnnnnnnnnnnnnnnnnnnnnnnnnnnnnnnnnnnnnnnnnnnnnnnnnnnnnnnnnnnnnnnnnnnnnnnnnnnnnnnnnnnnnnnnnnnnnnnnnnnnnnnnnnnnnnnnnnnnnnnnnnnnnnnnnnnnnnnnnnnnnnnnnnnnnnnnnnnnnnnnnnnnnnnnnnnnnnnnnnnnnnnnnnnnnnnnnnnnnnnnnnnnnnnnnnnnnnnnnnnnnnnnnnnnnnnnnnnnnnnnnnnnnnnnnnnnnnnnnnnnnnnnnnnnnnnnnnnnnnnnnnnnnnnnnnnnnnnnnnnnnnnnnnnnnnnnnnnnnnnnnnnnnnnnnnnnnnnnnnnnnnnnnnnnnnnnnnnnnnnnnnnnnnnnnnnnnnnnnnnnnnnnnnnnnnnnnnnnnnnnnnnnnnnnnnnnnnnnnnnnnnnnnnnnnnnnnnnnnnnnnnnnnnnnnnnnnnnnnnnnnnnnnnnnnnnnnnnnnnnnnnnnnnnnnnnnnnnnnnnnnnnnnnnnnnnnnnnnnnnnnnnnnnnnnnnnnnnnnnnnnnnnnnnnnnnnnnnnnnnnnnnnnnnnnnnnnnnnnnnnnnnnnnnnnnnnnnnnnnnnnnnnnnnnnnnnnnnnnnnnnnnnnnnnnnnnnnnnnnnnnnnnnnnnnnnnnnnnnnnnnnnnnnnnnnnnnnnnnnnnnnnnnnnnnnnnnnnnnnnnnnnnnnnnnnnnnnnnnnnnnnnnnnnnnnnnnnnnnnnnnnnnnnnnnnnnnnnnnnnnnnnnnnnnnnnnnnnnnnnnnnnnnnnnnnnnnnnnnnnnnnnnnnnnnnnnnnnnnnnnnnnnnnnnnnnnnnnnnnnnnnnnnnnnnnnnnnnnnnnnnnnnnnnnnnnnnnnnnnnnnnnnnnnnnnnnnnnnnnnnnnnnnnnnnnnnnnnnnnnnnnnnnnnnnnnnnnnnnnnnnnnnnnnnnnnnnnnnnnnnnnnnnnnnnnnnnnnnnnnnnnnnnnnnnnnnnnnnnnnnnnnnnnnnnnnnnnnnnnnnnnnnnnnnnnnnnnnnnnnnnnnnnnnnnnnnnnnnnnnnnnnnnnnnnnnnnnnnnnnnnnnnnnnnnnnnnnnnnnnnnnnnnnnnnnnnnnnnnnnnnnnnnnnnnnnnnnnnnnnnnnnnnnnnnnnnnnnnnnnnnnnnnnnnnnnnnnnnnnnnnnnnnnnnnnnnnnnnnnnnnnnnnnnnnnnnnnnnnnnnnnnnnnnnnnnnnnnnnnnnnnnnnnnnnnnnnnnnnnnnnnnnnnnnnnnnnnnnnnnnnnnnnnnnnnnnnnnnnnnnnnnnnnnnnnnnnnnnnnnnnnnnnnnnnnnnnnnnnnnnnnnnnnnnnnnnnnnnnnnnnnnnnnnnnnnnnnnnnnnnnnnnnnnnnnnnnnnnnnnnnnnnnnnnnnnnnnnnnnnnnnnnnnnnnnnnnnnnnnnnnnnnnnnnnnnnnnnnnnnnnnnnnnnnnnnnnnnnnnnnnnnnnnnnnnnnnnnnnnnnnnnnnnnnnnnnnnnnnnnnnnnnnnnnnnnnnnnnnnnnnnnnnnnnnnnnnnnnnnnnnnnnnnnnnnnnnnnnnnnnnnnnnnnnnnnnnnnnnnnnnnnnnnnnnnnnnnnnnnnnnnnnnnnnnnnnnnnnnnnnnnnnnnnnnnnnnnnnnnnnnnnnnnnnnnnnnnnnnnnnnnnnnnnnnnnnnnnnnnnnnnnnnnnnnnnnnnnnnnnnnnnnnnnnnnnnnnnnnnnnnnnnnnnnnnnnnnnnnnnnnnnnnnnnnnnnnnnnnnnnnnnnnnnnnnnnnnnnnnnnnnnnnnnnnnnnnnnnnnnnnnnnnnnnnnnnnnnnnnnnnnnnnnnnnnnnnnnnnnnnnnnnnnnnnnnnnnnnnnnnnnnnnnnnnnnnnnnnnnnnnnnnnnnnnnnnnnnnnnnnnnnnnnnnnnnnnnnnnnnnnnnnnnnnnnnnnnnnnnnnnnnnnnnnnnnnnnnnnnnnnnnnnnnnnnnnnnnnnnnnnnnnnnnnnnnnnnnnnnnnnnnnnnnnnnnnnnnnnnnnnnnnnnnnnnnnnnnnnnnnnnnnnnnnnnnnnnnnnnnnnnnnnnnnnnnnnnnnnnnnnnnnnnnnnnnnnnnnnnnnnnnnnnnnnnnnnnnnnnnnnnnnnnnnnnnnnnnnnnnnnnnnnnnnnnnnnnnnnnnnnnnnnnnnnnnnnnnnnnnnnnnnnnnnnnnnnnnnnnnnnnnnnnnnnnnnnnnnnnnnnnnnnnnnnnnnnnnnnnnnnnnnnnnnnnnnnnnnnnnnnnnnnnnnnnnnnnnnnnnnnnnnnnnnnnnnnnnnnnnnnnnnnnnnnnnnnnnnnnnnnnnnnnnnnnnnnnnnnnnnnnnnnnnnnnnnnnnnnnnnnnnnnnnnnnnnnnnnnnnnnnnnnnnnnnnnnnnnnnnnnnnnnnnnnnnnnnnnnnnnnnnnnnnnnnnnnnnnnnnnnnnnnnnnnnnnnnnnnnnnnnnnnnnnnnnnnnnnnnnnnnnnnnnnnnnnnnnnnnnnnnnnnnnnnnnnnnnnnnnnnnnnnnnnnnnnnnnnnnnnnnnnnnnnnnnnnnnnnnnnnnnnnnnnnnnnnnnnnnnnnnnnnnnnnnnnnnnnnnnnnnnnnnnnnnnnnnnnnnnnnnnnnnnnnnnnnnnnnnnnnnnnnnnnnnnnnnnnnnnnnnnnnnnnnnnnnnnnnnnnnnnnnnnnnnnnnnnnnnnnnnnnnnnnnnnnnnnnnnnnnnnnnnnnnnnnnnnnnnnnnnnnnnnnnnnnnnnnnnnnnnnnnnnnnnnnnnnnnnnnnnnnnnnnnnnnnnnnnnnnnnnnnnnnnnnnnnnnnnnnnnnnnnnnnnnnnnnnnnnnnnnnnnnnnnnnnnnnnnnnnnnnnnnnnnnnnnnnnnnnnnnnnnnnnnnnnnnnnnnnnnnnnnnnnnnnnnnnnnnnnnnnnnnnnnnnnnnnnnnnnnnnnnnnnnnnnnnnnnnnnnnnnnnnnnnnnnnnnnnnnnnnnnnnnnnnnnnnnnnnnnnnnnnnnnnnnnnnnnnnnnnnnnnnnnnnnnnnnnnnnnnnnnnnnnnnnnnnnnnnnnnnnnnnnnnnnnnnnnnnnnnnnnnnnnnnnnnnnnnnnnnnnnnnnnnnnnnnnnnnnnnnnnnnnnnnnnnnnnnnnnnnnnnnnnnnnnnnnnnnnnnnnnnnnnnnnnnnnnnnnnnnnnnnnnnnnnnnnnnnnnnnnnnnnnnnnnnnnnnnnnnnnnnnnnnnnnnnnnnnnnnnnnnnnnnnnnnnnnnnnnnnnnnnnnnnnnnnnnnnnnnnnnnnnnnnnnnnnnnnnnnnnnnnnnnnnnnnnnnnnnnnnnnnnnnnnnnnnnnnnnnnnnnnnnnnnnnnnnnnnnnnnnnnnnnnnnnnnnnnnnnnnnnnnnnnnnnnnnnnnnnnnnnnnnnnnnnnnnnnnnnnnnnnnnnnnnnnnnnnnnnnnnnnnnnnnnnnnnnnnnnnnnnnnnnnnnnnnnnnnnnnnnnnnnnnnnnnnnnnnnnnnnnnnnnnnnnnnnnnnnnnnnnnnnnnnnnnnnnnnnnnnnnnnnnnnnnnnnnnnnnnnnnnnnnnnnnnnnnnnnnnnnnnnnnnnnnnnnnnnnnnnnnnnnnnnnnnnnnnnnnnnnnnnnnnnnnnnnnnnnnnnnnnnnnnnnnnnnnnnnnnnnnnnnnnnnnnnnnnnnnnnnnnnnnnnnnnnnnnnnnnnnnnnnnnnnnnnnnnnnnnnnnnnnnnnnnnnnnnnnnnnnnnnnnnnnnnnnnnnnnnnnnnnnnnnnnnnnnnnnnnnnnnnnnnnnnnnnnnnnnnnnnnnnnnnnnnnnnnnnnnnnnnnnnnnnnnnnnnnnnnnnnnnnnnnnnnnnnnnnnnnnnnnnnnnnnnnnnnnnnnnnnnnnnnnnnnnnnnnnnnnnnnnnnnnnnnnnnnnnnnnnnnnnnnnnnnnnnnnnnnnnnnnnnnnnnnnnnnnnnnnnnnnnnnnnnnnnnnnnnnnnnnnnnnnnnnnnnnnnnnnnnnnnnnnnnnnnnnnnnnnnnnnnnnnnnnnnnnnnnnnnnnnnnnnnnnnnnnnnnnnnnnnnnnnnnnnnnnnnnnnnnnnnnnnnnnnnnnnnnnnnnnnnnnnnnnnnnnnnnnnnnnnnnnnnnnnnnnnnnnnnnnnnnnnnnnnnnnnnnnnnnnnnnnnnnnnnnnnnnnnnnnnnnnnnnnnnnnnnnnnnnnnnnnnnnnnnnnnnnnnnnnnnnnnnnnnnnnnnnnnnnnnnnnnnnnnnnnnnnnnnnnnnnnnnnnnnnnnnnnnnnnnnnnnnnnnnnnnnnnnnnnnnnnnnnnnnnnnnnnnnnnnnnnnnnnnnnnnnnnnnnnnnnnnnnnnnnnnnnnnnnnnnnnnnnnnnnnnnnnnnnnnnnnnnnnnnnnnnnnnnnnnnnnnnnnnnnnnnnnnnnnnnnnnnnnnnnnnnnnnnnnnnnnnnnnnnnnnnnnnnnnnnnnnnnnnnnnnnnnnnnnnnnnnnnnnnnnnnnnnnnnnnnnnnnnnnnnnnnnnnnnnnnnnnnnnnnnnnnnnnnnnnnnnnnnnnnnnnnnnnnnnnnnnnnnnnnnnnnnnnnnnnnnnnnnnnnnnnnnnnnnnnnnnnnnnnnnnnnnnnnnnnnnnnnnnnnnnnnnnnnnnnnnnnnnnnnnnnnnnnnnnnnnnnnnnnnnnnnnnnnnnnnnnnnnnnnnnnnnnnnnnnnnnnnnnnnnnnnnnnnnnnnnnnnnnnnnnnnnnnnnnnnnnnnnnnnnnnnnnnnnnnnnnnnnnnnnnnnnnnnnnnnnnnnnnnnnnnnnnnnnnnnnnnnnnnnnnnnnnnnnnnnnnnnnnnnnnnnnnnnnnnnnnnnnnnnnnnnnnnnnnnnnnnnnnnnnnnnnnnnnnnnnnnnnnnnnnnnnnnnnnnnnnnnnnnnnnnnnnnnnnnnnnnnnnnnnnnnnnnnnnnnnnnnnnnnnnnnnnnnnnnnnnnnnnnnnnnnnnnnnnnnnnnnnnnnnnnnnnnnnnnnnnnnnnnnnnnnnnnnnnnnnnnnnnnnnnnnnnnnnnnnnnnnnnnnnnnnnnnnnnnnnnnnnnnnnnnnnnnnnnnnnnnnnnnnnnnnnnnnnnnnnnnnnnnnnnnnnnnnnnnnnnnnnnnnnnnnnnnnnnnnnnnnnnnnnnnnnnnnnnnnnnnnnnnnnnnnnnnnnnnnnnnnnnnnnnnnnnnnnnnnnnnnnnnnnnnnnnnnnnnnnnnnnnnnnnnnnnnnnnnnnnnnnnnnnnnnnnnnnnnnnnnnnnnnnnnnnnnnnnnnnnnnnnnnnnnnnnnnnnnnnnnnnnnnnnnnnnnnnnnnnnnnnnnnnnnnnnnnnnnnnnnnnnnnnnnnnnnnnnnnnnnnnnnnnnnnnnnnnnnnnnnnnnnnnnnnnnnnnnnnnnnnnnnnnnnnnnnnnnnnnnnnnnnnnnnnnnnnnnnnnnnnnnnnnnnnnnnnnnnnnnnnnnnnnnnnnnnnnnnnnnnnnnnnnnnnnnnnnnnnnnnnnnnnnnnnnnnnnnnnnnnnnnnnnnnnnnnnnnnnnnnnnnnnnnnnnnnnnnnnnnnnnnnnnnnnnnnnnnnnnnnnnnnnnnnnnnnnnnnnnnnnnnnnnnnnnnnnnnnnnnnnnnnnnnnnnnnnnnnnnnnnnnnnnnnnnnnnnnnnnnnnnnnnnnnnnnnnnnnnnnnnnnnnnnnnnnnnnnnnnnnnnnnnnnnnnnnnnnnnnnnnnnnnnnnnnnnnnnnnnnnnnnnnnnnnnnnnnnnnnnnnnnnnnnnnnnnnnnnnnnnnnnnnnnnnnnnnnnnnnnnnnnnnnnnnnnnnnnnnnnnnnnnnnnnnnnnnnnnnnnnnnnnnnnnnnnnnnnnnnnnnnnnnnnnnnnnnnnnnnnnnnnnnnnnnnnnnnnnnnnnnnnnnnnnnnnnnnnnnnnnnnnnnnnnnnnnnnnnnnnnnnnnnnnnnnnnnnnnnnnnnnnnnnnnnnnnnnnnnnnnnnnnnnnnnnnnnnnnnnnnnnnnnnnnnnnnnnnnnnnnnnnnnnnnnnnnnnnnnnnnnnnnnnnnnnnnnnnnnnnnnnnnnnnnnnnnnnnnnnnnnnnnnnnnnnnnnnnnnnnnnnnnnnnnnnnnnnnnnnnnnnnnnnnnnnnnnnnnnnnnnnnnnnnnnnnnnnnnnnnnnnnnnnnnnnnnnnnnnnnnnnnnnnnnnnnnnnnnnnnnnnnnnnnnnnnnnnnnnnnnnnnnnnnnnnnnnnnnnnnnnnnnnnnnnnnnnnnnnnnnnnnnnnnnnnnnnnnnnnnnnnnnnnnnnnnnnnnnnnnnnnnnnnnnnnnnnnnnnnnnnnnnnnnnnnnnnnnnnnnnnnnnnnnnnnnnnnnnnnnnnnnnnnnnnnnnnnnnnnnnnnnnnnnnnnnnnnnnnnnnnnnnnnnnnnnnnnnnnnnnnnnnnnnnnnnnnnnnnnnnnnnnnnnnnnnnnnnnnnnnnnnnnnnnnnnnnnnnnnnnnnnnnnnnnnnnnnnnnnnnnnnnnnnnnnnnnnnnnnnnnnnnnnnnnnnnnnnnnnnnnnnnnnnnnnnnnnnnnnnnnnnnnnnnnnnnnnnnnnnnnnnnnnnnnnnnnnnnnnnnnnnnnnnnnnnnnnnnnnnnnnnnnnnnnnnnnnnnnnnnnnnnnnnnnnnnnnnnnnnnnnnnnnnnnnnnnnnnnnnnnnnnnnnnnnnnnnnnnnnnnnnnnnnnnnnnnnnnnnnnnnnnnnnnnnnnnnnnnnnnnnnnnnnnnnnnnnnnnnnnnnnnnnnnnnnnnnnnnnnnnnnnnnnnnnnnnnnnnnnnnnnnnnnnnnnnnnnnnnnnnnnnnnnnnnnnnnnnnnnnnnnnnnnnnnnnnnnnnnnnnnnnnnnnnnnnnnnnnnnnnnnnnnnnnnnnnnnnnnnnnnnnnnnnnnnnnnnnnnnnnnnnnnnnnnnnnnnnnnnnnnnnnnnnnnnnnnnnnnnnnnnnnnnnnnnnnnnnnnnnnnnnnnnnnnnnnnnnnnnnnnnnnnnnnnnnnnnnnnnnnnnnnnnnnnnnnnnnnnnnnnnnnnnnnnnnnnnnnnnnnnnnnnnnnnnnnnnnnnnnnnnnnnnnnnnnnnnnnnnnnnnnnnnnnnnnnnnnnnnnnnnnnnnnnnnnnnnnnnnnnnnnnnnnnnnnnnnnnnnnnnnnnnnnnnnnnnnnnnnnnnnnnnnnnnnnnnnnnnnnnnnnnnnnnnnnnnnnnnnnnnnnnnnnnnnnnnnnnnnnnnnnnnnnnnnnnnnnnnnnnnnnnnnnnnnnnnnnnnnnnnnnnnnnnnnnnnnnnnnnnnnnnnnnnnnnnnnnnnnnnnnnnnnnnnnnnnnnnnnnnnnnnnnnnnnnnnnnnnnnnnnnnnnnnnnnnnnnnnnnnnnnnnnnnnnnnnnnnnnnnnnnnnnnnnnnnnnnnnnnnnnnnnnnnnnnnnnnnnnnnnnnnnnnnnnnnnnnnnnnnnnnnnnnnnnnnnnnnnnnnnnnnnnnnnnnnnnnnnnnnnnnnnnnnnnnnnnnnnnnnnnnnnnnnnnnnnnnnnnnnnnnnnnnnnnnnnnnnnnnnnnnnnnnnnnnnnnnnnnnnnnnnnnnnnnnnnnnnnnnnnnnnnnnnnnnnnnnnnnnnnnnnnnnnnnnnnnnnnnnnnnnnnnnnnnnnnnnnnnnnnnnnnnnnnnnnnnnnnnnnnnnnnnnnnnnnnnnnnnnnnnnnnnnnnnnnnnnnnnnnnnnnnnnnnnnnnnnnnnnnnnnnnnnnnnnnnnnnnnnnnnnnnnnnnnnnnnnnnnnnnnnnnnnnnnnnnnnnnnnnnnnnnnnnnnnnnnnnnnnnnnnnnnnnnnnnnnnnnnnnnnnnnnnnnnnnnnnnnnnnnnnnnnnnnnnnnnnnnnnnnnnnnnnnnnnnnnnnnnnnnnnnnnnnnnnnnnnnnnnnnnnnnnnnnnnnnnnnnnnnnnnnnnnnnnnnnnnnnnnnnnnnnnnnnnnnnnnnnnnnnnnnnnnnnnnnnnnnnnnnnnnnnnnnnnnnnnnnnnnnnnnnnnnnnnnnnnnnnnnnnnnnnnnnnnnnnnnnnnnnnnnnnnnnnnnnnnnnnnnnnnnnnnnnnnnnnnnnnnnnnnnnnnnnnnnnnnnnnnnnnnnnnnnnnnnnnnnnnnnnnnnnnnnnnnnnnnnnnnnnnnnnnnnnnnnnnnnnnnnnnnnnnnnnnnnnnnnnnnnnnnnnnnnnnnnnnnnnnnnnnnnnnnnnnnnnnnnnnnnnnnnnnnnnnnnnnnnnnnnnnnnnnnnnnnnnnnnnnnnnnnnnnnnnnnnnnnnnnnnnnnnnnnnnnnnnnnnnnnnnnnnnnnnnnnnnnnnnnnnnnnnnnnnnnnnnnnnnnnnnnnnnnnnnnnnnnnnnnnnnnnnnnnnnnnnnnnnnnnnnnnnnnnnnnnnnnnnnnnnnnnnnnnnnnnnnnnnnnnnnnnnnnnnnnnnnnnnnnnnnnnnnnnnnnnnnnnnnnnnnnnnnnnnnnnnnnnnnnnnnnnnnnnnnnnnnnnnnnnnnnnnnnnnnnnnnnnnnnnnnnnnnnnnnnnnnnnnnnnnnnnnnnnnnnnnnnnnnnnnnnnnnnnnnnnnnnnnnnnnnnnnnnnnnnnnnnnnnnnnnnnnnnnnnnnnnnnnnnnnnnnnnnnnnnnnnnnnnnnnnnnnnnnnnnnnnnnnnnnnnnnnnnnnnnnnnnnnnnnnnnnnnnnnnnnnnnnnnnnnnnnnnnnnnnnnnnnnnnnnnnnnnnnnnnnnnnnnnnnnnnnnnnnnnnnnnnnnnnnnnnnnnnnnnnnnnnnnnnnnnnnnnnnnnnnnnnnnnnnnnnnnnnnnnnnnnnnnnnnnnnnnnnnnnnnnnnnnnnnnnnnnnnnnnnnnnnnnnnnnnnnnnnnnnnnnnnnnnnnnnnnnnnnnnnnnnnnnnnnnnnnnnnnnnnnnnnnnnnnnnnnnnnnnnnnnnnnnnnnnnnnnnnnnnnnnnnnnnnnnnnnnnnnnnnnnnnnnnnnnnnnnnnnnnnnnnnnnnnnnnnnnnnnnnnnnnnnnnnnnnnnnnnnnnnnnnnnnnnnnnnnnnnnnnnnnnnnnnnnnnnnnnnnnnnnnnnnnnnnnnnnnnnnnnnnnnnnnnnnnnnnnnnnnnnnnnnnnnnnnnnnnnnnnnnnnnnnnnnnnnnnnnnnnnnnnnnnnnnnnnnnnnnnnnnnnnnnnnnnnnnnnnnnnnnnnnnnnnnnnnnnnnnnnnnnnnnnnnnnnnnnnnnnnnnnnnnnnnnnnnnnnnnnnnnnnnnnnnnnnnnnnnnnnnnnnnnnnnnnnnnnnnnnnnnnnnnnnnnnnnnnnnnnnnnnnnnnnnnnnnnnnnnnnnnnnnnnnnnnnnnnnnnnnnnnnnnnnnnnnnnnnnnnnnnnnnnnnnnnnnnnnnnnnnnnnnnnnnnnnnnnnnnnnnnnnnnnnnnnnnnnnnnnnnnnnnnnnnnnnnnnnnnnnnnnnnnnnnnnnnnnnnnnnnnnnnnnnnnnnnnnnnnnnnnnnnnnnnnnnnnnnnnnnnnnnnnnnnnnnnnnnnnnnnnnnnnnnnnnnnnnnnnnnnnnnnnnnnnnnnnnnnnnnnnnnnnnnnnnnnnnnnnnnnnnnnnnnnnnnnnnnnnnnnnnnnnnnnnnnnnnnnnnnnnnnnnnnnnnnnnnnnnnnnnnnnnnnnnnnnnnnnnnnnnnnnnnnnnnnnnnnnnnnnnnnnnnnnnnnnnnnnnnnnnnnnnnnnnnnnnnnnnnnnnnnnnnnnnnnnnnnnnnnnnnnnnnnnnnnnnnnnnnnnnnnnnnnnnnnnnnnnnnnnnnnnnnnnnnnnnnnnnnnnnnnnnnnnnnnnnnnnnnnnnnnnnnnnnnnnnnnnnnnnnnnnnnnnnnnnnnnnnnnnnnnnnnnnnnnnnnnnnnnnnnnnnnnnnnnnnnnnnnnnnnnnnnnnnnnnnnnnnnnnnnnnnnnnnnnnnnnnnnnnnnnnnnnnnnnnnnnnnnnnnnnnnnnnnnnnnnnnnnnnnnnnnnnnnnnnnnnnnnnnnnnnnnnnnnnnnnnnnnnnnnnnnnnnnnnnnnnnnnnnnnnnnnnnnnnnnnnnnnnnnnnnnnnnnnnnnnnnnnnnnnnnnnnnnnnnnnnnnnnnnnnnnnnnnnnnnnnnnnnnnnnnnnnnnnnnnnnnnnnnnnnnnnnnnnnnnnnnnnnnnnnnnnnnnnnnnnnnnnnnnnnnnnnnnnnnnnnnnnnnnnnnnnnnnnnnnnnnnnnnnnnnnnnnnnnnnnnnnnnnnnnnnnnnnnnnnnnnnnnnnnnnnnnnnnnnnnnnnnnnnnnnnnnnnnnnnnnnnnnnnnnnnnnnnnnnnnnnnnnnnnnnnnnnnnnnnnnnnnnnnnnnnnnnnnnnnnnnnnnnnnnnnnnnnnnnnnnnnnnnnnnnnnnnnnnnnnnnnnnnnnnnnnnnnnnnnnnnnnnnnnnnnnnnnnnnnnnnnnnnnnnnnnnnnnnnnnnnnnnnnnnnnnnnnnnnnnnnnnnnnnnnnnnnnnnnnnnnnnnnnnnnnnnnnnnnnnnnnnnnnnnnnnnnnnnnnnnnnnnnnnnnnnnnnnnnnnnnnnnnnnnnnnnnnnnnnnnnnnnnnnnnnnnnnnnnnnnnnnnnnnnnnnnnnnnnnnnnnnnnnnnnnnnnnnnnnnnnnnnnnnnnnnnnnnnnnnnnnnnnnnnnnnnnnnnnnnnnnnnnnnnnnnnnnnnnnnnnnnnnnnnnnnnnnnnnnnnnnnnnnnnnnnnnnnnnnnnnnnnnnnnnnnnnnnnnnnnnnnnnnnnnnnnnnnnnnnnnnnnnnnnnnnnnnnnnnnnnnnnnnnnnnnnnnnnnnnnnnnnnnnnnnnnnnnnnnnnnnnnnnnnnnnnnnnnnnnnnnnnnnnnnnnnnnnnnnnnnnnnnnnnnnnnnnnnnnnnnnnnnnnnnnnnnnnnnnnnnnnnnnnnnnnnnnnnnnnnnnnnnnnnnnnnnnnnnnnnnnnnnnnnnnnnnnnnnnnnnnnnnnnnnnnnnnnnnnnnnnnnnnnnnnnnnnnnnnnnnnnnnnnnnnnnnnnnnnnnnnnnnnnnnnnnnnnnnnnnnnnnnnnnnnnnnnnnnnnnnnnnnnnnnnnnnnnnnnnnnnnnnnnnnnnnnnnnnnnnnnnnnnnnnnnnnnnnnnnnnnnnnnnnnnnnnnnnnnnnnnnnnnnnnnnnnnnnnnnnnnnnnnnnnnnnnnnnnnnnnnnnnnnnnnnnnnnnnnnnnnnnnnnnnnnnnnnnnnnnnnnnnnnnnnnnnnnnnnnnnnnnnnnnnnnnnnnnnnnnnnnnnnnnnnnnnnnnnnnnnnnnnnnnnnnnnnnnnnnnnnnnnnnnnnnnnnnnnnnnnnnnnnnnnnnnnnnnnnnnnnnnnnnnnnnnnnnnnnnnnnnnnnnnnnnnnnnnnnnnnnnnnnnnnnnnnnnnnnnnnnnnnnnnnnnnnnnnnnnnnnnnnnnnnnnnnnnnnnnnnnnnnnnnnnnnnnnnnnnnnnnnnnnnnnnnnnnnnnnnnnnnnnnnnnnnnnnnnnnnnnnnnnnnnnnnnnnnnnnnnnnnnnnnnnnnnnnnnnnnnnnnnnnnnnnnnnnnnnnnnnnnnnnnnnnnnnnnnnnnnnnnnnnnnnnnnnnnnnnnnnnnnnnnnnnnnnnnnnnnnnnnnnnnnnnnnnnnnnnnnnnnnnnnnnnnnnnnnnnnnnnnnnnnnnnnnnnnnnnnnnnnnnnnnnnnnnnnnnnnnnnnnnnnnnnnnnnnnnnnnnnnnnnnnnnnnnnnnnnnnnnnnnnnnnnnnnnnnnnnnnnnnnnnnnnnnnnnnnnnnnnnnnnnnnnnnnnnnnnnnnnnnnnnnnnnnnnnnnnnnnnnnnnnnnnnnnnnnnnnnnnnnnnnnnnnnnnnnnnnnnnnnnnnnnnnnnnnnnnnnnnnnnnnnnnnnnnnnnnnnnnnnnnnnnnnnnnnnnnnnnnnnnnnnnnnnnnnnnnnnnnnnnnnnnnnnnnnnnnnnnnnnnnnnnnnnnnnnnnnnnnnnnnnnnnnnnnnnnnnnnnnnnnnnnnnnnnnnnnnnnnnnnnnnnnnnnnnnnnnnnnnnnnnnnnnnnnnnnnnnnnnnnnnnnnnnnnnnnnnnnnnnnnnnnnnnnnnnnnnnnnnnnnnnnnnnnnnnnnnnnnnnnnnnnnnnnnnnnnnnnnnnnnnnnnnnnnnnnnnnnnnnnnnnnnnnnnnnnnnnnnnnnnnnnnnnnnnnnnnnnnnnnnnnnnnnnnnnnnnnnnnnnnnnnnnnnnnnnnnnnnnnnnnnnnnnnnnnnnnnnnnnnnnnnnnnnnnnnnnnnnnnnnnnnnnnnnnnnnnnnnnnnnnnnnnnnnnnnnnnnnnnnnnnnnnnnnnnnnnnnnnnnnnnnnnnnnnnnnnnnnnnnnnnnnnnnnnnnnnnnnnnnnnnnnnnnnnnnnnnnnnnnnnnnnnnnnnnnnnnnnnnnnnnnnnnnnnnnnnnnnnnnnnnnnnnnnnnnnnnnnnnnnnnnnnnnnnnnnnnnnnnnnnnnnnnnnnnnnnnnnnnnnnnnnnnnnnnnnnnnnnnnnnnnnnnnnnnnnnnnnnnnnnnnnnnnnnnnnnnnnnnnnnnnnnnnnnnnnnnnnnnnnnnnnnnnnnnnnnnnnnnnnnnnnnnnnnnnnnnnnnnnnnnnnnnnnnnnnnnnnnnnnnnnnnnnnnnnnnnnnnnnnnnnnnnnnnnnnnnnnnnnnnnnnnnnnnnnnnnnnnnnnnnnnnnnnnnnnnnnnnnnnnnnnnnnnnnnnnnnnnnnnnnnnnnnnnnnnnnnnnnnnnnnnnnnnnnnnnnnnnnnnnnnnnnnnnnnnnnnnnnnnnnnnnnnnnnnnnnnnnnnnnnnnnnnnnnnnnnnnnnnnnnnnnnnnnnnnnnnnnnnnnnnnnnnnnnnnnnnnnnnnnnnnnnnnnnnnnnnnnnnnnnnnnnnnnnnnnnnnnnnnnnnnnnnnnnnnnnnnnnnnnnnnnnnnnnnnnnnnnnnnnnnnnnnnnnnnnnnnnnnnnnnnnnnnnnnnnnnnnnnnnnnnnnnnnnnnnnnnnnnnnnnnnnnnnnnnnnnnnnnnnnnnnnnnnnnnnnnnnnnnnnnnnnnnnnnnnnnnnnnnnnnnnnnnnnnnnnnnnnnnnnnnnnnnnnnnnnnnnnnnnnnnnnnnnnnnnnnnnnnnnnnnnnnnnnnnnnnnnnnnnnnnnnnnnnnnnnnnnnnnnnnnnnnnnnnnnnnnnnnnnnnnnnnnnnnnnnnnnnnnnnnnnnnnnnnnnnnnnnnnnnnnnnnnnnnnnnnnnnnnnnnnnnnnnnnnnnnnnnnnnnnnnnnnnnnnnnnnnnnnnnnnnnnnnnnnnnnnnnnnnnnnnnnnnnnnnnnnnnnnnnnnnnnnnnnnnnnnnnnnnnnnnnnnnnnnnnnnnnnnnnnnnnnnnnnnnnnnnnnnnnnnnnnnnnnnnnnnnnnnnnnnnnnnnnnnnnnnnnnnnnnnnnnnnnnnnnnnnnnnnnnnnnnnnnnnnnnnnnnnnnnnnnnnnnnnnnnnnnnnnnnnnnnnnnnnnnnnnnnnnnnnnnnnnnnnnnnnnnnnnnnnnnnnnnnnnnnnnnnnnnnnnnnnnnnnnnnnnnnnnnnnnnnnnnnnnnnnnnnnnnnnnnnnnnnnnnnnnnnnnnnnnnnnnnnnnnnnnnnnnnnnnnnnnnnnnnnnnnnnnnnnnnnnnnnnnnnnnnnnnnnnnnnnnnnnnnnnnnnnnnnnnnnnnnnnnnnnnnnnnnnnnnnnnnnnnnnnnnnnnnnnnnnnnnnnnnnnnnnnnnnnnnnnnnnnnnnnnnnnnnnnnnnnnnnnnnnnnnnnnnnnnnnnnnnnnnnnnnnnnnnnnnnnnnnnnnnnnnnnnnnnnnnnnnnnnnnnnnnnnnnnnnnnnnnnnnnnnnnnnnnnnnnnnnnnnnnnnnnnnnnnnnnnnnnnnnnnnnnnnnnnnnnnnnnnnnnnnnnnnnnnnnnnnnnnnnnnnnnnnnnnnnnnnnnnnnnnnnnnnnnnnnnnnnnnnnnnnnnnnnnnnnnnnnnnnnnnnnnnnnnnnnnnnnnnnnnnnnnnnnnnnnnnnnnnnnnnnnnnnnnnnnnnnnnnnnnnnnnnnnnnnnnnnnnnnnnnnnnnnnnnnnnnnnnnnnnnnnnnnnnnnnnnnnnnnnnnnnnnnnnnnnnnnnnnnnnnnnnnnnnnnnnnnnnnnnnnnnnnnnnnnnnnnnnnnnnnnnnnnnnnnnnnnnnnnnnnnnnnnnnnnnnnnnnnnnnnnnnnnnnnnnnnnnnnnnnnnnnnnnnnnnnnnnnnnnnnnnnnnnnnnnnnnnnnnnnnnnnnnnnnnnnnnnnnnnnnnnnnnnnnnnnnnnnnnnnnnnnnnnnnnnnnnnnnnnnnnnnnnnnnnnnnnnnnnnnnnnnnnnnnnnnnnnnnnnnnnnnnnnnnnnnnnnnnnnnnnnnnnnnnnnnnnnnnnnnnnnnnnnnnnnnnnnnnnnnnnnnnnnnnnnnnnnnnnnnnnnnnnnnnnnnnnnnnnnnnnnnnnnnnnnnnnnnnnnnnnnnnnnnnnnnnnnnnnnnnnnnnnnnnnnnnnnnnnnnnnnnnnnnnnnnnnnnnnnnnnnnnnnnnnnnnnnnnnnnnnnnnnnnnnnnnnnnnnnnnnnnnnnnnnnnnnnnnnnnnnnnnnnnnnnnnnnnnnnnnnnnnnnnnnnnnnnnnnnnnnnnnnnnnnnnnnnnnnnnnnnnnnnnnnnnnnnnnnnnnnnnnnnnnnnnnnnnnnnnnnnnnnnnnnnnnnnnnnnnnnnnnnnnnnnnnnnnnnnnnnnnnnnnnnnnnnnnnnnnnnnnnnnnnnnnnnnnnnnnnnnnnnnnnnnnnnnnnnnnnnnnnnnnnnnnnnnnnnnnnnnnnnnnnnnnnnnnnnnnnnnnnnnnnnnnnnnnnnnnnnnnnnnnnnnnnnnnnnnnnnnnnnnnnnnnnnnnnnnnnnnnnnnnnnnnnnnnnnnnnnnnnnnnnnnnnnnnnnnnnnnnnnnnnnnnnnnnnnnnnnnnnnnnnnnnnnnnnnnnnnnnnnnnnnnnnnnnnnnnnnnnnnnnnnnnnnnnnnnnnnnnnnnnnnnnnnnnnnnnnnnnnnnnnnnnnnnnnnnnnnnnnnnnnnnnnnnnnnnnnnnnnnnnnnnnnnnnnnnnnnnnnnnnnnnnnnnnnnnnnnnnnnnnnnnnnnnnnnnnnnnnnnnnnnnnnnnnnnnnnnnnnnnnnnnnnnnnnnnnnnnnnnnnnnnnnnnnnnnnnnnnnnnnnnnnnnnnnnnnnnnnnnnnnnnnnnnnnnnnnnnnnnnnnnnnnnnnnnnnnnnnnnnnnnnnnnnnnnnnnnnnnnnnnnnnnnnnnnnnnnnnnnnnnnnnnnnnnnnnnnnnnnnnnnnnnnnnnnnnnnnnnnnnnnnnnnnnnnnnnnnnnnnnnnnnnnnnnnnnnnnnnnnnnnnnnnnnnnnnnnnnnnnnnnnnnnnnnnnnnnnnnnnnnnnnnnnnnnnnnnnnnnnnnnnnnnnnnnnnnnnnnnnnnnnnnnnnnnnnnnnnnnnnnnnnnnnnnnnnnnnnnnnnnnnnnnnnnnnnnnnnnnnnnnnnnnnnnnnnnnnnnnnnnnnnnnnnnnnnnnnnnnnnnnnnnnnnnnnnnnnnnnnnnnnnnnnnnnnnnnnnnnnnnnnnnnnnnnnnnnnnnnnnnnnnnnnnnnnnnnnnnnnnnnnnnnnnnnnnnnnnnnnnnnnnnnnnnnnnnnnnnnnnnnnnnnnnnnnnnnnnnnnnnnnnnnnnnnnnnnnnnnnnnnnnnnnnnnnnnnnnnnnnnnnnnnnnnnnnnnnnnnnnnnnnnnnnnnnnnnnnnnnnnnnnnnnnnnnnnnnnnnnnnnnnnnnnnnnnnnnnnnnnnnnnnnnnnnnnnnnnnnnnnnnnnnnnnnnnnnnnnnnnnnnnnnnnnnnnnnnnnnnnnnnnnnnnnnnnnnnnnnnnnnnnnnnnnnnnnnnnnnnnnnnnnnnnnnnnnnnnnnnnnnnnnnnnnnnnnnnnnnnnnnnnnnnnnnnnnnnnnnnnnnnnnnnnnnnnnnnnnnnnnnnnnnnnnnnnnnnnnnnnnnnnnnnnnnnnnnnnnnnnnnnnnnnnnnnnnnnnnnnnnnnnnnnnnnnnnnnnnnnnnnnnnnnnnnnnnnnnnnnnnnnnnnnnnnnnnnnnnnnnnnnnnnnnnnnnnnnnnnnnnnnnnnnnnnnnnnnnnnnnnnnnnnnnnnnnnnnnnnnnnnnnnnnnnnnnnnnnnnnnnnnnnnnnnnnnnnnnnnnnnnnnnnnnnnnnnnnnnnnnnnnnnnnnnnnnnnnnnnnnnnnnnnnnnnnnnnnnnnnnnnnnnnnnnnnnnnnnnnnnnnnnnnnnnnnnnnnnnnnnnnnnnnnnnnnnnnnnnnnnnnnnnnnnnnnnnnnnnnnnnnnnnnnnnnnnnnnnnnnnnnnnnnnnnnnnnnnnnnnnnnnnnnnnnnnnnnnnnnnnnnnnnnnnnnnnnnnnnnnnnnnnnnnnnnnnnnnnnnnnnnnnnnnnnnnnnnnnnnnnnnnnnnnnnnnnnnnnnnnnnnnnnnnnnnnnnnnnnnnnnnnnnnnnnnnnnnnnnnnnnnnnnnnnnnnnnnnnnnnnnnnnnnnnnnnnnnnnnnnnnnnnnnnnnnnnnnnnnnnnnnnnnnnnnnnnnnnnnnnnnnnnnnnnnnnnnnnnnnnnnnnnnnnnnnnnnnnnnnnnnnnnnnnnnnnnnnnnnnnnnnnnnnnnnnnnnnnnnnnnnnnnnnnnnnnnnnnnnnnnnnnnnnnnnnnnnnnnnnnnnnnnnnnnnnnnnnnnnnnnnnnnnnnnnnnnnnnnnnnnnnnnnnnnnnnnnnnnnnnnnnnnnnnnnnnnnnnnnnnnnnnnnnnnnnnnnnnnnnnnnnnnnnnnnnnnnnnnnnnnnnnnnnnnnnnnnnnnnnnnnnnnnnnnnnnnnnnnnnnnnnnnnnnnnnnnnnnnnnnnnnnnnnnnnnnnnnnnnnnnnnnnnnnnnnnnnnnnnnnnnnnnnnnnnnnnnnnnnnnnnnnnnnnnnnnnnnnnnnnnnnnnnnnnnnnnnnnnnnnnnnnnnnnnnnnnnnnnnnnnnnnnnnnnnnnnnnnnnnnnnnnnnnnnnnnnnnnnnnnnnnnnnnnnnnnnnnnnnnnnnnnnnnnnnnnnnnnnnnnnnnnnnnnnnnnnnnnnnnnnnnnnnnnnnnnnnnnnnnnnnnnnnnnnnnnnnnnnnnnnnnnnnnnnnnnnnnnnnnnnnnnnnnnnnnnnnnnnnnnnnnnnnnnnnnnnnnnnnnnnnnnnnnnnnnnnnnnnnnnnnnnnnnnnnnnnnnnnnnnnnnnnnnnnnnnnnnnnnnnnnnnnnnnnnnnnnnnnnnnnnnnnnnnnnnnnnnnnnnnnnnnnnnnnnnnnnnnnnnnnnnnnnnnnnnnnnnnnnnnnnnnnnnnnnnnnnnnnnnnnnnnnnnnnnnnnnnnnnnnnnnnnnnnnnnnnnnnnnnnnnnnnnnnnnnnnnnnnnnnnnnnnnnnnnnnnnnnnnnnnnnnnnnnnnnnnnnnnnnnnnnnnnnnnnnnnnnnnnnnnnnnnnnnnnnnnnnnnnnnnnnnnnnnnnnnnnnnnnnnnnnnnncagcgcttgacaccatattccctggatgttagatcattggtgtcgtgtggggatgtagctcagcgggagagcaccgcgttcgcaacgcgggggtcgagggttcaaatcccttcatctccaccaaagaaatcaataggttaggccaacactgcctagccttttttgtggaaaaaccccgatttgtttcctttttgttaccacaatcctacttgaacccgcttgcagtgtagattttcgttgtcccattttcgaatgtcagccgatcgatggcgtctaccagttcctcgtctgagatatagccgtatcgctcgtcaacccgttttcctcgcagagcgtgccccatgatcatctcggctatctgatccggcactccgctacgccgcgcattgctgcgccacgtatgccgaagatcgtgaaatcggggccacggtttctccagccccaaagactgacatgcccggtcccacggattttttgtagcctcgaccccgatcggccggatgcctttcttatcctgcaacaggaaaaccctatcgcttgcgaggtatgggacacgcattgcttcttcgagaatggggacaaagtcccgatgaacaggaatcctcttccagtgactttccttcgtttctgacggggtcaaggtgagaatccgtttcgaaagatcaacctgtcgcctgtttaaagaaaggatctcgccccggcgcatcccagaatagaaagaggcccaaatcaaacgctgaaaccaagtagggcaggcttgcgctatactcccgacatctccaaaggaaatataaacctgtcgttcaccggacttctgactgagattcggcaccaggcgggccgggtttgcctcaacaagccgatattccaagagagtatggaagattttcgacagcgttcctttctctcggtttatcgtcgcaggggcggccccctgagctgatctatgggcgatatatgttcgaatctctggcacccatagattcttcatcggcgtgtccttaccgaaataaccaacgagatgtgtcagacatatctcgtaacggctacgctctttggtatccgccacgctcggcgatctcaggaaaatctctgcgctcttccacaaggtcaggacagactccggctgttcgacaatctgagtttcgagcttgagggttttgggtagctcccattcctgattgttaaacatccgcacaagggcctcacgggcaatgtcatccaaaatgttgtagttcccagtgcggcacgcacgcatcaaaagtgcctcttgctcttcagcgtctttcctgttcgttgcatcaactcgcagaccgatttttcgccccccaaaagggcgaaaataaacgtaccatcggccccgcttcttgcctctctttatcaccgccaatttcgcatctccttatgcagcgcccgcggtgaaacctgagtcgatccgctaacacctccctccgtatgtgcctgttgtttgggcaaaggtaacaaggagcgctcactcttttcaagtcttttcggtcgtctcgatttacgagttgcctcggcaagaaacaagtcgatgtgttcctgagtgaaacgtcgtcgcctatttgtgatctcgatgcacgacagccgctcttctcgcacgagtcgatgcacctcctttttggagatctgcaacagctcgctgacctcaccaacactgtaaattttcatcccaatcctccatacttctcacatacccatggtagttcgggtattcttattcgttcaagttctcgcatccccggcaccgcccttcacctacgacggtgctgactgatgcagtgatatttggtgaaaaacccctacctgtaatgcgttttgaggtggtgtccgtgtcggataaggcttcgggtcgcctccctggtgctttgcctgaaaaccgctcacccttggccttattgcgccctgagaaagcgatgccatgcaagggacattctgggctcgcacacatcgacaagggatgcccgttgaggcaaacgtgccgacaaaacccccgtactctcttaccaataaaggctttccgaaattcaggcttcattaaaccatctccccctctccgtggcgctggccgccgatatgtgtccaacggacatcccgtgcaacagctgagatcgttgggcgtgtcgccccggcaaaatcggcagtattggccgatgcccttataaacgtcgctcttgttcgccatatctacccccccaatcagacacacctgccttgcaaagtgtgtataagtgtttccccgtttcccttttttcataaaaccccgatgaatacttacctagaagagggaaacacctgttcgaaaaccgtttccctcccgtttcccagtgtttcctttttccaggcatgagggaaacgagggaaacgcctgggaaacacccccgtttccctttaaaacccgcattaatattgattgaatatatatttgggaaacagggaaacggtaatatccccttttgccgggtcatggttcgcccctctcgggttttccgtacatggcatcctctggagggaggagccatttcccctgaatgtcacgttgcgcctgaccaaccttttccatcttatagagaagcgctttggtcgcaccgtaatccttgtggagagcatctttgatctcagtgatagataggggccgatccgcttctttcaggacatctcggatctgcaccctctctctactcatttgaagttcggcgctatccccgagccacgtccaaagaccccgctctttatcgaattgcagatcgcccttgcggtcctcggtatccctccccgtgatgaacagggttgctttcgattgatgccggtcaggctttttcaagttccacaatgtgtccgcacaccctgtcaacccggtactgcccgagacattgtgcaacgggtcagatgactcctgttttcggtcgtggtggattaaaatgatcgcaatggaatatgcggcggccaattgttgaaacggctccaggtctttgtaatccccctcatatatggagtcatgcttccccttgatcggcctgatcttttgaagcgtgtcgatgacgataaggcgtgcatcatcttggtgccccttgatccacgtttccaggaagtctatggtattcgggcctttcccgccgcccatgagagggatgtcgttacagaaatacgccctggttggtggagatgcgtcccccaaaatcttgtccaagcggctcttgaagcggcgtggactgtcttccaaggcacagtgcagcacactcccaaccgatgtctcgaagtgcccgagtgcctgcatccccgacgcaatcgcaacggataggcccattgtgagccagctcttcccgatctttggagccccactgaggatggccaggccttccgggagaatatcctcgatgatgtatctcggctccggtagttccatctctacgagggttgcgaaggatatgatcgaaggggccttgtcgctggcaggcgatgcttcagtcggttcggtcggtttctcttgtggctgctgatacaatgaagtgcgctgaatgatctcgttcaactcggcctgaacctgttcccggctcttgccccgtgcccagtcactaaagtccgagccatcgtcagcgaatggatgcaagtcgatgattttcacggatctgcagtgtctgctcaggaactcggctttttctttcgcgtaccggcggcccgctgtgtcggcatccgcaaagatgatgatgtcgctatccctgagaggctcgtgaatgctggcttcagtgcagtgctttaggaatcctgattggttcggaaatgttgtgggtaaatatccgtaagatagggctgtctcagcatccctctcaccctcgcaaacaaacaccgtctcaccgggtctgttcacgagcaggtgcacgttgtagagcgtgggtcgcaccccttccattttccaggtgtaagatccatcaggagcgatgccagtttgcatgaaccggtcacccttaacctcagtgtcgaagcggatcttcgccgatagaggatggccgtgttcatcgcagtaggtgtaagtgttccggatttttctttgccgatgcgacgtctttgaggtttgagttatggttgttttgtggctgccattcccggaaggcgtgatgcccaattcctgacatgattccttgaacgagagtccctttgtccactgcaaatactcgatcccgtcaccctttgcatcgcattggcggcaccagtatcgtccctgttgcggccagactctgaatcggtcattaccaccgcattttggacacggtcctgcgtattcacctccatcggttgtcgctttccattttacggtcgtatatcgattaattagctcaaggaattggtttccattgattttttgcgatttcatcgctatacttcccccaccataaaaacccaagaatgtaataattgttccggcctcccagccggatttttctttgtttacggttttctttcaggcaacctgtggatccaatcctctaggtcttctcggctgcaccgcaagagacgtccccctggggttgtgcgaaaagttggcccctcgccttgttcgagccatcgagcgagcgttcgaaggctgacccccagcatttgcgccacttgggttttattcagcatcatctccatttttcttctcccttctaccttccatgacaggcggtttatggtaaaaaaaatcactgggcatttttaacgaattcgagccatcggcgggcacttacgaacagatgagattcacatgggccgggcccaagatagtcctctgcttcactaagaaacaggctctcgggcatgaaccggatcagtcgccgaggcagtcgagacccatgagcccagtcgagaacacagtccgcaaagcaataaaactcttggtgctcgatatattcctgcatcggccgatcactcaaaggctgaaaattctcaaacacgattggggtctttttcatttgctgcccacctccccccccgtggactgaaacatcgttaaatcggacaccgtgcgaaaatagcgtatgcagaatgcccacaacaacctggtcggattcgctcaagacacaacctctgccaggtccgcacggaggggcgacgtaaacctctgggcggaaaactcctgcggtcatccattgaaaaatcgtgttgggtttgatgaatggaaacactgtctttgtcaccgatctaatcgttttcataatattatactacctgctatggcgtgcggtgtcaagccataaaaaggaaatataaaaacaaacagttaagataaacaaacaattaaaagttgtggggaaattgggaagtttggtgagatgtcgccccccaaaggatagggggtagggggggtattttccggatagggggtggggtgaggcagtcggaggggaccggggactattgccccagttgatgaagcgaaggtattgttggtttcttctgggggtgtctaatcccacagcgctatcgggccttcgatatccatctccatcgtctccccgcacctcggacaagggcccggatcattccatggcgttacatcctttgccccacagaccgggcatgacaagtctgggaggaaatcgtgcctgagtctcgtcgggttatgccgcagcactccgctggggtccgtagaaataaggcaatcgctgagtccatggcaatgtggacatgagaccgtttgaaccactgactcaaatccgcagtcaatgccgcctgaaatgtgctcaaccctgtaaccgcaatcagggcataggaaagaaagcgatctacccatgtgtgcctcctctgaatttcagtcttccacgattgtttttaatgccttcaaatcggtatcgccatgatcgttgccgccaggccatcgagctgtttctgctgctctctccaaaacttgaccagcaacgactcacacttccttgcggccaactcttgactcccggcaaagagaaaatgcgtgccatatctgacctcaaatgcgctgatgctctccaccgctgccctagggttaagttggctccgatagttgcctgttgcgagttgcgcgtatccttcctccacgatgacggcaaagtaatccaatgcttgtgaccgctccagttctcgctcgaacctggcccggcccttgcccaggcatccaaccaggtcatcaagtgtttttcgttcgattgcgatcatggtttcgagcccgtccacgctatagtctcccgtgtccagcttcctgacgatcatgggggccttgaaatactcatcccaggcgaccgctggttctctcgaatcctttatgaggaccggcccctccatacctcatccccccaaaccactaattttacgaccagcactccagcaagactagacagactcgtccctgaactcttcgatgcaccctgccaaatacagatagtctcgggcatcagggtctccattttcaatacgggtccgacattcccccaagatctcccgccatgatctcattgaaaaaacttctatctcacgttcactatcaacatcccaacatcgccgcttgaacatcacgccaaactcaccgattgcaaatgtgtctaacaaccgctccagaaccacataagcattgcggagggagtggggagcgctgcgataatcatcaagattgaatacgctgccatacccatggtggttcagaaaatcctttgcgtcactgaatccacaataccgacccagaaattctgtgtgcccggaaatacaatgatccgaccacaagatacactcggaggctagactggaatactcccacttataatcgtcatcgacctgactgacgaataacataaggtccccataggcattggatagctcctcaagtgtaatctccggcaacattttcggattccgcgcattttcctgttctaagatccgctcgcttttcatgatcctctactgttgtttcctcgtcgtgattttcttaagatccggtgtccttatcgagttcaaaggacagcttcggctgcccgaagaagtgccagagtgctgagtccacaatatgagaaactgaaacgccgtcttggtacatctcctgaagtctatcatagagaacaccgtcgatcgtgatggctaacttctcccggcgccccactttgtgctttttaacgatcggtgctcgtggtgccatccgctgtgtcatcgctcctcctgattcgttcatcgagcatttcttttaaccggcccagttggtcgggtgtttgttgcctcaaatccttcagtagctcctgaaactcggggctctcgtcaatcggtgggagcgccctcctgcgttttttctttgccatggtgtcctccctcttatgcagccttgagaaactgtcgcacggtgcccctcgtaaactctctcccagccctgttgaacagtccctcagacgccagcttggtgatgatttttctctcagagtatccttgactgtggagccgctggatgcgctgaatgacccgctgctcatcagcattctcgatcacgttcccggcatcatcgaactggaacccatacggcgcatgacgggaaacacgacccccgagctctcgtttccgagcaagtgcaaaacgggtattcagtgcgatctttttccgctcgaatgtggccatcgccgcccgcatcgtgaacagcatctcctgggccgggtcggtcagatccacttcaccgccttcggataccaggtgcagcttgactccctttttggcgcattgcttgcccagccggatcgccccctcagtctccctgttgagccgatcgagcttcaccgtgagcaggtgctggacgttcttccttgagacgagctcttggatctctttgaacttggggcggtcctcgtctttaccggatgcaccctcgactccgacatggacaatttcaaggcccagaactgccgcatactgacggcaccgggattcctgcgcctcaaggctgatcccgtgctttcgctgctcatcggtgcttacccggcaatagatcgctgctctcatgggcctgacctccataataaggattgaaaacatcatacccccgcacttatcagttgtcaacagaaacaatattcttatacaactaatatatcttttctaactcttattacattacgtattttcaagaaattggtactcaaccgttcccttgcggaccagtttgcggactcccgtccgtgttacattctctcaagaggctgaatggtttgcgcattcaggctgtcgccccggaggtcgtgtcgaccctcgcaatggaaaactcggcttcgcaggatcgccgtagtcgcacgatctcccccaggcaacaacaaggtttacccggaggtcataggcccggaaatcgccccatattgcggcagtcgtcctctgtggtcctttcccaaaaaacctcattaataaacgctaaaatacttttttagattcgaatgactttttttgtcgtacttgatgactcgtttgtcctaatttgacacatgttactgatattttgtccccccgaggggagaaaggagatgcgaagatgatgaggatgatattgatagcggttattttgacgatgtttgcaggatctgggtggggacaaaataagcaggtccgtgatgccaatggtcgccttgtggagacttggagccaaaagggaaacaccacgcaggtgcgggataaaaatggtagtttgcttgaaacaaggacacagcacggcggcaacattgatgttcgggaccgcaacggacggcttataagaacagagaagattggcaagtgacttgccactgggcaattagcagatggttgacttctgaagttttgtcgctctcgtcctcagagggggctctatttatcttgagcccatgggcccttaagataaaaataagcaagtgttttcgccatctaagaactcccgtccctctggtctgtgattccaatgttgctacgatttagagcgcgttgtactggccaacacgaacaaaaaatgacgacaacattaaaaaataacttctcatttgtgtcctcatttgacaatttggtttggtatcagtttcggaaaaccctatctgtgcgggggcgatctgaagtggtcccggtcatagaagcacacgtaacacttttccatcagtcaccactgaaactcgttgagcgaagaactccaaagcaaccgcaaggggaacaaatgagtatcaaggatcaaaaagggaattcctggaacccagatcaaataatgattgcggaccgagtcttgccttactattttctcagacgaaaggaggaccatgacgcagaaaaccgatcactataacctgttgttagaggattggattcccgtactttggaacgatggtcgatacagccgggtcggaatcattgaagcactcacgcaatcaggccgaattcgacagattgcttcctcaaacccaatgggtcgtatcgcgattgtaagatttctgctggctttactgtattggtgccgagggaatccgactgaagggagggaatcaggctttcatacttctttccctgaaacgtggttctcgaaattggacgccaaccaaagcctattttcgctcttcagagacgagaaacgattctatcagtttccaccttccaagaatgccaagaagctctctgcaaattatctaatccatgagataccaacggggaccaacaagaggcattttcgccactctaccgatggcacaaatggattatgtccagcgtgctgcgccgagggattgttgcgactcccaatgttcgccacctcgggaggacggggtaagcctccgggtataaatggaaaacctccactctacgtcattccacagtgtacatcacttgcagcaacgctgagactttcatggctatcagcatcgaatcaggggtttcccgcttgggaaaagcctgatttggaactcccaaaaactggggtggtccctattctcgtcggtctgacatggctgccgaggcgagtctggcttgacaaccctgaagattgttcggctgcttgcatttcctgcgggcgcagagatcgtctcgtacgaatgtgtgtattcgaaggcatcgggagcaccaagacaaatcctgaagattcgggccgaacttggcaagatccccatcttattttgactgacatcgctaaaggctcctctcgggcccttgctgtgcgtgatgcacttggtgcaagtgatggcgcttctgggcagtgggcaatgattgcggctggcatacttcaaaaccaagaatcaacagacaccatgcatcacggaatccaggatagcggagctgaggggaagcacgtcaaagcatggattgttggcttttcaaccgttcagaacgacaaatacctggaagcaagagaatacctgatgccatattcattgtatccgtcccaggttcctaataaccttgaacaacttgaacgatggcaaaaagagtcgcgaaggattggaaaacaactagctgggattgtgggagggaagcttaaaggagacacagcgatctcttctattcgccatcatattgaggaaaaggtctcggttaaggtgccagagttacttgtgggagaggagggcacatggaaccaagcggcacaagaatacaaaacgataatggtttcaatcgccaaatcgctgtcacctggtttcacctcatcagcattactaaagaggattcgaatagctggtctgaagccaaatatgagtccgaaagaaaaggagggtgaacagccgaaaggcagcaaaggaggagacaagtgactccgacggatcagtacattcatgtcttaactcggctcaagttaggagacttaggacttttgagagcaaacgcaggcaagaggcttgatgagtcggtgagaggctttgatctctttgcaggcctttggtggccattgcgacaaagaaacgaacgggttccccgccgagaagtggcatggctcattgcgaagctctacgcttttcgtcccatcccgcattcagctgggacttaccttgctcttcagttgggacggtctcagccaatcgaacctagggcacaacaaaaataccggcaagcattcgataggatgctggcccttccagtcaaccagattgagccggccttgcaatgggcgcttggtagggtcgcatcaaccagagattttggactagattgggtcaacctgacggatgaactctccatttgggaacgggaaacaacccgcctcaaatgggctacagcattcctaagaatcaacgaaagggcatagaaatgttaattgagattcatgtcattcaaaatcatagccccgctaatctaaaccgcgatgacctaggcgctcccaagacgtgctattttggtggggtaatgcgctcccgcatctcaagccaatgtcttaaacgaagtatccgtatgaatgatgagttcaaacaactcctaggcggagttcggacccggcagcttgcaaaagtcattggcgacaaagttgatggtcaagccaataccaggaaacgtgcggcaaggattcttgaaaagtgtgggattaaaactaaggacgattctaagagcgacatgctggtctataccactcgtgaggcgatcagcgagatggcaggaattctgcagagtgaccatggcaaaacagatgaacaactggcagaggagtttggcaaagtgatagttggacggacagctgtaccagacatcgccctcagtggcagaatgttggaaacgggcgtactccaagacacggcagtggaggctgcacttcaggttgctcatgcgatttccacacacgaagctcgtcctgaggtcgattactatgtggctacagatgatatcccgggccatgatgcaggcgccggctatgtagacgaagccatgttctcctccgcgtgtttctataagtacttctcaattcactgggagacgctcataaaaaatcttcaaggttataatggaaaggaagagcagttggcagcccatacggttggtaggttcatccgaactgctgcagtggccaatccctcgggtaaacaaaacagcttcgcagcacataatccaccagatggaatgctggtagaaatcaaggaagctcccataagctatgctaatgctttcgcgagtcctgtagcctatggtactcgtgacatcatctcccaaagcgttgcccaattggggcaatacgttagagatcttgatacgggatatggcaaaccgcaacagagattctggttttccccaaatctgcgccaccatttgaccgtgatcgaaaataagcaagaatgttctctttcggagaacaacttcaaatcgctggacgaattgattaccacagtgctcgacgccatgggccacgattggaaagcagttcagaaggccgtcattagcccggagtgggctcaatgagtgccaagacactttttcttcgcttagaaggaccgcttcaatcctgggggggtcaggaatcgaagtttgtcattcgtcgtacttcgcggtctcctactaaatcgggagtgttcggaatcctttgtgcagctttgggaatccccagacctttggcgcacaaagaatggcttccaacacttgccacactgcacatgggtgttcgcattgatgagccaggtgtacggtggtgggactatcatacggtgggcgcacgaatgcctatggccattgctgagggggaaggaaagaccaagcctggagcaatgctcactaggcgtgaatatctctgcgatgcatccttcctcgtcgcgctacagggcgagcaaagcctcgttgaaaagctagaggccgcaatccgacgtccccaatcgacgctttaccttggacgaaagtcatgcttgccatctcgtcccatgttacaatatcctcttggagattttcctgaccttggttctgccctgaaatcagcaccttggtctccccggttaaaaactgatcttgtcccccaagttgtcgagtgtcttctcgattggcagccaactccggaccagcctcatgcaccagatgatgcatttgtttgttttgatgtgccactaacgttcgagcctccagcgcatggccctcgatttgtcatccgccagcagtatagtgtcgggtctccaggcgagattaatgtcgcatcaaaggccctccagaatccaacacccccaccacttcgaccgcgagcagattaccgtaattcagaatacacaaagatgcgggaggagcgactaagacgtgattgccacctctgtgttttctgcaaatcgcctgccaccacagttcagcatgtcacatatcgtcacgccggtggaggagagcgtcttgatgaattaagagccctctgtaggctctgccatgactcagtaactatgattgaatatggtttgggaatgggtattgatcgcatcgacccgtgtgacccaatttggcgaagactaatcatagaaaagagagaccagatcgtaaattttcgttcattagagacccgtcggcgtcgcctgaaaccagaggaggtggaatagccatgtatctgtcttgtctcttgataaacgtgggcagcaatcccgatcggcctcgccccggacgattatggcttcgaaacatgtacagggtccatcaacgtttgtgcatggggtttccatcgagagatcgcaaaacccaagaccctgattttctaaatccgtacaggccatatgacttcattcctgctcagtatccgactagccatccacaccaagacagttcctcgagagaggcaaaggcagttcatgttcctagaaataacacacaaggattcctttaccgggtcgaccctctctcaaataccggtcgagcgatgatcctcgtacaatctggtgtgatgcctgactggcattatgcctttcagaacgcctgccatattcttggggcaccaccagaagtgaaaccataccaccctcagtttgaggctggccaatgcttgaggttccgcctcgttgccaacccgttaaggaaagtgagcaggaattctttgggtgcatctggcaagccttttgacgaaggctggcagggcaaagaagtacctgtgcccactgcagagcttgacaagtggttggagcgccgagccgagcccagctggacttgtccgaagaattccgaaagcactcaacgaccaccgggctttcgattgcagaccatcagtattgtacgaacaggatacgtttacgttaaccacggacaagatcaaactggcgggcgtagaattcggttagctcgatacgagggaagcctgatggtaaccgattccgaaaattttcgaaatacgatctcccgtgggattggccccggtaaagcctttgggtttgggctcttgtcagttgctcccatgtaactccaaatttagtagagactacatgagaattcaggatctccatttactgccaaaattcagggacggttggagctatctctacgtagagcactgcaagattgagcaggaaagtaggtcagtagctctgtttgatgcttcgggaaaggtacctgtcccctgcgcaactctttgtctgctgatgctcggcccaggaacgagcattacccacgcagcagtgacggctttggcagacaatggttgtttggtttgctggtgcggcgaacagggtgttcggttttacgcctacgggcagggaaaaacccgtcgcgcccataatctacttcaccaagcaagactctgggcgaatgatgagttgcggctcaaggtcgttcgaaaaatgtattcgatgcggtttgataccaccctagaggactctctaacattgcgccagattcggggcaaagagggagtaagggtccgcgatgcgtattctcgagccagccgtgagaccggtgtgccatggagtggacggaactatgaccggacgaactggaattccggcgatcccgtaaatcgtgcgctctccgcagcaaacagctgtctctacggtatttgtcatgctggcatacttgctctggggctctctccggccttgggtttcatccatacagggaaaatgctctcattcgtctatgacgtagctgacctgtacaagacggaagtctccgttccgatcgcctttcaaatggcgtcccagggatccgaccagcttgaaagccgggtaaggaaagcgatcagagacaagttgaaagaaaccaagcttcttaagagtattgtttcagacattcactctgtcttggatctcgggacaaaggaccgctgtctacgagaggatgcagatttcgatgccgacccttcagtgccgggcgggttgtgggatttgggtggagaaacaaatgagggtgggatgaactatggagatactatcgacataggagaaaacggtgacagtggttattcttgaaaaggttccgggcggtctccgaggggaactgacacgatggatgcttgaggccaaagcaggggttttcgtcggtagcgtttcagggatggtgagagaccttttatggaagaagatctgcgaagaatcacgaggtggctctgttgtgatgattttcagcgacaacgctgaacaaggattttctgttaggatgatgggagagccgagcaggcatgtcgttgacttcgaggggctatcgctcatacgagtcccctgttgatgcggcttttgtcagtatgttccccacgcacgtgggggtgaaccgttacgagccccttatgccccttttcatgtaggatgttccccacgcacgtgggggtgaaccggacaaa

SEQ ID NO: 1002 - DNA, 105045 bp, Artificial Sequence; identical to SEQ ID NO: 499
  Synthetic Oligonucleotide
  misc_feature (1)..(89876): n is a, c, g, or t

SEQ ID NO: 1003 - DNA, 103485 bp, Artificial Sequence
  Synthetic Oligonucleotide
  misc_feature (1)..(88838): n is a, c, g, or t
nnnnnnnnnnnnnnnnnnnnnnnnnnnnnnnnnnnnnnnnnnnnnnnnnnnnnnnnnnnnnnnnnnnnnnnnnnnnnnnnnnnnnnnnnnnnnnnnnnnnnnnnnnnnnnnnnnnnnnnnnnnnnnnnnnnnnnnnnnnnnnnnnnnnnnnnnnnnnnnnnnnnnnnnnnnnnnnnnnnnnnnnnnnnnnnnnnnnnnnnnnnnnnnnnnnnnnnnnnnnnnnnnnnnnnnnnnnnnnnnnnnnnnnnnnnnnnnnnnnnnnnnnnnnnnnnnnnnnnnnnnnnnnnnnnnnnnnnnnnnnnnnnnnnnnnnnnnnnnnnnnnnnnnnnnnnnnnnnnnnnnnnnnnnnnnnnnnnnnnnnnnnnnnnnnnnnnnnnnnnnnnnnnnnnnnnnnnnnnnnnnnnnnnnnnnnnnnnnnnnnnnnnnnnnnnnnnnnnnnnnnnnnnnnnnnnnnnnnnnnnnnnnnnnnnnnnnnnnnnnnnnnnnnnnnnnnnnnnnnnnnnnnnnnnnnnnnnnnnnnnnnnnnnnnnnnnnnnnnnnnnnnnnnnnnnnnnnnnnnnnnnnnnnnnnnnnnnnnnnnnnnnnnnnnnnnnnnnnnnnnnnnnnnnnnnnnnnnnnnnnnnnnnnnnnnnnnnnnnnnnnnnnnnnnnnnnnnnnnnnnnnnnnnnnnnnnnnnnnnnnnnnnnnnnnnnnnnnnnnnnnnnnnnnnnnnnnnnnnnnnnnnnnnnnnnnnnnnnnnnnnnnnnnnnnnnnnnnnnnnnnnnnnnnnnnnnnnnnnnnnnnnnnnnnnnnnnnnnnnnnnnnnnnnnnnnnnnnnnnnnnnnnnnnnnnnnnnnnnnnnnnnnnnnnnnnnnnnnnnnnnnnnnnnnnnnnnnnnnnnnnnnnnnnnnnnnnnnnnnnnnnnnnnnnnnnnnnnnnnnnnnnnnnnnnnnnnnnnnnnnnnnnnnnnnnnnnnnnnnnnnnnnnnnnnnnnnnnnnnnnnnnnnnnnnnnnnnnnnnnnnnnnnnnnnnnnnnnnnnnnnnnnnnnnnnnnnnnnnnnnnnnnnnnnnnnnnnnnnnnnnnnnnnnnnnnnnnnnnnnnnnnnnnnnnnnnnnnnnnnnnnnnnnnnnnnnnnnnnnnnnnnnnnnnnnnnnnnnnnnnnnnnnnnnnnnnnnnnnnnnnnnnnnnnnnnnnnnnnnnnnnnnnnnnnnnnnnnnnnnnnnnnnnnnnnnnnnnnnnnnnnnnnnnnnnnnnnnnnnnnnnnnnnnnnnnnnnnnnnnnnnnnnnnnnnnnnnnnnnnnnnnnnnnnnnnnnnnnnnnnnnnnnnnnnnnnnnnnnnnnnnnnnnnnnnnnnnnnnnnnnnnnnnnnnnnnnnnnnnnnnnnnnnnnnnnnnnnnnnnnnnnnnnnnnnnnnnnnnnnnnnnnnnnnnnnnnnnnnnnnnnnnnnnnnnnnnnnnnnnnnnnnnnnnnnnnnnnnnnnnnnnnnnnnnnnnnnnnnnnnnnnnnnnnnnnnnnnnnnnnnnnnnnnnnnnnnnnnnnnnnnnnnnnnnnnnnnnnnnnnnnnnnnnnnnnnnnnnnnnnnnnnnnnnnnnnnnnnnnnnnnnnnnnnnnnnnnnnnnnnnnnnnnnnnnnnnnnnnnnnnnnnnnnnnnnnnnnnnnnnnnnnnnnnnnnnnnnnnnnnnnnnnnnnnnnnnnnnnnnnnnnnnnnnnnnnnnnnnnnnnnnnnnnnnnnnnnnnnnnnnnnnnnnnnnnnnnnnnnnnnnnnnnnnnnnnnnnnnnnnnnnnnnnnnnnnnnnnnnnnnnnnnnnnnnnnnnnnnnnnnnnnnnnnnnnnnnnnnnnnnnnnnnnnnnnnnnnnnnnnnnnnnnnnnnnnnnnnnnnnnnnnnnnnnnnnnnnnnnnnnnnnnnnnnnnnnnnnnnnnnnnnnnnnnnnnnnnnnnnnnnnnnnnnnnnnnnnnnnnnnnnnnnnnnnnnnnnnnnnnnnnnnnnnnnnnnnnnnnnnnnnnnnnnnnnnnnnnnnnnnnnnnnnnnnnnnnnnnnnnnnnnnnnnnnnnnnnnnnnnnnnnnnnnnnnnnnnnnnnnnnnnnnnnnnnnnnnnnnnnnnnnnnnnnnnnnnnnnnnnnnnnnnnnnnnnnnnnnnnnnnnnnnnnnnnnnnnnnnnnnnnnnnnnnnnnnnnnnnnnnnnnnnnnnnnnnnnnnnnnnnnnnnnnnnnnnnnnnnnnnnnnnnnnnnnnnnnnnnnnnnnnnnnnnnnnnnnnnnnnnnnnnnnnnnnnnnnnnnnnnnnnnnnnnnnnnnnnnnnnnnnnnnnnnnnnnnnnnnnnnnnnnnnnnnnnnnnnnnnnnnnnnnnnnnnnnnnnnnnnnnnnnnnnnnnnnnnnnnnnnnnnnnnnnnnnnnnnnnnnnnnnnnnnnnnnnnnnnnnnnnnnnnnnnnnnnnnnnnnnnnnnnnnnnnnnnnnnnnnnnnnnnnnnnnnnnnnnnnnnnnnnnnnnnnnnnnnnnnnnnnnnnnnnnnnnnnnnnnnnnnnnnnnnnnnnnnnnnnnnnnnnnnnnnnnnnnnnnnnnnnnnnnnnnnnnnnnnnnnnnnnnnnnnnnnnnnnnnnnnnnnnnnnnnnnnnnnnnnnnnnnnnnnnnnnnnnnnnnnnnnnnnnnnnnnnnnnnnnnnnnnnnnnnnnnnnnnnnnnnnnnnnnnnnnnnnnnnnnnnnnnnnnnnnnnnnnnnnnnnnnnnnnnnnnnnnnnnnnnnnnnnnnnnnnnnnnnnnnnnnnnnnnnnnnnnnnnnnnnnnnnnnnnnnnnnnnnnnnnnnnnnnnnnnnnnnnnnnnnnnnnnnnnnnnnnnnnnnnnnnnnnnnnnnnnnnnnnnnnnnnnnnnnnnnnnnnnnnnnnnnnnnnnnnnnnnnnnnnnnnnnnnnnnnnnnnnnnnnnnnnnnnnnnnnnnnnnnnnnnnnnnnnnnnnnnnnnnnnnnnnnnnnnnnnnnnnnnnnnnnnnnnnnnnnnnnnnnnnnnnnnnnnnnnnnnnnnnnnnnnnnnnnnnnnnnnnnnnnnnnnnnnnnnnnnnnnnnnnnnnnnnnnnnnnnnnnnnnnnnnnnnnnnnnnnnnnnnnnnnnnnnnnnnnnnnnnnnnnnnnnnnnnnnnnnnnnnnnnnnnnnnnnnnnnnnnnnnnnnnnnnnnnnnnnnnnnnnnnnnnnnnnnnnnnnnnnnnnnnnnnnnnnnnnnnnnnnnnnnnnnnnnnnnnnnnnnnnnnnnnnnnnnnnnnnnnnnnnnnnnnnnnnnnnnnnnnnnnnnnnnnnnnnnnnnnnnnnnnnnnnnnnnnnnnnnnnnnnnnnnnnnnnnnnnnnnnnnnnnnnnnnnnnnnnnnnnnnnnnnnnnnnnnnnnnnnnnnnnnnnnnnnnnnnnnnnnnnnnnnnnnnnnnnnnnnnnnnnnnnnnnnnnnnnnnnnnnnnnnnnnnnnnnnnnnnnnnnnnnnnnnnnnnnnnnnnnnnnnnnnnnnnnnnnnnnnnnnnnnnnnnnnnnnnnnnnnnnnnnnnnnnnnnnnnnnnnnnnnnnnnnnnnnnnnnnnnnnnnnnnnnnnnnnnnnnnnnnnnnnnnnnnnnnnnnnnnnnnnnnnnnnnnnnnnnnnnnnnnnnnnnnnnnnnnnnnnnnnnnnnnnnnnnnnnnnnnnnnnnnnnnnnnnnnnnnnnnnnnnnnnnnnnnnnnnnnnnnnnnnnnnnnnnnnnnnnnnnnnnnnnnnnnnnnnnnnnnnnnnnnnnnnnnnnnnnnnnnnnnnnnnnnnnnnnnnnnnnnnnnnnnnnnnnnnnnnnnnnnnnnnnnnnnnnnnnnnnnnnnnnnnnnnnnnnnnnnnnnnnnnnnnnnnnnnnnnnnnnnnnnnnnnnnnnnnnnnnnnnnnnnnnnnnnnnnnnnnnnnnnnnnnnnnnnnnnnnnnnnnnnnnnnnnnnnnnnnnnnnnnnnnnnnnnnnnnnnnnnnnnnnnnnnnnnnnnnnnnnnnnnnnnnnnnnnnnnnnnnnnnnnnnnnnnnnnnnnnnnnnnnnnnnnnnnnnnnnnnnnnnnnnnnnnnnnnnnnnnnnnnnnnnnnnnnnnnnnnnnnnnnnnnnnnnnnnnnnnnnnnnnnnnnnnnnnnnnnnnnnnnnnnnnnnnnnnnnnnnnnnnnnnnnnnnnnnnnnnnnnnnnnnnnnnnnnnnnnnnnnnnnnnnnnnnnnnnnnnnnnnnnnnnnnnnnnnnnnnnnnnnnnnnnnnnnnnnnnnnnnnnnnnnnnnnnnnnnnnnnnnnnnnnnnnnnnnnnnnnnnnnnnnnnnnnnnnnnnnnnnnnnnnnnnnnnnnnnnnnnnnnnnnnnnnnnnnnnnnnnnnnnnnnnnnnnnnnnnnnnnnnnnnnnnnnnnnnnnnnnnnnnnnnnnnnnnnnnnnnnnnnnnnnnnnnnnnnnnnnnnnnnnnnnnnnnnnnnnnnnnnnnnnnnnnnnnnnnnnnnnnnnnnnnnnnnnnnnnnnnnnnnnnnnnnnnnnnnnnnnnnnnnnnnnnnnnnnnnnnnnnnnnnnnnnnnnnnnnnnnnnnnnnnnnnnnnnnnnnnnnnnnnnnnnnnnnnnnnnnnnnnnnnnnnnnnnnnnnnnnnnnnnnnnnnnnnnnnnnnnnnnnnnnnnnnnnnnnnnnnnnnnnnnnnnnnnnnnnnnnnnnnnnnnnnnnnnnnnnnnnnnnnnnnnnnnnnnnnnnnnnnnnnnnnnnnnnnnnnnnnnnnnnnnnnnnnnnnnnnnnnnnnnnnnnnnnnnnnnnnnnnnnnnnnnnnnnnnnnnnnnnnnnnnnnnnnnnnnnnnnnnnnnnnnnnnnnnnnnnnnnnnnnnnnnnnnnnnnnnnnnnnnnnnnnnnnnnnnnnnnnnnnnnnnnnnnnnnnnnnnnnnnnnnnnnnnnnnnnnnnnnnnnnnnnnnnnnnnnnnnnnnnnnnnnnnnnnnnnnnnnnnnnnnnnnnnnnnnnnnnnnnnnnnnnnnnnnnnnnnnnnnnnnnnnnnnnnnnnnnnnnnnnnnnnnnnnnnnnnnnnnnnnnnnnnnnnnnnnnnnnnnnnnnnnnnnnnnnnnnnnnnnnnnnnnnnnnnnnnnnnnnnnnnnnnnnnnnnnnnnnnnnnnnnnnnnnnnnnnnnnnnnnnnnnnnnnnnnnnnnnnnnnnnnnnnnnnnnnnnnnnnnnnnnnnnnnnnnnnnnnnnnnnnnnnnnnnnnnnnnnnnnnnnnnnnnnnnnnnnnnnnnnnnnnnnnnnnnnnnnnnnnnnnnnnnnnnnnnnnnnnnnnnnnnnnnnnnnnnnnnnnnnnnnnnnnnnnnnnnnnnnnnnnnnnnnnnnnnnnnnnnnnnnnnnnnnnnnnnnnnnnnnnnnnnnnnnnnnnnnnnnnnnnnnnnnnnnnnnnnnnnnnnnnnnnnnnnnnnnnnnnnnnnnnnnnnnnnnnnnnnnnnnnnnnnnnnnnnnnnnnnnnnnnnnnnnnnnnnnnnnnnnnnnnnnnnnnnnnnnnnnnnnnnnnnnnnnnnnnnnnnnnnnnnnnnnnnnnnnnnnnnnnnnnnnnnnnnnnnnnnnnnnnnnnnnnnnnnnnnnnnnnnnnnnnnnnnnnnnnnnnnnnnnnnnnnnnnnnnnnnnnnnnnnnnnnnnnnnnnnnnnnnnnnnnnnnnnnnnnnnnnnnnnnnnnnnnnnnnnnnnnnnnnnnnnnnnnnnnnnnnnnnnnnnnnnnnnnnnnnnnnnnnnnnnnnnnnnnnnnnnnnnnnnnnnnnnnnnnnnnnnnnnnnnnnnnnnnnnnnnnnnnnnnnnnnnnnnnnnnnnnnnnnnnnnnnnnnnnnnnnnnnnnnnnnnnnnnnnnnnnnnnnnnnnnnnnnnnnnnnnnnnnnnnnnnnnnnnnnnnnnnnnnnnnnnnnnnnnnnnnnnnnnnnnnnnnnnnnnnnnnnnnnnnnnnnnnnnnnnnnnnnnnnnnnnnnnnnnnnnnnnnnnnnnnnnnnnnnnnnnnnnnnnnnnnnnnnnnnnnnnnnnnnnnnnnnnnnnnnnnnnnnnnnnnnnnnnnnnnnnnnnnnnnnnnnnnnnnnnnnnnnnnnnnnnnnnnnnnnnnnnnnnnnnnnnnnnnnnnnnnnnnnnnnnnnnnnnnnnnnnnnnnnnnnnnnnnnnnnnnnnnnnnnnnnnnnnnnnnnnnnnnnnnnnnnnnnnnnnnnnnnnnnnnnnnnnnnnnnnnnnnnnnnnnnnnnnnnnnnnnnnnnnnnnnnnnnnnnnnnnnnnnnnnnnnnnnnnnnnnnnnnnnnnnnnnnnnnnnnnnnnnnnnnnnnnnnnnnnnnnnnnnnnnnnnnnnnnnnnnnnnnnnnnnnnnnnnnnnnnnnnnnnnnnnnnnnnnnnnnnnnnnnnnnnnnnnnnnnnnnnnnnnnnnnnnnnnnnnnnnnnnnnnnnnnnnnnnnnnnnnnnnnnnnnnnnnnnnnnnnnnnnnnnnnnnnnnnnnnnnnnnnnnnnnnnnnnnnnnnnnnnnnnnnnnnnnnnnnnnnnnnnnnnnnnnnnnnnnnnnnnnnnnnnnnnnnnnnnnnnnnnnnnnnnnnnnnnnnnnnnnnnnnnnnnnnnnnnnnnnnnnnnnnnnnnnnnnnnnnnnnnnnnnnnnnnnnnnnnnnnnnnnnnnnnnnnnnnnnnnnnnnnnnnnnnnnnnnnnnnnnnnnnnnnnnnnnnnnnnnnnnnnnnnnnnnnnnnnnnnnnnnnnnnnnnnnnnnnnnnnnnnnnnnnnnnnnnnnnnnnnnnnnnnnnnnnnnnnnnnnnnnnnnnnnnnnnnnnnnnnnnnnnnnnnnnnnnnnnnnnnnnnnnnnnnnnnnnnnnnnnnnnnnnnnnnnnnnnnnnnnnnnnnnnnnnnnnnnnnnnnnnnnnnnnnnnnnnnnnnnnnnnnnnnnnnnnnnnnnnnnnnnnnnnnnnnnnnnnnnnnnnnnnnnnnnnnnnnnnnnnnnnnnnnnnnnnnnnnnnnnnnnnnnnnnnnnnnnnnnnnnnnnnnnnnnnnnnnnnnnnnnnnnnnnnnnnnnnnnnnnnnnnnnnnnnnnnnnnnnnnnnnnnnnnnnnnnnnnnnnnnnnnnnnnnnnnnnnnnnnnnnnnnnnnnnnnnnnnnnnnnnnnnnnnnnnnnnnnnnnnnnnnnnnnnnnnnnnnnnnnnnnnnnnnnnnnnnnnnnnnnnnnnnnnnnnnnnnnnnnnnnnnnnnnnnnnnnnnnnnnnnnnnnnnnnnnnnnnnnnnnnnnnnnnnnnnnnnnnnnnnnnnnnnnnnnnnnnnnnnnnnnnnnnnnnnnnnnnnnnnnnnnnnnnnnnnnnnnnnnnnnnnnnnnnnnnnnnnnnnnnnnnnnnnnnnnnnnnnnnnnnnnnnnnnnnnnnnnnnnnnnnnnnnnnnnnnnnnnnnnnnnnnnnnnnnnnnnnnnnnnnnnnnnnnnnnnnnnnnnnnnnnnnnnnnnnnnnnnnnnnnnnnnnnnnnnnnnnnnnnnnnnnnnnnnnnnnnnnnnnnnnnnnnnnnnnnnnnnnnnnnnnnnnnnnnnnnnnnnnnnnnnnnnnnnnnnnnnnnnnnnnnnnnnnnnnnnnnnnnnnnnnnnnnnnnnnnnnnnnnnnnnnnnnnnnnnnnnnnnnnnnnnnnnnnnnnnnnnnnnnnnnnnnnnnnnnnnnnnnnnnnnnnnnnnnnnnnnnnnnnnnnnnnnnnnnnnnnnnnnnnnnnnnnnnnnnnnnnnnnnnnnnnnnnnnnnnnnnnnnnnnnnnnnnnnnnnnnnnnnnnnnnnnnnnnnnnnnnnnnnnnnnnnnnnnnnnnnnnnnnnnnnnnnnnnnnnnnnnnnnnnnnnnnnnnnnnnnnnnnnnnnnnnnnnnnnnnnnnnnnnnnnnnnnnnnnnnnnnnnnnnnnnnnnnnnnnnnnnnnnnnnnnnnnnnnnnnnnnnnnnnnnnnnnnnnnnnnnnnnnnnnnnnnnnnnnnnnnnnnnnnnnnnnnnnnnnnnnnnnnnnnnnnnnnnnnnnnnnnnnnnnnnnnnnnnnnnnnnnnnnnnnnnnnnnnnnnnnnnnnnnnnnnnnnnnnnnnnnnnnnnnnnnnnnnnnnnnnnnnnnnnnnnnnnnnnnnnnnnnnnnnnnnnnnnnnnnnnnnnnnnnnnnnnnnnnnnnnnnnnnnnnnnnnnnnnnnnnnnnnnnnnnnnnnnnnnnnnnnnnnnnnnnnnnnnnnnnnnnnnnnnnnnnnnnnnnnnnnnnnnnnnnnnnnnnnnnnnnnnnnnnnnnnnnnnnnnnnnnnnnnnnnnnnnnnnnnnnnnnnnnnnnnnnnnnnnnnnnnnnnnnnnnnnnnnnnnnnnnnnnnnnnnnnnnnnnnnnnnnnnnnnnnnnnnnnnnnnnnnnnnnnnnnnnnnnnnnnnnnnnnnnnnnnnnnnnnnnnnnnnnnnnnnnnnnnnnnnnnnnnnnnnnnnnnnnnnnnnnnnnnnnnnnnnnnnnnnnnnnnnnnnnnnnnnnnnnnnnnnnnnnnnnnnnnnnnnnnnnnnnnnnnnnnnnnnnnnnnnnnnnnnnnnnnnnnnnnnnnnnnnnnnnnnnnnnnnnnnnnnnnnnnnnnnnnnnnnnnnnnnnnnnnnnnnnnnnnnnnnnnnnnnnnnnnnnnnnnnnnnnnnnnnnnnnnnnnnnnnnnnnnnnnnnnnnnnnnnnnnnnnnnnnnnnnnnnnnnnnnnnnnnnnnnnnnnnnnnnnnnnnnnnnnnnnnnnnnnnnnnnnnnnnnnnnnnnnnnnnnnnnnnnnnnnnnnnnnnnnnnnnnnnnnnnnnnnnnnnnnnnnnnnnnnnnnnnnnnnnnnnnnnnnnnnnnnnnnnnnnnnnnnnnnnnnnnnnnnnnnnnnnnnnnnnnnnnnnnnnnnnnnnnnnnnnnnnnnnnnnnnnnnnnnnnnnnnnnnnnnnnnnnnnnnnnnnnnnnnnnnnnnnnnnnnnnnnnnnnnnnnnnnnnnnnnnnnnnnnnnnnnnnnnnnnnnnnnnnnnnnnnnnnnnnnnnnnnnnnnnnnnnnnnnnnnnnnnnnnnnnnnnnnnnnnnnnnnnnnnnnnnnnnnnnnnnnnnnnnnnnnnnnnnnnnnnnnnnnnnnnnnnnnnnnnnnnnnnnnnnnnnnnnnnnnnnnnnnnnnnnnnnnnnnnnnnnnnnnnnnnnnnnnnnnnnnnnnnnnnnnnnnnnnnnnnnnnnnnnnnnnnnnnnnnnnnnnnnnnnnnnnnnnnnnnnnnnnnnnnnnnnnnnnnnnnnnnnnnnnnnnnnnnnnnnnnnnnnnnnnnnnnnnnnnnnnnnnnnnnnnnnnnnnnnnnnnnnnnnnnnnnnnnnnnnnnnnnnnnnnnnnnnnnnnnnnnnnnnnnnnnnnnnnnnnnnnnnnnnnnnnnnnnnnnnnnnnnnnnnnnnnnnnnnnnnnnnnnnnnnnnnnnnnnnnnnnnnnnnnnnnnnnnnnnnnnnnnnnnnnnnnnnnnnnnnnnnnnnnnnnnnnnnnnnnnnnnnnnnnnnnnnnnnnnnnnnnnnnnnnnnnnnnnnnnnnnnnnnnnnnnnnnnnnnnnnnnnnnnnnnnnnnnnnnnnnnnnnnnnnnnnnnnnnnnnnnnnnnnnnnnnnnnnnnnnnnnnnnnnnnnnnnnnnnnnnnnnnnnnnnnnnnnnnnnnnnnnnnnnnnnnnnnnnnnnnnnnnnnnnnnnnnnnnnnnnnnnnnnnnnnnnnnnnnnnnnnnnnnnnnnnnnnnnnnnnnnnnnnnnnnnnnnnnnnnnnnnnnnnnnnnnnnnnnnnnnnnnnnnnnnnnnnnnnnnnnnnnnnnnnnnnnnnnnnnnnnnnnnnnnnnnnnnnnnnnnnnnnnnnnnnnnnnnnnnnnnnnnnnnnnnnnnnnnnnnnnnnnnnnnnnnnnnnnnnnnnnnnnnnnnnnnnnnnnnnnnnnnnnnnnnnnnnnnnnnnnnnnnnnnnnnnnnnnnnnnnnnnnnnnnnnnnnnnnnnnnnnnnnnnnnnnnnnnnnnnnnnnnnnnnnnnnnnnnnnnnnnnnnnnnnnnnnnnnnnnnnnnnnnnnnnnnnnnnnnnnnnnnnnnnnnnnnnnnnnnnnnnnnnnnnnnnnnnnnnnnnnnnnnnnnnnnnnnnnnnnnnnnnnnnnnnnnnnnnnnnnnnnnnnnnnnnnnnnnnnnnnnnnnnnnnnnnnnnnnnnnnnnnnnnnnnnnnnnnnnnnnnnnnnnnnnnnnnnnnnnnnnnnnnnnnnnnnnnnnnnnnnnnnnnnnnnnnnnnnnnnnnnnnnnnnnnnnnnnnnnnnnnnnnnnnnnnnnnnnnnnnnnnnnnnnnnnnnnnnnnnnnnnnnnnnnnnnnnnnnnnnnnnnnnnnnnnnnnnnnnnnnnnnnnnnnnnnnnnnnnnnnnnnnnnnnnnnnnnnnnnnnnnnnnnnnnnnnnnnnnnnnnnnnnnnnnnnnnnnnnnnnnnnnnnnnnnnnnnnnnnnnnnnnnnnnnnnnnnnnnnnnnnnnnnnnnnnnnnnnnnnnnnnnnnnnnnnnnnnnnnnnnnnnnnnnnnnnnnnnnnnnnnnnnnnnnnnnnnnnnnnnnnnnnnnnnnnnnnnnnnnnnnnnnnnnnnnnnnnnnnnnnnnnnnnnnnnnnnnnnnnnnnnnnnnnnnnnnnnnnnnnnnnnnnnnnnnnnnnnnnnnnnnnnnnnnnnnnnnnnnnnnnnnnnnnnnnnnnnnnnnnnnnnnnnnnnnnnnnnnnnnnnnnnnnnnnnnnnnnnnnnnnnnnnnnnnnnnnnnnnnnnnnnnnnnnnnnnnnnnnnnnnnnnnnnnnnnnnnnnnnnnnnnnnnnnnnnnnnnnnnnnnnnnnnnnnnnnnnnnnnnnnnnnnnnnnnnnnnnnnnnnnnnnnnnnnnnnnnnnnnnnnnnnnnnnnnnnnnnnnnnnnnnnnnnnnnnnnnnnnnnnnnnnnnnnnnnnnnnnnnnnnnnnnnnnnnnnnnnnnnnnnnnnnnnnnnnnnnnnnnnnnnnnnnnnnnnnnnnnnnnnnnnnnnnnnnnnnnnnnnnnnnnnnnnnnnnnnnnnnnnnnnnnnnnnnnnnnnnnnnnnnnnnnnnnnnnnnnnnnnnnnnnnnnnnnnnnnnnnnnnnnnnnnnnnnnnnnnnnnnnnnnnnnnnnnnnnnnnnnnnnnnnnnnnnnnnnnnnnnnnnnnnnnnnnnnnnnnnnnnnnnnnnnnnnnnnnnnnnnnnnnnnnnnnnnnnnnnnnnnnnnnnnnnnnnnnnnnnnnnnnnnnnnnnnnnnnnnnnnnnnnnnnnnnnnnnnnnnnnnnnnnnnnnnnnnnnnnnnnnnnnnnnnnnnnnnnnnnnnnnnnnnnnnnnnnnnnnnnnnnnnnnnnnnnnnnnnnnnnnnnnnnnnnnnnnnnnnnnnnnnnnnnnnnnnnnnnnnnnnnnnnnnnnnnnnnnnnnnnnnnnnnnnnnnnnnnnnnnnnnnnnnnnnnnnnnnnnnnnnnnnnnnnnnnnnnnnnnnnnnnnnnnnnnnnnnnnnnnnnnnnnnnnnnnnnnnnnnnnnnnnnnnnnnnnnnnnnnnnnnnnnnnnnnnnnnnnnnnnnnnnnnnnnnnnnnnnnnnnnnnnnnnnnnnnnnnnnnnnnnnnnnnnnnnnnnnnnnnnnnnnnnnnnnnnnnnnnnnnnnnnnnnnnnnnnnnnnnnnnnnnnnnnnnnnnnnnnnnnnnnnnnnnnnnnnnnnnnnnnnnnnnnnnnnnnnnnnnnnnnnnnnnnnnnnnnnnnnnnnnnnnnnnnnnnnnnnnnnnnnnnnnnnnnnnnnnnnnnnnnnnnnnnnnnnnnnnnnnnnnnnnnnnnnnnnnnnnnnnnnnnnnnnnnnnnnnnnnnnnnnnnnnnnnnnnnnnnnnnnnnnnnnnnnnnnnnnnnnnnnnnnnnnnnnnnnnnnnnnnnnnnnnnnnnnnnnnnnnnnnnnnnnnnnnnnnnnnnnnnnnnnnnnnnnnnnnnnnnnnnnnnnnnnnnnnnnnnnnnnnnnnnnnnnnnnnnnnnnnnnnnnnnnnnnnnnnnnnnnnnnnnnnnnnnnnnnnnnnnnnnnnnnnnnnnnnnnnnnnnnnnnnnnnnnnnnnnnnnnnnnnnnnnnnnnnnnnnnnnnnnnnnnnnnnnnnnnnnnnnnnnnnnnnnnnnnnnnnnnnnnnnnnnnnnnnnnnnnnnnnnnnnnnnnnnnnnnnnnnnnnnnnnnnnnnnnnnnnnnnnnnnnnnnnnnnnnnnnnnnnnnnnnnnnnnnnnnnnnnnnnnnnnnnnnnnnnnnnnnnnnnnnnnnnnnnnnnnnnnnnnnnnnnnnnnnnnnnnnnnnnnnnnnnnnnnnnnnnnnnnnnnnnnnnnnnnnnnnnnnnnnnnnnnnnnnnnnnnnnnnnnnnnnnnnnnnnnnnnnnnnnnnnnnnnnnnnnnnnnnnnnnnnnnnnnnnnnnnnnnnnnnnnnnnnnnnnnnnnnnnnnnnnnnnnnnnnnnnnnnnnnnnnnnnnnnnnnnnnnnnnnnnnnnnnnnnnnnnnnnnnnnnnnnnnnnnnnnnnnnnnnnnnnnnnnnnnnnnnnnnnnnnnnnnnnnnnnnnnnnnnnnnnnnnnnnnnnnnnnnnnnnnnnnnnnnnnnnnnnnnnnnnnnnnnnnnnnnnnnnnnnnnnnnnnnnnnnnnnnnnnnnnnnnnnnnnnnnnnnnnnnnnnnnnnnnnnnnnnnnnnnnnnnnnnnnnnnnnnnnnnnnnnnnnnnnnnnnnnnnnnnnnnnnnnnnnnnnnnnnnnnnnnnnnnnnnnnnnnnnnnnnnnnnnnnnnnnnnnnnnnnnnnnnnnnnnnnnnnnnnnnnnnnnnnnnnnnnnnnnnnnnnnnnnnnnnnnnnnnnnnnnnnnnnnnnnnnnnnnnnnnnnnnnnnnnnnnnnnnnnnnnnnnnnnnnnnnnnnnnnnnnnnnnnnnnnnnnnnnnnnnnnnnnnnnnnnnnnnnnnnnnnnnnnnnnnnnnnnnnnnnnnnnnnnnnnnnnnnnnnnnnnnnnnnnnnnnnnnnnnnnnnnnnnnnnnnnnnnnnnnnnnnnnnnnnnnnnnnnnnnnnnnnnnnnnnnnnnnnnnnnnnnnnnnnnnnnnnnnnnnnnnnnnnnnnnnnnnnnnnnnnnnnnnnnnnnnnnnnnnnnnnnnnnnnnnnnnnnnnnnnnnnnnnnnnnnnnnnnnnnnnnnnnnnnnnnnnnnnnnnnnnnnnnnnnnnnnnnnnnnnnnnnnnnnnnnnnnnnnnnnnnnnnnnnnnnnnnnnnnnnnnnnnnnnnnnnnnnnnnnnnnnnnnnnnnnnnnnnnnnnnnnnnnnnnnnnnnnnnnnnnnnnnnnnnnnnnnnnnnnnnnnnnnnnnnnnnnnnnnnnnnnnnnnnnnnnnnnnnnnnnnnnnnnnnnnnnnnnnnnnnnnnnnnnnnnnnnnnnnnnnnnnnnnnnnnnnnnnnnnnnnnnnnnnnnnnnnnnnnnnnnnnnnnnnnnnnnnnnnnnnnnnnnnnnnnnnnnnnnnnnnnnnnnnnnnnnnnnnnnnnnnnnnnnnnnnnnnnnnnnnnnnnnnnnnnnnnnnnnnnnnnnnnnnnnnnnnnnnnnnnnnnnnnnnnnnnnnnnnnnnnnnnnnnnnnnnnnnnnnnnnnnnnnnnnnnnnnnnnnnnnnnnnnnnnnnnnnnnnnnnnnnnnnnnnnnnnnnnnnnnnnnnnnnnnnnnnnnnnnnnnnnnnnnnnnnnnnnnnnnnnnnnnnnnnnnnnnnnnnnnnnnnnnnnnnnnnnnnnnnnnnnnnnnnnnnnnnnnnnnnnnnnnnnnnnnnnnnnnnnnnnnnnnnnnnnnnnnnnnnnnnnnnnnnnnnnnnnnnnnnnnnnnnnnnnnnnnnnnnnnnnnnnnnnnnnnnnnnnnnnnnnnnnnnnnnnnnnnnnnnnnnnnnnnnnnnnnnnnnnnnnnnnnnnnnnnnnnnnnnnnnnnnnnnnnnnnnnnnnnnnnnnnnnnnnnnnnnnnnnnnnnnnnnnnnnnnnnnnnnnnnnnnnnnnnnnnnnnnnnnnnnnnnnnnnnnnnnnnnnnnnnnnnnnnnnnnnnnnnnnnnnnnnnnnnnnnnnnnnnnnnnnnnnnnnnnnnnnnnnnnnnnnnnnnnnnnnnnnnnnnnnnnnnnnnnnnnnnnnnnnnnnnnnnnnnnnnnnnnnnnnnnnnnnnnnnnnnnnnnnnnnnnnnnnnnnnnnnnnnnnnnnnnnnnnnnnnnnnnnnnnnnnnnnnnnnnnnnnnnnnnnnnnnnnnnnnnnnnnnnnnnnnnnnnnnnnnnnnnnnnnnnnnnnnnnnnnnnnnnnnnnnnnnnnnnnnnnnnnnnnnnnnnnnnnnnnnnnnnnnnnnnnnnnnnnnnnnnnnnnnnnnnnnnnnnnnnnnnnnnnnnnnnnnnnnnnnnnnnnnnnnnnnnnnnnnnnnnnnnnnnnnnnnnnnnnnnnnnnnnnnnnnnnnnnnnnnnnnnnnnnnnnnnnnnnnnnnnnnnnnnnnnnnnnnnnnnnnnnnnnnnnnnnnnnnnnnnnnnnnnnnnnnnnnnnnnnnnnnnnnnnnnnnnnnnnnnnnnnnnnnnnnnnnnnnnnnnnnnnnnnnnnnnnnnnnnnnnnnnnnnnnnnnnnnnnnnnnnnnnnnnnnnnnnnnnnnnnnnnnnnnnnnnnnnnnnnnnnnnnnnnnnnnnnnnnnnnnnnnnnnnnnnnnnnnnnnnnnnnnnnnnnnnnnnnnnnnnnnnnnnnnnnnnnnnnnnnnnnnnnnnnnnnnnnnnnnnnnnnnnnnnnnnnnnnnnnnnnnnnnnnnnnnnnnnnnnnnnnnnnnnnnnnnnnnnnnnnnnnnnnnnnnnnnnnnnnnnnnnnnnnnnnnnnnnnnnnnnnnnnnnnnnnnnnnnnnnnnnnnnnnnnnnnnnnnnnnnnnnnnnnnnnnnnnnnnnnnnnnnnnnnnnnnnnnnnnnnnnnnnnnnnnnnnnnnnnnnnnnnnnnnnnnnnnnnnnnnnnnnnnnnnnnnnnnnnnnnnnnnnnnnnnnnnnnnnnnnnnnnnnnnnnnnnnnnnnnnnnnnnnnnnnnnnnnnnnnnnnnnnnnnnnnnnnnnnnnnnnnnnnnnnnnnnnnnnnnnnnnnnnnnnnnnnnnnnnnnnnnnnnnnnnnnnnnnnnnnnnnnnnnnnnnnnnnnnnnnnnnnnnnnnnnnnnnnnnnnnnnnnnnnnnnnnnnnnnnnnnnnnnnnnnnnnnnnnnnnnnnnnnnnnnnnnnnnnnnnnnnnnnnnnnnnnnnnnnnnnnnnnnnnnnnnnnnnnnnnnnnnnnnnnnnnnnnnnnnnnnnnnnnnnnnnnnnnnnnnnnnnnnnnnnnnnnnnnnnnnnnnnnnnnnnnnnnnnnnnnnnnnnnnnnnnnnnnnnnnnnnnnnnnnnnnnnnnnnnnnnnnnnnnnnnnnnnnnnnnnnnnnnnnnnnnnnnnnnnnnnnnnnnnnnnnnnnnnnnnnnnnnnnnnnnnnnnnnnnnnnnnnnnnnnnnnnnnnnnnnnnnnnnnnnnnnnnnnnnnnnnnnnnnnnnnnnnnnnnnnnnnnnnnnnnnnnnnnnnnnnnnnnnnnnnnnnnnnnnnnnnnnnnnnnnnnnnnnnnnnnnnnnnnnnnnnnnnnnnnnnnnnnnnnnnnnnnnnnnnnnnnnnnnnnnnnnnnnnnnnnnnnnnnnnnnnnnnnnnnnnnnnnnnnnnnnnnnnnnnnnnnnnnnnnnnnnnnnnnnnnnnnnnnnnnnnnnnnnnnnnnnnnnnnnnnnnnnnnnnnnnnnnnnnnnnnnnnnnnnnnnnnnnnnnnnnnnnnnnnnnnnnnnnnnnnnnnnnnnnnnnnnnnnnnnnnnnnnnnnnnnnnnnnnnnnnnnnnnnnnnnnnnnnnnnnnnnnnnnnnnnnnnnnnnnnnnnnnnnnnnnnnnnnnnnnnnnnnnnnnnnnnnnnnnnnnnnnnnnnnnnnnnnnnnnnnnnnnnnnnnnnnnnnnnnnnnnnnnnnnnnnnnnnnnnnnnnnnnnnnnnnnnnnnnnnnnnnnnnnnnnnnnnnnnnnnnnnnnnnnnnnnnnnnnnnnnnnnnnnnnnnnnnnnnnnnnnnnnnnnnnnnnnnnnnnnnnnnnnnnnnnnnnnnnnnnnnnnnnnnnnnnnnnnnnnnnnnnnnnnnnnnnnnnnnnnnnnnnnnnnnnnnnnnnnnnnnnnnnnnnnnnnnnnnnnnnnnnnnnnnnnnnnnnnnnnnnnnnnnnnnnnnnnnnnnnnnnnnnnnnnnnnnnnnnnnnnnnnnnnnnnnnnnnnnnnnnnnnnnnnnnnnnnnnnnnnnnnnnnnnnnnnnnnnnnnnnnnnnnnnnnnnnnnnnnnnnnnnnnnnnnnnnnnnnnnnnnnnnnnnnnnnnnnnnnnnnnnnnnnnnnnnnnnnnnnnnnnnnnnnnnnnnnnnnnnnnnnnnnnnnnnnnnnnnnnnnnnnnnnnnnnnnnnnnnnnnnnnnnnnnnnnnnnnnnnnnnnnnnnnnnnnnnnnnnnnnnnnnnnnnnnnnnnnnnnnnnnnnnnnnnnnnnnnnnnnnnnnnnnnnnnnnnnnnnnnnnnnnnnnnnnnnnnnnnnnnnnnnnnnnnnnnnnnnnnnnnnnnnnnnnnnnnnnnnnnnnnnnnnnnnnnnnnnnnnnnnnnnnnnnnnnnnnnnnnnnnnnnnnnnnnnnnnnnnnnnnnnnnnnnnnnnnnnnnnnnnnnnnnnnnnnnnnnnnnnnnnnnnnnnnnnnnnnnnnnnnnnnnnnnnnnnnnnnnnnnnnnnnnnnnnnnnnnnnnnnnnnnnnnnnnnnnnnnnnnnnnnnnnnnnnnnnnnnnnnnnnnnnnnnnnnnnnnnnnnnnnnnnnnnnnnnnnnnnnnnnnnnnnnnnnnnnnnnnnnnnnnnnnnnnnnnnnnnnnnnnnnnnnnnnnnnnnnnnnnnnnnnnnnnnnnnnnnnnnnnnnnnnnnnnnnnnnnnnnnnnnnnnnnnnnnnnnnnnnnnnnnnnnnnnnnnnnnnnnnnnnnnnnnnnnnnnnnnnnnnnnnnnnnnnnnnnnnnnnnnnnnnnnnnnnnnnnnnnnnnnnnnnnnnnnnnnnnnnnnnnnnnnnnnnnnnnnnnnnnnnnnnnnnnnnnnnnnnnnnnnnnnnnnnnnnnnnnnnnnnnnnnnnnnnnnnnnnnnnnnnnnnnnnnnnnnnnnnnnnnnnnnnnnnnnnnnnnnnnnnnnnnnnnnnnnnnnnnnnnnnnnnnnnnnnnnnnnnnnnnnnnnnnnnnnnnnnnnnnnnnnnnnnnnnnnnnnnnnnnnnnnnnnnnnnnnnnnnnnnnnnnnnnnnnnnnnnnnnnnnnnnnnnnnnnnnnnnnnnnnnnnnnnnnnnnnnnnnnnnnnnnnnnnnnnnnnnnnnnnnnnnnnnnnnnnnnnnnnnnnnnnnnnnnnnnnnnnnnnnnnnnnnnnnnnnnnnnnnnnnnnnnnnnnnnnnnnnnnnnnnnnnnnnnnnnnnnnnnnnnnnnnnnnnnnnnnnnnnnnnnnnnnnnnnnnnnnnnnnnnnnnnnnnnnnnnnnnnnnnnnnnnnnnnnnnnnnnnnnnnnnnnnnnnnnnnnnnnnnnnnnnnnnnnnnnnnnnnnnnnnnnnnnnnnnnnnnnnnnnnnnnnnnnnnnnnnnnnnnnnnnnnnnnnnnnnnnnnnnnnnnnnnnnnnnnnnnnnnnnnnnnnnnnnnnnnnnnnnnnnnnnnnnnnnnnnnnnnnnnnnnnnnnnnnnnnnnnnnnnnnnnnnnnnnnnnnnnnnnnnnnnnnnnnnnnnnnnnnnnnnnnnnnnnnnnnnnnnnnnnnnnnnnnnnnnnnnnnnnnnnnnnnnnnnnnnnnnnnnnnnnnnnnnnnnnnnnnnnnnnnnnnnnnnnnnnnnnnnnnnnnnnnnnnnnnnnnnnnnnnnnnnnnnnnnnnnnnnnnnnnnnnnnnnnnnnnnnnnnnnnnnnnnnnnnnnnnnnnnnnnnnnnnnnnnnnnnnnnnnnnnnnnnnnnnnnnnnnnnnnnnnnnnnnnnnnnnnnnnnnnnnnnnnnnnnnnnnnnnnnnnnnnnnnnnnnnnnnnnnnnnnnnnnnnnnnnnnnnnnnnnnnnnnnnnnnnnnnnnnnnnnnnnnnnnnnnnnnnnnnnnnnnnnnnnnnnnnnnnnnnnnnnnnnnnnnnnnnnnnnnnnnnnnnnnnnnnnnnnnnnnnnnnnnnnnnnnnnnnnnnnnnnnnnnnnnnnnnnnnnnnnnnnnnnnnnnnnnnnnnnnnnnnnnnnnnnnnnnnnnnnnnnnnnnnnnnnnnnnnnnnnnnnnnnnnnnnnnnnnnnnnnnnnnnnnnnnnnnnnnnnnnnnnnnnnnnnnnnnnnnnnnnnnnnnnnnnnnnnnnnnnnnnnnnnnnnnnnnnnnnnnnnnnnnnnnnnnnnnnnnnnnnnnnnnnnnnnnnnnnnnnnnnnnnnnnnnnnnnnnnnnnnnnnnnnnnnnnnnnnnnnnnnnnnnnnnnnnnnnnnnnnnnnnnnnnnnnnnnnnnnnnnnnnnnnnnnnnnnnnnnnnnnnnnnnnnnnnnnnnnnnnnnnnnnnnnnnnnnnnnnnnnnnnnnnnnnnnnnnnnnnnnnnnnnnnnnnnnnnnnnnnnnnnnnnnnnnnnnnnnnnnnnnnnnnnnnnnnnnnnnnnnnnnnnnnnnnnnnnnnnnnnnnnnnnnnnnnnnnnnnnnnnnnnnnnnnnnnnnnnnnnnnnnnnnnnnnnnnnnnnnnnnnnnnnnnnnnnnnnnnnnnnnnnnnnnnnnnnnnnnnnnnnnnnnnnnnnnnnnnnnnnnnnnnnnnnnnnnnnnnnnnnnnnnnnnnnnnnnnnnnnnnnnnnnnnnnnnnnnnnnnnnnnnnnnnnnnnnnnnnnnnnnnnnnnnnnnnnnnnnnnnnnnnnnnnnnnnnnnnnnnnnnnnnnnnnnnnnnnnnnnnnnnnnnnnnnnnnnnnnnnnnnnnnnnnnnnnnnnnnnnnnnnnnnnnnnnnnnnnnnnnnnnnnnnnnnnnnnnnnnnnnnnnnnnnnnnnnnnnnnnnnnnnnnnnnnnnnnnnnnnnnnnnnnnnnnnnnnnnnnnnnnnnnnnnnnnnnnnnnnnnnnnnnnnnnnnnnnnnnnnnnnnnnnnnnnnnnnnnnnnnnnnnnnnnnnnnnnnnnnnnnnnnnnnnnnnnnnnnnnnnnnnnnnnnnnnnnnnnnnnnnnnnnnnnnnnnnnnnnnnnnnnnnnnnnnnnnnnnnnnnnnnnnnnnnnnnnnnnnnnnnnnnnnnnnnnnnnnnnnnnnnnnnnnnnnnnnnnnnnnnnnnnnnnnnnnnnnnnnnnnnnnnnnnnnnnnnnnnnnnnnnnnnnnnnnnnnnnnnnnnnnnnnnnnnnnnnnnnnnnnnnnnnnnnnnnnnnnnnnnnnnnnnnnnnnnnnnnnnnnnnnnnnnnnnnnnnnnnnnnnnnnnnnnnnnnnnnnnnnnnnnnnnnnnnnnnnnnnnnnnnnnnnnnnnnnnnnnnnnnnnnnnnnnnnnnnnnnnnnnnnnnnnnnnnnnnnnnnnnnnnnnnnnnnnnnnnnnnnnnnnnnnnnnnnnnnnnnnnnnnnnnnnnnnnnnnnnnnnnnnnnnnnnnnnnnnnnnnnnnnnnnnnnnnnnnnnnnnnnnnnnnnnnnnnnnnnnnnnnnnnnnnnnnnnnnnnnnnnnnnnnnnnnnnnnnnnnnnnnnnnnnnnnnnnnnnnnnnnnnnnnnnnnnnnnnnnnnnnnnnnnnnnnnnnnnnnnnnnnnnnnnnnnnnnnnnnnnnnnnnnnnnnnnnnnnnnnnnnnnnnnnnnnnnnnnnnnnnnnnnnnnnnnnnnnnnnnnnnnnnnnnnnnnnnnnnnnnnnnnnnnnnnnnnnnnnnnnnnnnnnnnnnnnnnnnnnnnnnnnnnnnnnnnnnnnnnnnnnnnnnnnnnnnnnnnnnnnnnnnnnnnnnnnnnnnnnnnnnnnnnnnnnnnnnnnnnnnnnnnnnnnnnnnnnnnnnnnnnnnnnnnnnnnnnnnnnnnnnnnnnnnnnnnnnnnnnnnnnnnnnnnnnnnnnnnnnnnnnnnnnnnnnnnnnnnnnnnnnnnnnnnnnnnnnnnnnnnnnnnnnnnnnnnnnnnnnnnnnnnnnnnnnnnnnnnnnnnnnnnnnnnnnnnnnnnnnnnnnnnnnnnnnnnnnnnnnnnnnnnnnnnnnnnnnnnnnnnnnnnnnnnnnnnnnnnnnnnnnnnnnnnnnnnnnnnnnnnnnnnnnnnnnnnnnnnnnnnnnnnnnnnnnnnnnnnnnnnnnnnnnnnnnnnnnnnnnnnnnnnnnnnnnnnnnnnnnnnnnnnnnnnnnnnnnnnnnnnnnnnnnnnnnnnnnnnnnnnnnnnnnnnnnnnnnnnnnnnnnnnnnnnnnnnnnnnnnnnnnnnnnnnnnnnnnnnnnnnnnnnnnnnnnnnnnnnnnnnnnnnnnnnnnnnnnnnnnnnnnnnnnnnnnnnnnnnnnnnnnnnnnnnnnnnnnnnnnnnnnnnnnnnnnnnnnnnnnnnnnnnnnnnnnnnnnnnnnnnnnnnnnnnnnnnnnnnnnnnnnnnnnnnnnnnnnnnnnnnnnnnnnnnnnnnnnnnnnnnnnnnnnnnnnnnnnnnnnnnnnnnnnnnnnnnnnnnnnnnnnnnnnnnnnnnnnnnnnnnnnnnnnnnnnnnnnnnnnnnnnnnnnnnnnnnnnnnnnnnnnnnnnnnnnnnnnnnnnnnnnnnnnnnnnnnnnnnnnnnnnnnnnnnnnnnnnnnnnnnnnnnnnnnnnnnnnnnnnnnnnnnnnnnnnnnnnnnnnnnnnnnnnnnnnnnnnnnnnnnnnnnnnnnnnnnnnnnnnnnnnnnnnnnnnnnnnnnnnnnnnnnnnnnnnnnnnnnnnnnnnnnnnnnnnnnnnnnnnnnnnnnnnnnnnnnnnnnnnnnnnnnnnnnnnnnnnnnnnnnnnnnnnnnnnnnnnnnnnnnnnnnnnnnnnnnnnnnnnnnnnnnnnnnnnnnnnnnnnnnnnnnnnnnnnnnnnnnnnnnnnnnnnnnnnnnnnnnnnnnnnnnnnnnnnnnnnnnnnnnnnnnnnnnnnnnnnnnnnnnnnnnnnnnnnnnnnnnnnnnnnnnnnnnnnnnnnnnnnnnnnnnnnnnnnnnnnnnnnnnnnnnnnnnnnnnnnnnnnnnnnnnnnnnnnnnnnnnnnnnnnnnnnnnnnnnnnnnnnnnnnnnnnnnnnnnnnnnnnnnnnnnnnnnnnnnnnnnnnnnnnnnnnnnnnnnnnnnnnnnnnnnnnnnnnnnnnnnnnnnnnnnnnnnnnnnnnnnnnnnnnnnnnnnnnnnnnnnnnnnnnnnnnnnnnnnnnnnnnnnnnnnnnnnnnnnnnnnnnnnnnnnnnnnnnnnnnnnnnnnnnnnnnnnnnnnnnnnnnnnnnnnnnnnnnnnnnnnnnnnnnnnnnnnnnnnnnnnnnnnnnnnnnnnnnnnnnnnnnnnnnnnnnnnnnnnnnnnnnnnnnnnnnnnnnnnnnnnnnnnnnnnnnnnnnnnnnnnnnnnnnnnnnnnnnnnnnnnnnnnnnnnnnnnnnnnnnnnnnnnnnnnnnnnnnnnnnnnnnnnnnnnnnnnnnnnnnnnnnnnnnnnnnnnnnnnnnnnnnnnnnnnnnnnnnnnnnnnnnnnnnnnnnnnnnnnnnnnnnnnnnnnnnnnnnnnnnnnnnnnnnnnnnnnnnnnnnnnnnnnnnnnnnnnnnnnnnnnnnnnnnnnnnnnnnnnnnnnnnnnnnnnnnnnnnnnnnnnnnnnnnnnnnnnnnnnnnnnnnnnnnnnnnnnnnnnnnnnnnnnnnnnnnnnnnnnnnnnnnnnnnnnnnnnnnnnnnnnnnnnnnnnnnnnnnnnnnnnnnnnnnnnnnnnnnnnnnnnnnnnnnnnnnnnnnnnnnnnnnnnnnnnnnnnnnnnnnnnnnnnnnnnnnnnnnnnnnnnnnnnnnnnnnnnnnnnnnnnnnnnnnnnnnnnnnnnnnnnnnnnnnnnnnnnnnnnnnnnnnnnnnnnnnnnnnnnnnnnnnnnnnnnnnnnnnnnnnnnnnnnnnnnnnnnnnnnnnnnnnnnnnnnnnnnnnnnnnnnnnnnnnnnnnnnnnnnnnnnnnnnnnnnnnnnnnnnnnnnnnnnnnnnnnnnnnnnnnnnnnnnnnnnnnnnnnnnnnnnnnnnnnnnnnnnnnnnnnnnnnnnnnnnnnnnnnnnnnnnnnnnnnnnnnnnnnnnnnnnnnnnnnnnnnnnnnnnnnnnnnnnnnnnnnnnnnnnnnnnnnnnnnnnnnnnnnnnnnnnnnnnnnnnnnnnnnnnnnnnnnnnnnnnnnnnnnnnnnnnnnnnnnnnnnnnnnnnnnnnnnnnnnnnnnnnnnnnnnnnnnnnnnnnnnnnnnnnnnnnnnnnnnnnnnnnnnnnnnnnnnnnnnnnnnnnnnnnnnnnnnnnnnnnnnnnnnnnnnnnnnnnnnnnnnnnnnnnnnnnnnnnnnnnnnnnnnnnnnnnnnnnnnnnnnnnnnnnnnnnnnnnnnnnnnnnnnnnnnnnnnnnnnnnnnnnnnnnnnnnnnnnnnnnnnnnnnnnnnnnnnnnnnnnnnnnnnnnnnnnnnnnnnnnnnnnnnnnnnnnnnnnnnnnnnnnnnnnnnnnnnnnnnnnnnnnnnnnnnnnnnnnnnnnnnnnnnnnnnnnnnnnnnnnnnnnnnnnnnnnnnnnnnnnnnnnnnnnnnnnnnnnnnnnnnnnnnnnnnnnnnnnnnnnnnnnnnnnnnnnnnnnnnnnnnnnnnnnnnnnnnnnnnnnnnnnnnnnnnnnnnnnnnnnnnnnnnnnnnnnnnnnnnnnnnnnnnnnnnnnnnnnnnnnnnnnnnnnnnnnnnnnnnnnnnnnnnnnnnnnnnnnnnnnnnnnnnnnnnnnnnnnnnnnnnnnnnnnnnnnnnnnnnnnnnnnnnnnnnnnnnnnnnnnnnnnnnnnnnnnnnnnnnnnnnnnnnnnnnnnnnnnnnnnnnnnnnnnnnnnnnnnnnnnnnnnnnnnnnnnnnnnnnnnnnnnnnnnnnnnnnnnnnnnnnnnnnnnnnnnnnnnnnnnnnnnnnnnnnnnnnnnnnnnnnnnnnnnnnnnnnnnnnnnnnnnnnnnnnnnnnnnnnnnnnnnnnnnnnnnnnnnnnnnnnnnnnnnnnnnnnnnnnnnnnnnnnnnnnnnnnnnnnnnnnnnnnnnnnnnnnnnnnnnnnnnnnnnnnnnnnnnnnnnnnnnnnnnnnnnnnnnnnnnnnnnnnnnnnnnnnnnnnnnnnnnnnnnnnnnnnnnnnnnnnnnnnnnnnnnnnnnnnnnnnnnnnnnnnnnnnnnnnnnnnnnnnnnnnnnnnnnnnnnnnnnnnnnnnnnnnnnnnnnnnnnnnnnnnnnnnnnnnnnnnnnnnnnnnnnnnnnnnnnnnnnnnnnnnnnnnnnnnnnnnnnnnnnnnnnnnnnnnnnnnnnnnnnnnnnnnnnnnnnnnnnnnnnnnnnnnnnnnnnnnnnnnnnnnnnnnnnnnnnnnnnnnnnnnnnnnnnnnnnnnnnnnnnnnnnnnnnnnnnnnnnnnnnnnnnnnnnnnnnnnnnnnnnnnnnnnnnnnnnnnnnnnnnnnnnnnnnnnnnnnnnnnnnnnnnnnnnnnnnnnnnnnnnnnnnnnnnnnnnnnnnnnnnnnnnnnnnnnnnnnnnnnnnnnnnnnnnnnnnnnnnnnnnnnnnnnnnnnnnnnnnnnnnnnnnnnnnnnnnnnnnnnnnnnnnnnnnnnnnnnnnnnnnnnnnnnnnnnnnnnnnnnnnnnnnnnnnnnnnnnnnnnnnnnnnnnnnnnnnnnnnnnnnnnnnnnnnnnnnnnnnnnnnnnnnnnnnnnnnnnnnnnnnnnnnnnnnnnnnnnnnnnnnnnnnnnnnnnnnnnnnnnnnnnnnnnnnnnnnnnnnnnnnnnnnnnnnnnnnnnnnnnnnnnnnnnnnnnnnnnnnnnnnnnnnnnnnnnnnnnnnnnnnnnnnnnnnnnnnnnnnnnnnnnnnnnnnnnnnnnnnnnnnnnnnnnnnnnnnnnnnnnnnnnnnnnnnnnnnnnnnnnnnnnnnnnnnnnnnnnnnnnnnnnnnnnnnnnnnnnnnnnnnnnnnnnnnnnnnnnnnnnnnnnnnnnnnnnnnnnnnnnnnnnnnnnnnnnnnnnnnnnnnnnnnnnnnnnnnnnnnnnnnnnnnnnnnnnnnnnnnnnnnnnnnnnnnnnnnnnnnnnnnnnnnnnnnnnnnnnnnnnnnnnnnnnnnnnnnnnnnnnnnnnnnnnnnnnnnnnnnnnnnnnnnnnnnnnnnnnnnnnnnnnnnnnnnnnnnnnnnnnnnnnnnnnnnnnnnnnnnnnnnnnnnnnnnnnnnnnnnnnnnnnnnnnnnnnnnnnnnnnnnnnnnnnnnnnnnnnnnnnnnnnnnnnnnnnnnnnnnnnnnnnnnnnnnnnnnnnnnnnnnnnnnnnnnnnnnnnnnnnnnnnnnnnnnnnnnnnnnnnnnnnnnnnnnnnnnnnnnnnnnnnnnnnnnnnnnnnnnnnnnnnnnnnnnnnnnnnnnnnnnnnnnnnnnnnnnnnnnnnnnnnnnnnnnnnnnnnnnnnnnnnnnnnnnnnnnnnnnnnnnnnnnnnnnnnnnnnnnnnnnnnnnnnnnnnnnnnnnnnnnnnnnnnnnnnnnnnnnnnnnnnnnnnnnnnnnnnnnnnnnnnnnnnnnnnnnnnnnnnnnnnnnnnnnnnnnnnnnnnnnnnnnnnnnnnnnnnnnnnnnnnnnnnnnnnnnnnnnnnnnnnnnnnnnnnnnnnnnnnnnnnnnnnnnnnnnnnnnnnnnnnnnnnnnnnnnnnnnnnnnnnnnnnnnnnnnnnnnnnnnnnnnnnnnnnnnnnnnnnnnnnnnnnnnnnnnnnnnnnnnnnnnnnnnnnnnnnnnnnnnnnnnnnnnnnnnnnnnnnnnnnnnnnnnnnnnnnnnnnnnnnnnnnnnnnnnnnnnnnnnnnnnnnnnnnnnnnnnnnnnnnnnnnnnnnnnnnnnnnnnnnnnnnnnnnnnnnnnnnnnnnnnnnnnnnnnnnnnnnnnnnnnnnnnnnnnnnnnnnnnnnnnnnnnnnnnnnnnnnnnnnnnnnnnnnnnnnnnnnnnnnnnnnnnnnnnnnnnnnnnnnnnnnnnnnnnnnnnnnnnnnnnnnnnnnnnnnnnnnnnnnnnnnnnnnnnnnnnnnnnnnnnnnnnnnnnnnnnnnnnnnnnnnnnnnnnnnnnnnnnnnnnnnnnnnnnnnnnnnnnnnnnnnnnnnnnnnnnnnnnnnnnnnnnnnnnnnnnnnnnnnnnnnnnnnnnnnnnnnnnnnnnnnnnnnnnnnnnnnnnnnnnnnnnnnnnnnnnnnnnnnnnnnnnnnnnnnnnnnnnnnnnnnnnnnnnnnnnnnnnnnnnnnnnnnnnnnnnnnnnnnnnnnnnnnnnnnnnnnnnnnnnnnnnnnnnnnnnnnnnnnnnnnnnnnnnnnnnnnnnnnnnnnnnnnnnnnnnnnnnnnnnnnnnnnnnnnnnnnnnnnnnnnnnnnnnnnnnnnnnnnnnnnnnnnnnnnnnnnnnnnnnnnnnnnnnnnnnnnnnnnnnnnnnnnnnnnnnnnnnnnnnnnnnnnnnnnnnnnnnnnnnnnnnnnnnnnnnnnnnnnnnnnnnnnnnnnnnnnnnnnnnnnnnnnnnnnnnnnnnnnnnnnnnnnnnnnnnnnnnnnnnnnnnnnnnnnnnnnnnnnnnnnnnnnnnnnnnnnnnnnnnnnnnnnnnnnnnnnnnnnnnnnnnnnnnnnnnnnnnnnnnnnnnnnnnnnnnnnnnnnnnnnnnnnnnnnnnnnnnnnnnnnnnnnnnnnnnnnnnnnnnnnnnnnnnnnnnnnnnnnnnnnnnnnnnnnnnnnnnnnnnnnnnnnnnnnnnnnnnnnnnnnnnnnnnnnnnnnnnnnnnnnnnnnnnnnnnnnnnnnnnnnnnnnnnnnnnnnnnnnnnnnnnnnnnnnnnnnnnnnnnnnnnnnnnnnnnnnnnnnnnnnnnnnnnnnnnnnnnnnnnnnnnnnnnnnnnnnnnnnnnnnnnnnnnnnnnnnnnnnnnnnnnnnnnnnnnnnnnnnnnnnnnnnnnnnnnnnnnnnnnnnnnnnnnnnnnnnnnnnnnnnnnnnnnnnnnnnnnnnnnnnnnnnnnnnnnnnnnnnnnnnnnnnnnnnnnnnnnnnnnnnnnnnnnnnnnnnnnnnnnnnnnnnnnnnnnnnnnnnnnnnnnnnnnnnnnnnnnnnnnnnnnnnnnnnnnnnnnnnnnnnnnnnnnnnnnnnnnnnnnnnnnnnnnnnnnnnnnnnnnnnnnnnnnnnnnnnnnnnnnnnnnnnnnnnnnnnnnnnnnnnnnnnnnnnnnnnnnnnnnnnnnnnnnnnnnnnnnnnnnnnnnnnnnnnnnnnnnnnnnnnnnnnnnnnnnnnnnnnnnnnnnnnnnnnnnnnnnnnnnnnnnnnnnnnnnnnnnnnnnnnnnnnnnnnnnnnnnnnnnnnnnnnnnnnnnnnnnnnnnnnnnnnnnnnnnnnnnnnnnnnnnnnnnnnnnnnnnnnnnnnnnnnnnnnnnnnnnnnnnnnnnnnnnnnnnnnnnnnnnnnnnnnnnnnnnnnnnnnnnnnnnnnnnnnnnnnnnnnnnnnnnnnnnnnnnnnnnnnnnnnnnnnnnnnnnnnnnnnnnnnnnnnnnnnnnnnnnnnnnnnnnnnnnnnnnnnnnnnnnnnnnnnnnnnnnnnnnnnnnnnnnnnnnnnnnnnnnnnnnnnnnnnnnnnnnnnnnnnnnnnnnnnnnnnnnnnnnnnnnnnnnnnnnnnnnnnnnnnnnnnnnnnnnnnnnnnnnnnnnnnnnnnnnnnnnnnnnnnnnnnnnnnnnnnnnnnnnnnnnnnnnnnnnnnnnnnnnnnnnnnnnnnnnnnnnnnnnnnnnnnnnnnnnnnnnnnnnnnnnnnnnnnnnnnnnnnnnnnnnnnnnnnnnnnnnnnnnnnnnnnnnnnnnnnnnnnnnnnnnnnnnnnnnnnnnnnnnnnnnnnnnnnnnnnnnnnnnnnnnnnnnnnnnnnnnnnnnnnnnnnnnnnnnnnnnnnnnnnnnnnnnnnnnnnnnnnnnnnnnnnnnnnnnnnnnnnnnnnnnnnnnnnnnnnnnnnnnnnnnnnnnnnnnnnnnnnnnnnnnnnnnnnnnnnnnnnnnnnnnnnnnnnnnnnnnnnnnnnnnnnnnnnnnnnnnnnnnnnnnnnnnnnnnnnnnnnnnnnnnnnnnnnnnnnnnnnnnnnnnnnnnnnnnnnnnnnnnnnnnnnnnnnnnnnnnnnnnnnnnnnnnnnnnnnnnnnnnnnnnnnnnnnnnnnnnnnnnnnnnnnnnnnnnnnnnnnnnnnnnnnnnnnnnnnnnnnnnnnnnnnnnnnnnnnnnnnnnnnnnnnnnnnnnnnnnnnnnnnnnnnnnnnnnnnnnnnnnnnnnnnnnnnnnnnnnnnnnnnnnnnnnnnnnnnnnnnnnnnnnnnnnnnnnnnnnnnnnnnnnnnnnnnnnnnnnnnnnnnnnnnnnnnnnnnnnnnnnnnnnnnnnnnnnnnnnnnnnnnnnnnnnnnnnnnnnnnnnnnnnnnnnnnnnnnnnnnnnnnnnnnnnnnnnnnnnnnnnnnnnnnnnnnnnnnnnnnnnnnnnnnnnnnnnnnnnnnnnnnnnnnnnnnnnnnnnnnnnnnnnnnnnnnnnnnnnnnnnnnnnnnnnnnnnnnnnnnnnnnnnnnnnnnnnnnnnnnnnnnnnnnnnnnnnnnnnnnnnnnnnnnnnnnnnnnnnnnnnnnnnnnnnnnnnnnnnnnnnnnnnnnnnnnnnnnnnnnnnnnnnnnnnnnnnnnnnnnnnnnnnnnnnnnnnnnnnnnnnnnnnnnnnnnnnnnnnnnnnnnnnnnnnnnnnnnnnnnnnnnnnnnnnnnnnnnnnnnnnnnnnnnnnnnnnnnnnnnnnnnnnnnnnnnnnnnnnnnnnnnnnnnnnnnnnnnnnnnnnnnnnnnnnnnnnnnnnnnnnnnnnnnnnnnnnnnnnnnnnnnnnnnnnnnnnnnnnnnnnnnnnnnnnnnnnnnnnnnnnnnnnnnnnnnnnnnnnnnnnnnnnnnnnnnnnnnnnnnnnnnnnnnnnnnnnnnnnnnnnnnnnnnnnnnnnnnnnnnnnnnnnnnnnnnnnnnnnnnnnnnnnnnnnnnnnnnnnnnnnnnnnnnnnnnnnnnnnnnnnnnnnnnnnnnnnnnnnnnnnnnnnnnnnnnnnnnnnnnnnnnnnnnnnnnnnnnnnnnnnnnnnnnnnnnnnnnnnnnnnnnnnnnnnnnnnnnnnnnnnnnnnnnnnnnnnnnnnnnnnnnnnnnnnnnnnnnnnnnnnnnnnnnnnnnnnnnnnnnnnnnnnnnnnnnnnnnnnnnnnnnnnnnnnnnnnnnnnnnnnnnnnnnnnnnnnnnnnnnnnnnnnnnnnnnnnnnnnnnnnnnnnnnnnnnnnnnnnnnnnnnnnnnnnnnnnnnnnnnnnnnnnnnnnnnnnnnnnnnnnnnnnnnnnnnnnnnnnnnnnnnnnnnnnnnnnnnnnnnnnnnnnnnnnnnnnnnnnnnnnnnnnnnnnnnnnnnnnnnnnnnnnnnnnnnnnnnnnnnnnnnnnnnnnnnnnnnnnnnnnnnnnnnnnnnnnnnnnnnnnnnnnnnnnnnnnnnnnnnnnnnnnnnnnnnnnnnnnnnnnnnnnnnnnnnnnnnnnnnnnnnnnnnnnnnnnnnnnnnnnnnnnnnnnnnnnnnnnnnnnnnnnnnnnnnnnnnnnnnnnnnnnnnnnnnnnnnnnnnnnnnnnnnnnnnnnnnnnnnnnnnnnnnnnnnnnnnnnnnnnnnnnnnnnnnnnnnnnnnnnnnnnnnnnnnnnnnnnnnnnnnnnnnnnnnnnnnnnnnnnnnnnnnnnnnnnnnnnnnnnnnnnnnnnnnnnnnnnnnnnnnnnnnnnnnnnnnnnnnnnnnnnnnnnnnnnnnnnnnnnnnnnnnnnnnnnnnnnnnnnnnnnnnnnnnnnnnnnnnnnnnnnnnnnnnnnnnnnnnnnnnnnnnnnnnnnnnnnnnnnnnnnnnnnnnnnnnnnnnnnnnnnnnnnnnnnnnnnnnnnnnnnnnnnnnnnnnnnnnnnnnnnnnnnnnnnnnnnnnnnnnnnnnnnnnnnnnnnnnnnnnnnnnnnnnnnnnnnnnnnnnnnnnnnnnnnnnnnnnnnnnnnnnnnnnnnnnnnnnnnnnnnnnnnnnnnnnnnnnnnnnnnnnnnnnnnnnnnnnnnnnnnnnnnnnnnnnnnnnnnnnnnnnnnnnnnnnnnnnnnnnnnnnnnnnnnnnnnnnnnnnnnnnnnnnnnnnnnnnnnnnnnnnnnnnnnnnnnnnnnnnnnnnnnnnnnnnnnnnnnnnnnnnnnnnnnnnnnnnnnnnnnnnnnnnnnnnnnnnnnnnnnnnnnnnnnnnnnnnnnnnnnnnnnnnnnnnnnnnnnnnnnnnnnnnnnnnnnnnnnnnnnnnnnnnnnnnnnnnnnnnnnnnnnnnnnnnnnnnnnnnnnnnnnnnnnnnnnnnnnnnnnnnnnnnnnnnnnnnnnnnnnnnnnnnnnnnnnnnnnnnnnnnnnnnnnnnnnnnnnnnnnnnnnnnnnnnnnnnnnnnnnnnnnnnnnnnnnnnnnnnnnnnnnnnnnnnnnnnnnnnnnnnnnnnnnnnnnnnnnnnnnnnnnnnnnnnnnnnnnnnnnnnnnnnnnnnnnnnnnnnnnnnnnnnnnnnnnnnnnnnnnnnnnnnnnnnnnnnnnnnnnnnnnnnnnnnnnnnnnnnnnnnnnnnnnnnnnnnnnnnnnnnnnnnnnnnnnnnnnnnnnnnnnnnnnnnnnnnnnnnnnnnnnnnnnnnnnnnnnnnnnnnnnnnnnnnnnnnnnnnnnnnnnnnnnnnnnnnnnnnnnnnnnnnnnnnnnnnnnnnnnnnnnnnnnnnnnnnnnnnnnnnnnnnnnnnnnnnnnnnnnnnnnnnnnnnnnnnnnnnnnnnnnnnnnnnnnnnnnnnnnnnnnnnnnnnnnnnnnnnnnnnnnnnnnnnnnnnnnnnnnnnnnnnnnnnnnnnnnnnnnnnnnnnnnnnnnnnnnnnnnnnnnnnnnnnnnnnnnnnnnnnnnnnnnnnnnnnnnnnnnnnnnnnnnnnnnnnnnnnnnnnnnnnnnnnnnnnnnnnnnnnnnnnnnnnnnnnnnnnnnnnnnnnnnnnnnnnnnnnnnnnnnnnnnnnnnnnnnnnnnnnnnnnnnnnnnnnnnnnnnnnnnnnnnnnnnnnnnnnnnnnnnnnnnnnnnnnnnnnnnnnnnnnnnnnnnnnnnnnnnnnnnnnnnnnnnnnnnnnnnnnnnnnnnnnnnnnnnnnnnnnnnnnnnnnnnnnnnnnnnnnnnnnnnnnnnnnnnnnnnnnnnnnnnnnnnnnnnnnnnnnnnnnnnnnnnnnnnnnnnnnnnnnnnnnnnnnnnnnnnnnnnnnnnnnnnnnnnnnnnnnnnnnnnnnnnnnnnnnnnnnnnnnnnnnnnnnnnnnnnnnnnnnnnnnnnnnnnnnnnnnnnnnnnnnnnnnnnnnnnnnnnnnnnnnnnnnnnnnnnnnnnnnnnnnnnnnnnnnnnnnnnnnnnnnnnnnnnnnnnnnnnnnnnnnnnnnnnnnnnnnnnnnnnnnnnnnnnnnnnnnnnnnnnnnnnnnnnnnnnnnnnnnnnnnnnnnnnnnnnnnnnnnnnnnnnnnnnnnnnnnnnnnnnnnnnnnnnnnnnnnnnnnnnnnnnnnnnnnnnnnnnnnnnnnnnnnnnnnnnnnnnnnnnnnnnnnnnnnnnnnnnnnnnnnnnnnnnnnnnnnnnnnnnnnnnnnnnnnnnnnnnnnnnnnnnnnnnnnnnnnnnnnnnnnnnnnnnnnnnnnnnnnnnnnnnnnnnnnnnnnnnnnnnnnnnnnnnnnnnnnnnnnnnnnnnnnnnnnnnnnnnnnnnnnnnnnnnnnnnnnnnnnnnnnnnnnnnnnnnnnnnnnnnnnnnnnnnnnnnnnnnnnnnnnnnnnnnnnnnnnnnnnnnnnnnnnnnnnnnnnnnnnnnnnnnnnnnnnnnnnnnnnnnnnnnnnnnnnnnnnnnnnnnnnnnnnnnnnnnnnnnnnnnnnnnnnnnnnnnnnnnnnnnnnnnnnnnnnnnnnnnnnnnnnnnnnnnnnnnnnnnnnnnnnnnnnnnnnnnnnnnnnnnnnnnnnnnnnnnnnnnnnnnnnnnnnnnnnnnnnnnnnnnnnnnnnnnnnnnnnnnnnnnnnnnnnnnnnnnnnnnnnnnnnnnnnnnnnnnnnnnnnnnnnnnnnnnnnnnnnnnnnnnnnnnnnnnnnnnnnnnnnnnnnnnnnnnnnnnnnnnnnnnnnnnnnnnnnnnnnnnnnnnnnnnnnnnnnnnnnnnnnnnnnnnnnnnnnnnnnnnnnnnnnnnnnnnnnnnnnnnnnnnnnnnnnnnnnnnnnnnnnnnnnnnnnnnnnnnnnnnnnnnnnnnnnnnnnnnnnnnnnnnnnnnnnnnnnnnnnnnnnnnnnnnnnnnnnnnnnnnnnnnnnnnnnnnnnnnnnnnnnnnnnnnnnnnnnnnnnnnnnnnnnnnnnnnnnnnnnnnnnnnnnnnnnnnnnnnnnnnnnnnnnnnnnnnnnnnnnnnnnnnnnnnnnnnnnnnnnnnnnnnnnnnnnnnnnnnnnnnnnnnnnnnnnnnnnnnnnnnnnnnnnnnnnnnnnnnnnnnnnnnnnnnnnnnnnnnnnnnnnnnnnnnnnnnnnnnnnnnnnnnnnnnnnnnnnnnnnnnnnnnnnnnnnnnnnnnnnnnnnnnnnnnnnnnnnnnnnnnnnnnnnnnnnnnnnnnnnnnnnnnnnnnnnnnnnnnnnnnnnnnnnnnnnnnnnnnnnnnnnnnnnnnnnnnnnnnnnnnnnnnnnnnnnnnnnnnnnnnnnnnnnnnnnnnnnnnnnnnnnnnnnnnnnnnnnnnnnnnnnnnnnnnnnnnnnnnnnnnnnnnnnnnnnnnnnnnnnnnnnnnnnnnnnnnnnnnnnnnnnnnnnnnnnnnnnnnnnnnnnnnnnnnnnnnnnnnnnnnnnnnnnnnnnnnnnnnnnnnnnnnnnnnnnnnnnnnnnnnnnnnnnnnnnnnnnnnnnnnnnnnnnnnnnnnnnnnnnnnnnnnnnnnnnnnnnnnnnnnnnnnnnnnnnnnnnnnnnnnnnnnnnnnnnnnnnnnnnnnnnnnnnnnnnnnnnnnnnnnnnnnnnnnnnnnnnnnnnnnnnnnnnnnnnnnnnnnnnnnnnnnnnnnnnnnnnnnnnnnnnnnnnnnnnnnnnnnnnnnnnnnnnnnnnnnnnnnnnnnnnnnnnnnnnnnnnnnnnnnnnnnnnnnnnnnnnnnnnnnnnnnnnnnnnnnnnnnnnnnnnnnnnnnnnnnnnnnnnnnnnnnnnnnnnnnnnnnnnnnnnnnnnnnnnnnnnnnnnnnnnnnnnnnnnnnnnnnnnnnnnnnnnnnnnnnnnnnnnnnnnnnnnnnnnnnnnnnnnnnnnnnnnnnnnnnnnnnnnnnnnnnnnnnnnnnnnnnnnnnnnnnnnnnnnnnnnnnnnnnnnnnnnnnnnnnnnnnnnnnnnnnnnnnnnnnnnnnnnnnnnnnnnnnnnnnnnnnnnnnnnnnnnnnnnnnnnnnnnnnnnnnnnnnnnnnnnnnnnnnnnnnnnnnnnnnnnnnnnnnnnnnnnnnnnnnnnnnnnnnnnnnnnnnnnnnnnnnnnnnnnnnnnnnnnnnnnnnnnnnnnnnnnnnnnnnnnnnnnnnnnnnnnnnnnnnnnnnnnnnnnnnnnnnnnnnnnnnnnnnnnnnnnnnnnnnnnnnnnnnnnnnnnnnnnnnnnnnnnnnnnnnnnnnnnnnnnnnnnnnnnnnnnnnnnnnnnnnnnnnnnnnnnnnnnnnnnnnnnnnnnnnnnnnnnnnnnnnnnnnnnnnnnnnnnnnnnnnnnnnnnnnnnnnnnnnnnnnnnnnnnnnnnnnnnnnnnnnnnnnnnnnnnnnnnnnnnnnnnnnnnnnnnnnnnnnnnnnnnnnnnnnnnnnnnnnnnnnnnnnnnnnnnnnnnnnnnnnnnnnnnnnnnnnnnnnnnnnnnnnnnnnnnnnnnnnnnnnnnnnnnnnnnnnnnnnnnnnnnnnnnnnnnnnnnnnnnnnnnnnnnnnnnnnnnnnnnnnnnnnnnnnnnnnnnnnnnnnnnnnnnnnnnnnnnnnnnnnnnnnnnnnnnnnnnnnnnnnnnnnnnnnnnnnnnnnnnnnnnnnnnnnnnnnnnnnnnnnnnnnnnnnnnnnnnnnnnnnnnnnnnnnnnnnnnnnnnnnnnnnnnnnnnnnnnnnnnnnnnnnnnnnnnnnnnnnnnnnnnnnnnnnnnnnnnnnnnnnnnnnnnnnnnnnnnnnnnnnnnnnnnnnnnnnnnnnnnnnnnnnnnnnnnnnnnnnnnnnnnnnnnnnnnnnnnnnnnnnnnnnnnnnnnnnnnnnnnnnnnnnnnnnnnnnnnnnnnnnnnnnnnnnnnnnnnnnnnnnnnnnnnnnnnnnnnnnnnnnnnnnnnnnnnnnnnnnnnnnnnnnnnnnnnnnnnnnnnnnnnnnnnnnnnnnnnnnnnnnnnnnnnnnnnnnnnnnnnnnnnnnnnnnnnnnnnnnnnnnnnnnnnnnnnnnnnnnnnnnnnnnnnnnnnnnnnnnnnnnnnnnnnnnnnnnnnnnnnnnnnnnnnnnnnnnnnnnnnnnnnnnnnnnnnnnnnnnnnnnnnnnnnnnnnnnnnnnnnnnnnnnnnnnnnnnnnnnnnnnnnnnnnnnnnnnnnnnnnnnnnnnnnnnnnnnnnnnnnnnnnnnnnnnnnnnnnnnnnnnnnnnnnnnnnnnnnnnnnnnnnnnnnnnnnnnnnnnnnnnnnnnnnnnnnnnnnnnnnnnnnnnnnnnnnnnnnnnnnnnnnnnnnnnnnnnnnnnnnnnnnnnnnnnnnnnnnnnnnnnnnnnnnnnnnnnnnnnnnnnnnnnnnnnnnnnnnnnnnnnnnnnnnnnnnnnnnnnnnnnnnnnnnnnnnnnnnnnnnnnnnnnnnnnnnnnnnnnnnnnnnnnnnnnnnnnnnnnnnnnnnnnnnnnnnnnnnnnnnnnnnnnnnnnnnnnnnnnnnnnnnnnnnnnnnnnnnnnnnnnnnnnnnnnnnnnnnnnnnnnnnnnnnnnnnnnnnnnnnnnnnnnnnnnnnnnnnnnnnnnnnnnnnnnnnnnnnnnnnnnnnnnnnnnnnnnnnnnnnnnnnnnnnnnnnnnnnnnnnnnnnnnnnnnnnnnnnnnnnnnnnnnnnnnnnnnnnnnnnnnnnnnnnnnnnnnnnnnnnnnnnnnnnnnnnnnnnnnnnnnnnnnnnnnnnnnnnnnnnnnnnnnnnnnnnnnnnnnnnnnnnnnnnnnnnnnnnnnnnnnnnnnnnnnnnnnnnnnnnnnnnnnnnnnnnnnnnnnnnnnnnnnnnnnnnnnnnnnnnnnnnnnnnnnnnnnnnnnnnnnnnnnnnnnnnnnnnnnnnnnnnnnnnnnnnnnnnnnnnnnnnnnnnnnnnnnnnnnnnnnnnnnnnnnnnnnnnnnnnnnnnnnnnnnnnnnnnnnnnnnnnnnnnnnnnnnnnnnnnnnnnnnnnnnnnnnnnnnnnnnnnnnnnnnnnnnnnnnnnnnnnnnnnnnnnnnnnnnnnnnnnnnnnnnnnnnnnnnnnnnnnnnnnnnnnnnnnnnnnnnnnnnnnnnnnnnnnnnnnnnnnnnnnnnnnnnnnnnnnnnnnnnnnnnnnnnnnnnnnnnnnnnnnnnnnnnnnnnnnnnnnnnnnnnnnnnnnnnnnnnnnnnnnnnnnnnnnnnnnnnnnnnnnnnnnnnnnnnnnnnnnnnnnnnnnnnnnnnnnnnnnnnnnnnnnnnnnnnnnnnnnnnnnnnnnnnnnnnnnnnnnnnnnnnnnnnnnnnnnnnnnnnnnnnnnnnnnnnnnnnnnnnnnnnnnnnnnnnnnnnnnnnnnnnnnnnnnnnnnnnnnnnnnnnnnnnnnnnnnnnnnnnnnnnnnnnnnnnnnnnnnnnnnnnnnnnnnnnnnnnnnnnnnnnnnnnnnnnnnnnnnnnnnnnnnnnnnnnnnnnnnnnnnnnnnnnnnnnnnnnnnnnnnnnnnnnnnnnnnnnnnnnnnnnnnnnnnnnnnnnnnnnnnnnnnnnnnnnnnnnnnnnnnnnnnnnnnnnnnnnnnnnnnnnnnnnnnnnnnnnnnnnnnnnnnnnnnnnnnnnnnnnnnnnnnnnnnnnnnnnnnnnnnnnnnnnnnnnnnnnnnnnnnnnnnnnnnnnnnnnnnnnnnnnnnnnnnnnnnnnnnnnnnnnnnnnnnnnnnnnnnnnnnnnnnnnnnnnnnnnnnnnnnnnnnnnnnnnnnnnnnnnnnnnnnnnnnnnnnnnnnnnnnnnnnnnnnnnnnnnnnnnnnnnnnnnnnnnnnnnnnnnnnnnnnnnnnnnnnnnnnnnnnnnnnnnnnnnnnnnnnnnnnnnnnnnnnnnnnnnnnnnnnnnnnnnnnnnnnnnnnnnnnnnnnnnnnnnnnnnnnnnnnnnnnnnnnnnnnnnnnnnnnnnnnnnnnnnnnnnnnnnnnnnnnnnnnnnnnnnnnnnnnnnnnnnnnnnnnnnnnnnnnnnnnnnnnnnnnnnnnnnnnnnnnnnnnnnnnnnnnnnnnnnnnnnnnnnnnnnnnnnnnnnnnnnnnnnnnnnnnnnnnnnnnnnnnnnnnnnnnnnnnnnnnnnnnnnnnnnnnnnnnnnnnnnnnnnnnnnnnnnnnnnnnnnnnnnnnnnnnnnnnnnnnnnnnnnnnnnnnnnnnnnnnnnnnnnnnnnnnnnnnnnnnnnnnnnnnnnnnnnnnnnnnnnnnnnnnnnnnnnnnnnnnnnnnnnnnnnnnnnnnnnnnnnnnnnnnnnnnnnnnnnnnnnnnnnnnnnnnnnnnnnnnnnnnnnnnnnnnnnnnnnnnnnnnnnnnnnnnnnnnnnnnnnnnnnnnnnnnnnnnnnnnnnnnnnnnnnnnnnnnnnnnnnnnnnnnnnnnnnnnnnnnnnnnnnnnnnnnnnnnnnnnnnnnnnnnnnnnnnnnnnnnnnnnnnnnnnnnnnnnnnnnnnnnnnnnnnnnnnnnnnnnnnnnnnnnnnnnnnnnnnnnnnnnnnnnnnnnnnnnnnnnnnnnnnnnnnnnnnnnnnnnnnnnnnnnnnnnnnnnnnnnnnnnnnnnnnnnnnnnnnnnnnnnnnnnnnnnnnnnnnnnnnnnnnnnnnnnnnnnnnnnnnnnnnnnnnnnnnnnnnnnnnnnnnnnnnnnnnnnnnnnnnnnnnnnnnnnnnnnnnnnnnnnnnnnnnnnnnnnnnnnnnnnnnnnnnnnnnnnnnnnnnnnnnnnnnnnnnnnnnnnnnnnnnnnnnnnnnnnnnnnnnnnnnnnnnnnnnnnnnnnnnnnnnnnnnnnnnnnnnnnnnnnnnnnnnnnnnnnnnnnnnnnnnnnnnnnnnnnnnnnnnnnnnnnnnnnnnnnnnnnnnnnnnnnnnnnnnnnnnnnnnnnnnnnnnnnnnnnnnnnnnnnnnnnnnnnnnnnnnnnnnnnnnnnnnnnnnnnnnnnnnnnnnnnnnnnnnnnnnnnnnnnnnnnnnnnnnnnnnnnnnnnnnnnnnnnnnnnnnnnnnnnnnnnnnnnnnnnnnnnnnnnnnnnnnnnnnnnnnnnnnnnnnnnnnnnnnnnnnnnnnnnnnnnnnnnnnnnnnnnnnnnnnnnnnnnnnnnnnnnnnnnnnnnnnnnnnnnnnnnnnnnnnnnnnnnnnnnnnnnnnnnnnnnnnnnnnnnnnnnnnnnnnnnnnnnnnnnnnnnnnnnnnnnnnnnnnnnnnnnnnnnnnnnnnnnnnnnnnnnnnnnnnnnnnnnnnnnnnnnnnnnnnnnnnnnnnnnnnnnnnnnnnnnnnnnnnnnnnnnnnnnnnnnnnnnnnnnnnnnnnnnnnnnnnnnnnnnnnnnnnnnnnnnnnnnnnnnnnnnnnnnnnnnnnnnnnnnnnnnnnnnnnnnnnnnnnnnnnnnnnnnnnnnnnnnnnnnnnnnnnnnnnnnnnnnnnnnnnnnnnnnnnnnnnnnnnnnnnnnnnnnnnnnnnnnnnnnnnnnnnnnnnnnnnnnnnnnnnnnnnnnnnnnnnnnnnnnnnnnnnnnnnnnnnnnnnnnnnnnnnnnnnnnnnnnnnnnnnnnnnnnnnnnnnnnnnnnnnnnnnnnnnnnnnnnnnnnnnnnnnnnnnnnnnnnnnnnnnnnnnnnnnnnnnnnnnnnnnnnnnnnnnnnnnnnnnnnnnnnnnnnnnnnnnnnnnnnnnnnnnnnnnnnnnnnnnnnnnnnnnnnnnnnnnnnnnnnnnnnnnnnnnnnnnnnnnnnnnnnnnnnnnnnnnnnnnnnnnnnnnnnnnnnnnnnnnnnnnnnnnnnnnnnnnnnnnnnnnnnnnnnnnnnnnnnnnnnnnnnnnnnnnnnnnnnnnnnnnnnnnnnnnnnnnnnnnnnnnnnnnnnnnnnnnnnnnnnnnnnnnnnnnnnnnnnnnnnnnnnnnnnnnnnnnnnnnnnnnnnnnnnnnnnnnnnnnnnnnnnnnnnnnnnnnnnnnnnnnnnnnnnnnnnnnnnnnnnnnnnnnnnnnnnnnnnnnnnnnnnnnnnnnnnnnnnnnnnnnnnnnnnnnnnnnnnnnnnnnnnnnnnnnnnnnnnnnnnnnnnnnnnnnnnnnnnnnnnnnnnnnnnnnnnnnnnnnnnnnnnnnnnnnnnnnnnnnnnnnnnnnnnnnnnnnnnnnnnnnnnnnnnnnnnnnnnnnnnnnnnnnnnnnnnnnnnnnnnnnnnnnnnnnnnnnnnnnnnnnnnnnnnnnnnnnnnnnnnnnnnnnnnnnnnnnnnnnnnnnnnnnnnnnnnnnnnnnnnnnnnnnnnnnnnnnnnnnnnnnnnnnnnnnnnnnnnnnnnnnnnnnnnnnnnnnnnnnnnnnnnnnnnnnnnnnnnnnnnnnnnnnnnnnnnnnnnnnnnnnnnnnnnnnnnnnnnnnnnnnnnnnnnnnnnnnnnnnnnnnnnnnnnnnnnnnnnnnnnnnnnnnnnnnnnnnnnnnnnnnnnnnnnnnnnnnnnnnnnnnnnnnnnnnnnnnnnnnnnnnnnnnnnnnnnnnnnnnnnnnnnnnnnnnnnnnnnnnnnnnnnnnnnnnnnnnnnnnnnnnnnnnnnnnnnnnnnnnnnnnnnnnnnnnnnnnnnnnnnnnnnnnnnnnnnnnnnnnnnnnnnnnnnnnnnnnnnnnnnnnnnnnnnnnnnnnnnnnnnnnnnnnnnnnnnnnnnnnnnnnnnnnnnnnnnnnnnnnnnnnnnnnnnnnnnnnnnnnnnnnnnnnnnnnnnnnnnnnnnnnnnnnnnnnnnnnnnnnnnnnnnnnnnnnnnnnnnnnnnnnnnnnnnnnnnnnnnnnnnnnnnnnnnnnnnnnnnnnnnnnnnnnnnnnnnnnnnnnnnnnnnnnnnnnnnnnnnnnnnnnnnnnnnnnnnnnnnnnnnnnnnnnnnnnnnnnnnnnnnnnnnnnnnnnnnnnnnnnnnnnnnnnnnnnnnnnnnnnnnnnnnnnnnnnnnnnnnnnnnnnnnnnnnnnnnnnnnnnnnnnnnnnnnnnnnnnnnnnnnnnnnnnnnnnnnnnnnnnnnnnnnnnnnnnnnnnnnnnnnnnnnnnnnnnnnnnnnnnnnnnnnnnnnnnnnnnnnnnnnnnnnnnnnnnnnnnnnnnnnnnnnnnnnnnnnnnnnnnnnnnnnnnnnnnnnnnnnnnnnnnnnnnnnnnnnnnnnnnnnnnnnnnnnnnnnnnnnnnnnnnnnnnnnnnnnnnnnnnnnnnnnnnnnnnnnnnnnnnnnnnnnnnnnnnnnnnnnnnnnnnnnnnnnnnnnnnnnnnnnnnnnnnnnnnnnnnnnnnnnnnnnnnnnnnnnnnnnnnnnnnnnnnnnnnnnnnnnnnnnnnnnnnnnnnnnnnnnnnnnnnnnnnnnnnnnnnnnnnnnnnnnnnnnnnnnnnnnnnnnnnnnnnnnnnnnnnnnnnnnnnnnnnnnnnnnnnnnnnnnnnnnnnnnnnnnnnnnnnnnnnnnnnnnnnnnnnnnnnnnnnnnnnnnnnnnnnnnnnnnnnnnnnnnnnnnnnnnnnnnnnnnnnnnnnnnnnnnnnnnnnnnnnnnnnnnnnnnnnnnnnnnnnnnnnnnnnnnnnnnnnnnnnnnnnnnnnnnnnnnnnnnnnnnnnnnnnnnnnnnnnnnnnnnnnnnnnnnnnnnnnnnnnnnnnnnnnnnnnnnnnnnnnnnnnnnnnnnnnnnnnnnnnnnnnnnnnnnnnnnnnnnnnnnnnnnnnnnnnnnnnnnnnnnnnnnnnnnnnnnnnnnnnnnnnnnnnnnnnnnnnnnnnnnnnnnnnnnnnnnnnnnnnnnnnnnnnnnnnnnnnnnnnnnnnnnnnnnnnnnnnnnnnnnnnnnnnnnnnnnnnnnnnnnnnnnnnnnnnnnnnnnnnnnnnnnnnnnnnnnnnnnnnnnnnnnnnnnnnnnnnnnnnnnnnnnnnnnnnnnnnnnnnnnnnnnnnnnnnnnnnnnnnnnnnnnnnnnnnnnnnnnnnnnnnnnnnnnnnnnnnnnnnnnnnnnnnnnnnnnnnnnnnnnnnnnnnnnnnnnnnnnnnnnnnnnnnnnnnnnnnnnnnnnnnnnnnnnnnnnnnnnnnnnnnnnnnnnnnnnnnnnnnnnnnnnnnnnnnnnnnnnnnnnnnnnnnnnnnnnnnnnnnnnnnnnnnnnnnnnnnnnnnnnnnnnnnnnnnnnnnnnnnnnnnnnnnnnnnnnnnnnnnnnnnnnnnnnnnnnnnnnnnnnnnnnnnnnnnnnnnnnnnnnnnnnnnnnnnnnnnnnnnnnnnnnnnnnnnnnnnnnnnnnnnnnnnnnnnnnnnnnnnnnnnnnnnnnnnnnnnnnnnnnnnnnnnnnnnnnnnnnnnnnnnnnnnnnnnnnnnnnnnnnnnnnnnnnnnnnnnnnnnnnnnnnnnnnnnnnnnnnnnnnnnnnnnnnnnnnnnnnnnnnnnnnnnnnnnnnnnnnnnnnnnnnnnnnnnnnnnnnnnnnnnnnnnnnnnnnnnnnnnnnnnnnnnnnnnnnnnnnnnnnnnnnnnnnnnnnnnnnnnnnnnnnnnnnnnnnnnnnnnnnnnnnnnnnnnnnnnnnnnnnnnnnnnnnnnnnnnnnnnnnnnnnnnnnnnnnnnnnnnnnnnnnnnnnnnnnnnnnnnnnnnnnnnnnnnnnnnnnnnnnnnnnnnnnnnnnnnnnnnnnnnnnnnnnnnnnnnnnnnnnnnnnnnnnnnnnnnnnnnnnnnnnnnnnnnnnnnnnnnnnnnnnnnnnnnnnnnnnnnnnnnnnnnnnnnnnnnnnnnnnnnnnnnnnnnnnnnnnnnnnnnnnnnnnnnnnnnnnnnnnnnnnnnnnnnnnnnnnnnnnnnnnnnnnnnnnnnnnnnnnnnnnnnnnnnnnnnnnnnnnnnnnnnnnnnnnnnnnnnnnnnnnnnnnnnnnnnnnnnnnnnnnnnnnnnnnnnnnnnnnnnnnnnnnnnnnnnnnnnnnnnnnnnnnnnnnnnnnnnnnnnnnnnnnnnnnnnnnnnnnnnnnnnnnnnnnnnnnnnnnnnnnnnnnnnnnnnnnnnnnnnnnnnnnnnnnnnnnnnnnnnnnnnnnnnnnnnnnnnnnnnnnnnnnnnnnnnnnnnnnnnnnnnnnnnnnnnnnnnnnnnnnnnnnnnnnnnnnnnnnnnnnnnnnnnnnnnnnnnnnnnnnnnnnnnnnnnnnnnnnnnnnnnnnnnnnnnnnnnnnnnnnnnnnnnnnnnnnnnnnnnnnnnnnnnnnnnnnnnnnnnnnnnnnnnnnnnnnnnnnnnnnnnnnnnnnnnnnnnnnnnnnnnnnnnnnnnnnnnnnnnnnnnnnnnnnnnnnnnnnnnnnnnnnnnnnnnnnnnnnnnnnnnnnnnnnnnnnnnnnnnnnnnnnnnnnnnnnnnnnnnnnnnnnnnnnnnnnnnnnnnnnnnnnnnnnnnnnnnnnnnnnnnnnnnnnnnnnnnnnnnnnnnnnnnnnnnnnnnnnnnnnnnnnnnnnnnnnnnnnnnnnnnnnnnnnnnnnnnnnnnnnnnnnnnnnnnnnnnnnnnnnnnnnnnnnnnnnnnnnnnnnnnnnnnnnnnnnnnnnnnnnnnnnnnnnnnnnnnnnnnnnnnnnnnnnnnnnnnnnnnnnnnnnnnnnnnnnnnnnnnnnnnnnnnnnnnnnnnnnnnnnnnnnnnnnnnnnnnnnnnnnnnnnnnnnnnnnnnnnnnnnnnnnnnnnnnnnnnnnnnnnnnnnnnnnnnnnnnnnnnnnnnnnnnnnnnnnnnnnnnnnnnnnnnnnnnnnnnnnnnnnnnnnnnnnnnnnnnnnnnnnnnnnnnnnnnnnnnnnnnnnnnnnnnnnnnnnnnnnnnnnnnnnnnnnnnnnnnnnnnnnnnnnnnnnnnnnnnnnnnnnnnnnnnnnnnnnnnnnnnnnnnnnnnnnnnnnnnnnnnnnnnnnnnnnnnnnnnnnnnnnnnnnnnnnnnnnnnnnnnnnnnnnnnnnnnnnnnnnnnnnnnnnnnnnnnnnnnnnnnnnnnnnnnnnnnnnnnnnnnnnnnnnnnnnnnnnnnnnnnnnnnnnnnnnnnnnnnnnnnnnnnnnnnnnnnnnnnnnnnnnnnnnnnnnnnnnnnnnnnnnnnnnnnnnnnnnnnnnnnnnnnnnnnnnnnnnnnnnnnnnnnnnnnnnnnnnnnnnnnnnnnnnnnnnnnnnnnnnnnnnnnnnnnnnnnnnnnnnnnnnnnnnnnnnnnnnnnnnnnnnnnnnnnnnnnnnnnnnnnnnnnnnnnnnnnnnnnnnnnnnnnnnnnnnnnnnnnnnnnnnnnnnnnnnnnnnnnnnnnnnnnnnnnnnnnnnnnnnnnnnnnnnnnnnnnnnnnnnnnnnnnnnnnnnnnnnnnnnnnnnnnnnnnnnnnnnnnnnnnnnnnnnnnnnnnnnnnnnnnnnnnnnnnnnnnnnnnnnnnnnnnnnnnnnnnnnnnnnnnnnnnnnnnnnnnnnnnnnnnnnnnnnnnnnnnnnnnnnnnnnnnnnnnnnnnnnnnnnnnnnnnnnnnnnnnnnnnnnnnnnnnnnnnnnnnnnnnnnnnnnnnnnnnnnnnnnnnnnnnnnnnnnnnnnnnnnnnnnnnnnnnnnnnnnnnnnnnnnnnnnnnnnnnnnnnnnnnnnnnnnnnnnnnnnnnnnnnnnnnnnnnnnnnnnnnnnnnnnnnnnnnnnnnnnnnnnnnnnnnnnnnnnnnnnnnnnnnnnnnnnnnnnnnnnnnnnnnnnnnnnnnnnnnnnnnnnnnnnnnnnnnnnnnnnnnnnnnnnnnnnnnnnnnnnnnnnnnnnnnnnnnnnnnnnnnnnnnnnnnnnnnnnnnnnnnnnnnnnnnnnnnnnnnnnnnnnnnnnnnnnnnnnnnnnnnnnnnnnnnnnnnnnnnnnnnnnnnnnnnnnnnnnnnnnnnnnnnnnnnnnnnnnnnnnnnnnnnnnnnnnnnnnnnnnnnnnnnnnnnnnnnnnnnnnnnnnnnnnnnnnnnnnnnnnnnnnnnnnnnnnnnnnnnnnnnnnnnnnnnnnnnnnnnnnnnnnnnnnnnnnnnnnnnnnnnnnnnnnnnnnnnnnnnnnnnnnnnnnnnnnnnnnnnnnnnnnnnnnnnnnnnnnnnnnnnnnnnnnnnnnnnnnnnnnnnnnnnnnnnnnnnnnnnnnnnnnnnnnnnnnnnnnnnnnnnnnnnnnnnnnnnnnnnnnnnnnnnnnnnnnnnnnnnnnnnnnnnnnnnnnnnnnnnnnnnnnnnnnnnnnnnnnnnnnnnnnnnnnnnnnnnnnnnnnnnnnnnnnnnnnnnnnnnnnnnnnnnnnnnnnnnnnnnnnnnnnnnnnnnnnnnnnnnnnnnnnnnnnnnnnnnnnnnnnnnnnnnnnnnnnnnnnnnnnnnnnnnnnnnnnnnnnnnnnnnnnnnnnnnnnnnnnnnnnnnnnnnnnnnnnnnnnnnnnnnnnnnnnnnnnnnnnnnnnnnnnnnnnnnnnnnnnnnnnnnnnnnnnnnnnnnnnnnnnnnnnnnnnnnnnnnnnnnnnnnnnnnnnnnnnnnnnnnnnnnnnnnnnnnnnnnnnnnnnnnnnnnnnnnnnnnnnnnnnnnnnnnnnnnnnnnnnnnnnnnnnnnnnnnnnnnnnnnnnnnnnnnnnnnnnnnnnnnnnnnnnnnnnnnnnnnnnnnnnnnnnnnnnnnnnnnnnnnnnnnnnnnnnnnnnnnnnnnnnnnnnnnnnnnnnnnnnnnnnnnnnnnnnnnnnnnnnnnnnnnnnnnnnnnnnnnnnnnnnnnnnnnnnnnnnnnnnnnnnnnnnnnnnnnnnnnnnnnnnnnnnnnnnnnnnnnnnnnnnnnnnnnnnnnnnnnnnnnnnnnnnnnnnnnnnnnnnnnnnnnnnnnnnnnnnnnnnnnnnnnnnnnnnnnnnnnnnnnnnnnnnnnnnnnnnnnnnnnnnnnnnnnnnnnnnnnnnnnnnnnnnnnnnnnnnnnnnnnnnnnnnnnnnnnnnnnnnnnnnnnnnnnnnnnnnnnnnnnnnnnnnnnnnnnnnnnnnnnnnnnnnnnnnnnnnnnnnnnnnnnnnnnnnnnnnnnnnnnnnnnnnnnnnnnnnnnnnnnnnnnnnnnnnnnnnnnnnnnnnnnnnnnnnnnnnnnnnnnnnnnnnnnnnnnnnnnnnnnnnnnnnnnnnnnnnnnnnnnnnnnnnnnnnnnnnnnnnnnnnnnnnnnnnnnnnnnnnnnnnnnnnnnnnnnnnnnnnnnnnnnnnnnnnnnnnnnnnnnnnnnnnnnnnnnnnnnnnnnnnnnnnnnnnnnnnnnnnnnnnnnnnnnnnnnnnnnnnnnnnnnnnnnnnnnnnnnnnnnnnnnnnnnnnnnnnnnnnnnnnnnnnnnnnnnnnnnnnnnnnnnnnnnnnnnnnnnnnnnnnnnnnnnnnnnnnnnnnnnnnnnnnnnnnnnnnnnnnnnnnnnnnnnnnnnnnnnnnnnnnnnnnnnnnnnnnnnnnnnnnnnnnnnnnnnnnnnnnnnnnnnnnnnnnnnnnnnnnnnnnnnnnnnnnnnnnnnnnnnnnnnnnnnnnnnnnnnnnnnnnnnnnnnnnnnnnnnnnnnnnnnnnnnnnnnnnnnnnnnnnnnnnnnnnnnnnnnnnnnnnnnnnnnnnnnnnnnnnnnnnnnnnnnnnnnnnnnnnnnnnnnnnnnnnnnnnnnnnnnnnnnnnnnnnnnnnnnnnnnnnnnnnnnnnnnnnnnnnnnnnnnnnnnnnnnnnnnnnnnnnnnnnnnnnnnnnnnnnnnnnnnnnnnnnnnnnnnnnnnnnnnnnnnnnnnnnnnnnnnnnnnnnnnnnnnnnnnnnnnnnnnnnnnnnnnnnnnnnnnnnnnnnnnnnnnnnnnnnnnnnnnnnnnnnnnnnnnnnnnnnnnnnnnnnnnnnnnnnnnnnnnnnnnnnnnnnnnnnnnnnnnnnnnnnnnnnnnnnnnnnnnnnnnnnnnnnnnnnnnnnnnnnnnnnnnnnnnnnnnnnnnnnnnnnnnnnnnnnnnnnnnnnnnnnnnnnnnnnnnnnnnnnnnnnnnnnnnnnnnnnnnnnnnnnnnnnnnnnnnnnnnnnnnnnnnnnnnnnnnnnnnnnnnnnnnnnnnnnnnnnnnnnnnnnnnnnnnnnnnnnnnnnnnnnnnnnnnnnnnnnnnnnnnnnnnnnnnnnnnnnnnnnnnnnnnnnnnnnnnnnnnnnnnnnnnnnnnnnnnnnnnnnnnnnnnnnnnnnnnnnnnnnnnnnnnnnnnnnnnnnnnnnnnnnnnnnnnnnnnnnnnnnnnnnnnnnnnnnnnnnnnnnnnnnnnnnnnnnnnnnnnnnnnnnnnnnnnnnnnnnnnnnnnnnnnnnnnnnnnnnnnnnnnnnnnnnnnnnnnnnnnnnnnnnnnnnnnnnnnnnnnnnnnnnnnnnnnnnnnnnnnnnnnnnnnnnnnnnnnnnnnnnnnnnnnnnnnnnnnnnnnnnnnnnnnnnnnnnnnnnnnnnnnnnnnnnnnnnnnnnnnnnnnnnnnnnnnnnnnnnnnnnnnnnnnnnnnnnnnnnnnnnnnnnnnnnnnnnnnnnnnnnnnnnnnnnnnnnnnnnnnnnnnnnnnnnnnnnnnnnnnnnnnnnnnnnnnnnnnnnnnnnnnnnnnnnnnnnnnnnnnnnnnnnnnnnnnnnnnnnnnnnnnnnnnnnnnnnnnnnnnnnnnnnnnnnnnnnnnnnnnnnnnnnnnnnnnnnnnnnnnnnnnnnnnnnnnnnnnnnnnnnnnnnnnnnnnnnnnnnnnnnnnnnnnnnnnnnnnnnnnnnnnnnnnnnnnnnnnnnnnnnnnnnnnnnnnnnnnnnnnnnnnnnnnnnnnnnnnnnnnnnnnnnnnnnnnnnnnnnnnnnnnnnnnnnnnnnnnnnnnnnnnnnnnnnnnnnnnnnnnnnnnnnnnnnnnnnnnnnnnnnnnnnnnnnnnnnnnnnnnnnnnnnnnnnnnnnnnnnnnnnnnnnnnnnnnnnnnnnnnnnnnnnnnnnnnnnnnnnnnnnnnnnnnnnnnnnnnnnnnnnnnnnnnnnnnnnnnnnnnnnnnnnnnnnnnnnnnnnnnnnnnnnnnnnnnnnnnnnnnnnnnnnnnnnnnnnnnnnnnnnnnnnnnnnnnnnnnnnnnnnnnnnnnnnnnnnnnnnnnnnnnnnnnnnnnnnnnnnnnnnnnnnnnnnnnnnnnnnnnnnnnnnnnnnnnnnnnnnnnnnnnnnnnnnnnnnnnnnnnnnnnnnnnnnnnnnnnnnnnnnnnnnnnnnnnnnnnnnnnnnnnnnnnnnnnnnnnnnnnnnnnnnnnnnnnnnnnnnnnnnnnnnnnnnnnnnnnnnnnnnnnnnnnnnnnnnnnnnnnnnnnnnnnnnnnnnnnnnnnnnnnnnnnnnnnnnnnnnnnnnnnnnnnnnnnnnnnnnnnnnnnnnnnnnnnnnnnnnnnnnnnnnnnnnnnnnnnnnnnnnnnnnnnnnnnnnnnnnnnnnnnnnnnnnnnnnnnnnnnnnnnnnnnnnnnnnnnnnnnnnnnnnnnnnnnnnnnnnnnnnnnnnnnnnnnnnnnnnnnnnnnnnnnnnnnnnnnnnnnnnnnnnnnnnnnnnnnnnnnnnnnnnnnnnnnnnnnnnnnnnnnnnnnnnnnnnnnnnnnnnnnnnnnnnnnnnnnnnnnnnnnnnnnnnnnnnnnnnnnnnnnnnnnnnnnnnnnnnnnnnnnnnnnnnnnnnnnnnnnnnnnnnnnnnnnnnnnnnnnnnnnnnnnnnnnnnnnnnnnnnnnnnnnnnnnnnnnnnnnnnnnnnnnnnnnnnnnnnnnnnnnnnnnnnnnnnnnnnnnnnnnnnnnnnnnnnnnnnnnnnnnnnnnnnnnnnnnnnnnnnnnnnnnnnnnnnnnnnnnnnnnnnnnnnnnnnnnnnnnnnnnnnnnnnnnnnnnnnnnnnnnnnnnnnnnnnnnnnnnnnnnnnnnnnnnnnnnnnnnnnnnnnnnnnnnnnnnnnnnnnnnnnnnnnnnnnnnnnnnnnnnnnnnnnnnnnnnnnnnnnnnnnnnnnnnnnnnnnnnnnnnnnnnnnnnnnnnnnnnnnnnnnnnnnnnnnnnnnnnnnnnnnnnnnnnnnnnnnnnnnnnnnnnnnnnnnnnnnnnnnnnnnnnnnnnnnnnnnnnnnnnnnnnnnnnnnnnnnnnnnnnnnnnnnnnnnnnnnnnnnnnnnnnnnnnnnnnnnnnnnnnnnnnnnnnnnnnnnnnnnnnnnnnnnnnnnnnnnnnnnnnnnnnnnnnnnnnnnnnnnnnnnnnnnnnnnnnnnnnnnnnnnnnnnnnnnnnnnnnnnnnnnnnnnnnnnnnnnnnnnnnnnnnnnnnnnnnnnnnnnnnnnnnnnnnnnnnnnnnnnnnnnnnnnnnnnnnnnnnnnnnnnnnnnnnnnnnnnnnnnnnnnnnnnnnnnnnnnnnnnnnnnnnnnnnnnnnnnnnnnnnnnnnnnnnnnnnnnnnnnnnnnnnnnnnnnnnnnnnnnnnnnnnnnnnnnnnnnnnnnnnnnnnnnnnnnnnnnnnnnnnnnnnnnnnnnnnnnnnnnnnnnnnnnnnnnnnnnnnnnnnnnnnnnnnnnnnnnnnnnnnnnnnnnnnnnnnnnnnnnnnnnnnnnnnnnnnnnnnnnnnnnnnnnnnnnnnnnnnnnnnnnnnnnnnnnnnnnnnnnnnnnnnnnnnnnnnnnnnnnnnnnnnnnnnnnnnnnnnnnnnnnnnnnnnnnnnnnnnnnnnnnnnnnnnnnnnnnnnnnnnnnnnnnnnnnnnnnnnnnnnnnnnnnnnnnnnnnnnnnnnnnnnnnnnnnnnnnnnnnnnnnnnnnnnnnnnnnnnnnnnnnnnnnnnnnnnnnnnnnnnnnnnnnnnnnnnnnnnnnnnnnnnnnnnnnnnnnnnnnnnnnnnnnnnnnnnnnnnnnnnnnnnnnnnnnnnnnnnnnnnnnnnnnnnnnnnnnnnnnnnnnnnnnnnnnnnnnnnnnnnnnnnnnnnnnnnnnnnnnnnnnnnnnnnnnnnnnnnnnnnnnnnnnnnnnnnnnnnnnnnnnnnnnnnnnnnnnnnnnnnnnnnnnnnnnnnnnnnnnnnnnnnnnnnnnnnnnnnnnnnnnnnnnnnnnnnnnnnnnnnnnnnnnnnnnnnnnnnnnnnnnnnnnnnnnnnnnnnnnnnnnnnnnnnnnnnnnnnnnnnnnnnnnnnnnnnnnnnnnnnnnnnnnnnnnnnnnnnnnnnnnnnnnnnnnnnnnnnnnnnnnnnnnnnnnnnnnnnnnnnnnnnnnnnnnnnnnnnnnnnnnnnnnnnnnnnnnnnnnnnnnnnnnnnnnnnnnnnnnnnnnnnnnnnnnnnnnnnnnnnnnnnnnnnnnnnnnnnnnnnnnnnnnnnnnnnnnnnnnnnnnnnnnnnnnnnnnnnnnnnnnnnnnnnnnnnnnnnnnnnnnnnnnnnnnnnnnnnnnnnnnnnnnnnnnnnnnnnnnnnnnnnnnnnnnnnnnnnnnnnnnnnnnnnnnnnnnnnnnnnnnnnnnnnnnnnnnnnnnnnnnnnnnnnnnnnnnnnnnnnnnnnnnnnnnnnnnnnnnnnnnnnnnnnnnnnnnnnnnnnnnnnnnnnnnnnnnnnnnnnnnnnnnnnnnnnnnnnnnnnnnnnnnnnnnnnnnnnnnnnnnnnnnnnnnnnnnnnnnnnnnnnnnnnnnnnnnnnnnnnnnnnnnnnnnnnnnnnnnnnnnnnnnnnnnnnnnnnnnnnnnnnnnnnnnnnnnnnnnnnnnnnnnnnnnnnnnnnnnnnnnnnnnnnnnnnnnnnnnnnnnnnnnnnnnnnnnnnnnnnnnnnnnnnnnnnnnnnnnnnnnnnnnnnnnnnnnnnnnnnnnnnnnnnnnnnnnnnnnnnnnnnnnnnnnnnnnnnnnnnnnnnnnnnnnnnnnnnnnnnnnnnnnnnnnnnnnnnnnnnnnnnnnnnnnnnnnnnnnnnnnnnnnnnnnnnnnnnnnnnnnnnnnnnnnnnnnnnnnnnnnnnnnnnnnnnnnnnnnnnnnnnnnnnnnnnnnnnnnnnnnnnnnnnnnnnnnnnnnnnnnnnnnnnnnnnnnnnnnnnnnnnnnnnnnnnnnnnnnnnnnnnnnnnnnnnnnnnnnnnnnnnnnnnnnnnnnnnnnnnnnnnnnnnnnnnnnnnnnnnnnnnnnnnnnnnnnnnnnnnnnnnnnnnnnnnnnnnnnnnnnnnnnnnnnnnnnnnnnnnnnnnnnnnnnnnnnnnnnnnnnnnnnnnnnnnnnnnnnnnnnnnnnnnnnnnnnnnnnnnnnnnnnnnnnnnnnnnnnnnnnnnnnnnnnnnnnnnnnnnnnnnnnnnnnnnnnnnnnnnnnnnnnnnnnnnnnnnnnnnnnnnnnnnnnnnnnnnnnnnnnnnnnnnnnnnnnnnnnnnnnnnnnnnnnnnnnnnnnnnnnnnnnnnnnnnnnnnnnnnnnnnnnnnnnnnnnnnnnnnnnnnnnnnnnnnnnnnnnnnnnnnnnnnnnnnnnnnnnnnnnnnnnnnnnnnnnnnnnnnnnnnnnnnnnnnnnnnnnnnnnnnnnnnnnnnnnnnnnnnnnnnnnnnnnnnnnnnnnnnnnnnnnnnnnnnnnnnnnnnnnnnnnnnnnnnnnnnnnnnnnnnnnnnnnnnnnnnnnnnnnnnnnnnnnnnnnnnnnnnnnnnnnnnnnnnnnnnnnnnnnnnnnnnnnnnnnnnnnnnnnnnnnnnnnnnnnnnnnnnnnnnnnnnnnnnnnnnnnnnnnnnnnnnnnnnnnnnnnnnnnnnnnnnnnnnnnnnnnnnnnnnnnnnnnnnnnnnnnnnnnnnnnnnnnnnnnnnnnnnnnnnnnnnnnnnnnnnnnnnnnnnnnnnnnnnnnnnnnnnnnnnnnnnnnnnnnnnnnnnnnnnnnnnnnnnnnnnnnnnnnnnnnnnnnnnnnnnnnnnnnnnnnnnnnnnnnnnnnnnnnnnnnnnnnnnnnnnnnnnnnnnnnnnnnnnnnnnnnnnnnnnnnnnnnnnnnnnnnnnnnnnnnnnnnnnnnnnnnnnnnnnnnnnnnnnnnnnnnnnnnnnnnnnnnnnnnnnnnnnnnnnnnnnnnnnnnnnnnnnnnnnnnnnnnnnnnnnnnnnnnnnnnnnnnnnnnnnnnnnnnnnnnnnnnnnnnnnnnnnnnnnnnnnnnnnnnnnnnnnnnnnnnnnnnnnnnnnnnnnnnnnnnnnnnnnnnnnnnnnnnnnnnnnnnnnnnnnnnnnnnnnnnnnnnnnnnnnnnnnnnnnnnnnnnnnnnnnnnnnnnnnnnnnnnnnnnnnnnnnnnnnnnnnnnnnnnnnnnnnnnnnnnnnnnnnnnnnnnnnnnnnnnnnnnnnnnnnnnnnnnnnnnnnnnnnnnnnnnnnnnnnnnnnnnnnnnnnnnnnnnnnnnnnnnnnnnnnnnnnnnnnnnnnnnnnnnnnnnnnnnnnnnnnnnnnnnnnnnnnnnnnnnnnnnnnnnnnnnnnnnnnnnnnnnnnnnnnnnnnnnnnnnnnnnnnnnnnnnnnnnnnnnnnnnnnnnnnnnnnnnnnnnnnnnnnnnnnnnnnnnnnnnnnnnnnnnnnnnnnnnnnnnnnnnnnnnnnnnnnnnnnnnnnnnnnnnnnnnnnnnnnnnnnnnnnnnnnnnnnnnnnnnnnnnnnnnnnnnnnnnnnnnnnnnnnnnnnnnnnnnnnnnnnnnnnnnnnnnnnnnnnnnnnnnnnnnnnnnnnnnnnnnnnnnnnnnnnnnnnnnnnnnnnnnnnnnnnnnnnnnnnnnnnnnnnnnnnnnnnnnnnnnnnnnnnnnnnnnnnnnnnnnnnnnnnnnnnnnnnnnnnnnnnnnnnnnnnnnnnnnnnnnnnnnnnnnnnnnnnnnnnnnnnnnnnnnnnnnnnnnnnnnnnnnnnnnnnnnnnnnnnnnnnnnnnnnnnnnnnnnnnnnnnnnnnnnnnnnnnnnnnnnnnnnnnnnnnnnnnnnnnnnnnnnnnnnnnnnnnnnnnnnnnnnnnnnnnnnnnnnnnnnnnnnnnnnnnnnnnnnnnnnnnnnnnnnnnnnnnnnnnnnnnnnnnnnnnnnnnnnnnnnnnnnnnnnnnnnnnnnnnnnnnnnnnnnnnnnnnnnnnnnnnnnnnnnnnnnnnnnnnnnnnnnnnnnnnnnnnnnnnnnnnnnnnnnnnnnnnnnnnnnnnnnnnnnnnnnnnnnnnnnnnnnnnnnnnnnnnnnnnnnnnnnnnnnnnnnnnnnnnnnnnnnnnnnnnnnnnnnnnnnnnnnnnnnnnnnnnnnnnnnnnnnnnnnnnnnnnnnnnnnnnnnnnnnnnnnnnnnnnnnnnnnnnnnnnnnnnnnnnnnnnnnnnnnnnnnnnnnnnnnnnnnnnnnnnnnnnnnnnnnnnnnnnnnnnnnnnnnnnnnnnnnnnnnnnnnnnnnnnnnnnnnnnnnnnnnnnnnnnnnnnnnnnnnnnnnnnnnnnnnnnnnnnnnnnnnnnnnnnnnnnnnnnnnnnnnnnnnnnnnnnnnnnnnnnnnnnnnnnnnnnnnnnnnnnnnnnnnnnnnnnnnnnnnnnnnnnnnnnnnnnnnnnnnnnnnnnnnnnnnnnnnnnnnnnnnnnnnnnnnnnnnnnnnnnnnnnnnnnnnnnnnnnnnnnnnnnnnnnnnnnnnnnnnnnnnnnnnnnnnnnnnnnnnnnnnnnnnnnnnnnnnnnnnnnnnnnnnnnnnnnnnnnnnnnnnnnnnnnnnnnnnnnnnnnnnnnnnnnnnnnnnnnnnnnnnnnnnnnnnnnnnnnnnnnnnnnnnnnnnnnnnnnnnnnnnnnnnnnnnnnnnnnnnnnnnnnnnnnnnnnnnnnnnnnnnnnnnnnnnnnnnnnnnnnnnnnnnnnnnnnnnnnnnnnnnnnnnnnnnnnnnnnnnnnnnnnnnnnnnnnnnnnnnnnnnnnnnnnnnnnnnnnnnnnnnnnnnnnnnnnnnnnnnnnnnnnnnnnnnnnnnnnnnnnnnnnnnnnnnnnnnnnnnnnnnnnnnnnnnnnnnnnnnnnnnnnnnnnnnnnnnnnnnnnnnnnnnnnnnnnnnnnnnnnnnnnnnnnnnnnnnnnnnnnnnnnnnnnnnnnnnnnnnnnnnnnnnnnnnnnnnnnnnnnnnnnnnnnnnnnnnnnnnnnnnnnnnnnnnnnnnnnnnnnnnnnnnnnnnnnnnnnnnnnnnnnnnnnnnnnnnnnnnnnnnnnnnnnnnnnnnnnnnnnnnnnnnnnnnnnnnnnnnnnnnnnnnnnnnnnnnnnnnnnnnnnnnnnnnnnnnnnnnnnnnnnnnnnnnnnnnnnnnnnnnnnnnnnnnnnnnnnnnnnnnnnnnnnnnnnnnnnnnnnnnnnnnnnnnnnnnnnnnnnnnnnnnnnnnnnnnnnnnnnnnnnnnnnnnnnnnnnnnnnnnnnnnnnnnnnnnnnnnnnnnnnnnnnnnnnnnnnnnnnnnnnnnnnnnnnnnnnnnnnnnnnnnnnnnnnnnnnnnnnnnnnnnnnnnnnnnnnnnnnnnnnnnnnnnnnnnnnnnnnnnnnnnnnnnnnnnnnnnnnnnnnnnnnnnnnnnnnnnnnnnnnnnnnnnnnnnnnnnnnnnnnnnnnnnnnnnnnnnnnnnnnnnnnnnnnnnnnnnnnnnnnnnnnnnnnnnnnnnnnnnnnnnnnnnnnnnnnnnnnnnnnnnnnnnnnnnnnnnnnnnnnnnnnnnnnnnnnnnnnnnnnnnnnnnnnnnnnnnnnnnnnnnnnnnnnnnnnnnnnnnnnnnnnnnnnnnnnnnnnnnnnnnnnnnnnnnnnnnnnnnnnnnnnnnnnnnnnnnnnnnnnnnnnnnnnnnnnnnnnnnnnnnnnnnnnnnnnnnnnnnnnnnnnnnnnnnnnnnnnnnnnnnnnnnnnnnnnnnnnnnnnnnnnnnnnnnnnnnnnnnnnnnnnnnnnnnnnnnnnnnnnnnnnnnnnnnnnnnnnnnnnnnnnnnnnnnnnnnnnnnnnnnnnnnnnnnnnnnnnnnnnnnnnnnnnnnnnnnnnnnnnnnnnnnnnnnnnnnnnnnnnnnnnnnnnnnnnnnnnnnnnnnnnnnnnnnnnnnnnnnnnnnnnnnnnnnnnnnnnnnnnnnnnnnnnnnnnnnnnnnnnnnnnnnnnnnnnnnnnnnnnnnnnnnnnnnnnnnnnnnnnnnnnnnnnnnnnnnnnnnnnnnnnnnnnnnnnnnnnnnnnnnnnnnnnnnnnnnnnnnnnnnnnnnnnnnnnnnnnnnnnnnnnnnnnnnnnnnnnnnnnnnnnnnnnnnnnnnnnnnnnnnnnnnnnnnnnnnnnnnnnnnnnnnnnnnnnnnnnnnnnnnnnnnnnnnnnnnnnnnnnnnnnnnnnnnnnnnnnnnnnnnnnnnnnnnnnnnnnnnnnnnnnnnnnnnnnnnnnnnnnnnnnnnnnnnnnnnnnnnnnnnnnnnnnnnnnnnnnnnnnnnnnnnnnnnnnnnnnnnnnnnnnnnnnnnnnnnnnnnnnnnnnnnnnnnnnnnnnnnnnnnnnnnnnnnnnnnnnnnnnnnnnnnnnnnnnnnnnnnnnnnnnnnnnnnnnnnnnnnnnnnnnnnnnnnnnnnnnnnnnnnnnnnnnnnnnnnnnnnnnnnnnnnnnnnnnnnnnnnnnnnnnnnnnnnnnnnnnnnnnnnnnnnnnnnnnnnnnnnnnnnnnnnnnnnnnnnnnnnnnnnnnnnnnnnnnnnnnnnnnnnnnnnnnnnnnnnnnnnnnnnnnnnnnnnnnnnnnnnnnnnnnnnnnnnnnnnnnnnnnnnnnnnnnnnnnnnnnnnnnnnnnnnnnnnnnnnnnnnnnnnnnnnnnnnnnnnnnnnnnnnnnnnnnnnnnnnnnnnnnnnnnnnnnnnnnnnnnnnnnnnnnnnnnnnnnnnnnnnnnnnnnnnnnnnnnnnnnnnnnnnnnnnnnnnnnnnnnnnnnnnnnnnnnnnnnnnnnnnnnnnnnnnnnnnnnnnnnnnnnnnnnnnnnnnnnnnnnnnnnnnnnnnnnnnnnnnnnnnnnnnnnnnnnnnnnnnnnnnnnnnnnnnnnnnnnnnnnnnnnnnnnnnnnnnnnnnnnnnnnnnnnnnnnnnnnnnnnnnnnnnnnnnnnnnnnnnnnnnnnnnnnnnnnnnnnnnnnnnnnnnnnnnnnnnnnnnnnnnnnnnnnnnnnnnnnnnnnnnnnnnnnnnnnnnnnnnnnnnnnnnnnnnnnnnnnnnnnnnnnnnnnnnnnnnnnnnnnnnnnnnnnnnnnnnnnnnnnnnnnnnnnnnnnnnnnnnnnnnnnnnnnnnnnnnnnnnnnnnnnnnnnnnnnnnnnnnnnnnnnnnnnnnnnnnnnnnnnnnnnnnnnnnnnnnnnnnnnnnnnnnnnnnnnnnnnnnnnnnnnnnnnnnnnnnnnnnnnnnnnnnnnnnnnnnnnnnnnnnnnnnnnnnnnnnnnnnnnnnnnnnnnnnnnnnnnnnnnnnnnnnnnnnnnnnnnnnnnnnnnnnnnnnnnnnnnnnnnnnnnnnnnnnnnnnnnnnnnnnnnnnnnnnnnnnnnnnnnnnnnnnnnnnnnnnnnnnnnnnnnnnnnnnnnnnnnnnnnnnnnnnnnnnnnnnnnnnnnnnnnnnnnnnnnnnnnnnnnnnnnnnnnnnnnnnnnnnnnnnnnnnnnnnnnnnnnnnnnnnnnnnnnnnnnnnnnnnnnnnnnnnnnnnnnnnnnnnnnnnnnnnnnnnnnnnnnnnnnnnnnnnnnnnnnnnnnnnnnnnnnnnnnnnnnnnnnnnnnnnnnnnnnnnnnnnnnnnnnnnnnnnnnnnnnnnnnnnnnnnnnnnnnnnnnnnnnnnnnnnnnnnnnnnnnnnnnnnnnnnnnnnnnnnnnnnnnnnnnnnnnnnnnnnnnnnnnnnnnnnnnnnnnnnnnnnnnnnnnnnnnnnnnnnnnnnnnnnnnnnnnnnnnnnnnnnnnnnnnnnnnnnnnnnnnnnnnnnnnnnnnnnnnnnnnnnnnnnnnnnnnnnnnnnnnnnnnnnnnnnnnnnnnnnnnnnnnnnnnnnnnnnnnnnnnnnnnnnnnnnnnnnnnnnnnnnnnnnnnnnnnnnnnnnnnnnnnnnnnnnnnnnnnnnnnnnnnnnnnnnnnnnnnnnnnnnnnnnnnnnnnnnnnnnnnnnnnnnnnnnnnnnnnnnnnnnnnnnnnnnnnnnnnnnnnnnnnnnnnnnnnnnnnnnnnnnnnnnnnnnnnnnnnnnnnnnnnnnnnnnnnnnnnnnnnnnnnnnnnnnnnnnnnnnnnnnnnnnnnnnnnnnnnnnnnnnnnnnnnnnnnnnnnnnnnnnnnnnnnnnnnnnnnnnnnnnnnnnnnnnnnnnnnnnnnnnnnnnnnnnnnnnnnnnnnnnnnnnnnnnnnnnnnnnnnnnnnnnnnnnnnnnnnnnnnnnnnnnnnnnnnnnnnnnnnnnnnnnnnnnnnnnnnnnnnnnnnnnnnnnnnnnnnnnnnnnnnnnnnnnnnnnnnnnnnnnnnnnnnnnnnnnnnnnnnnnnnnnnnnnnnnnnnnnnnnnnnnnnnnnnnnnnnnnnnnnnnnnnnnnnnnnnnnnnnnnnnnnnnnnnnnnnnnnnnnnnnnnnnnnnnnnnnnnnnnnnnnnnnnnnnnnnnnnnnnnnnnnnnnnnnnnnnnnnnnnnnnnnnnnnnnnnnnnnnnnnnnnnnnnnnnnnnnnnnnnnnnnnnnnnnnnnnnnnnnnnnnnnnnnnnnnnnnnnnnnnnnnnnnnnnnnnnnnnnnnnnnnnnnnnnnnnnnnnnnnnnnnnnnnnnnnnnnnnnnnnnnnnnnnnnnnnnnnnnnnnnnnnnnnnnnnnnnnnnnnnnnnnnnnnnnnnnnnnnnnnnnnnnnnnnnnnnnnnnnnnnnnnnnnnnnnnnnnnnnnnnnnnnnnnnnnnnnnnnnnnnnnnnnnnnnnnnnnnnnnnnnnnnnnnnnnnnnnnnnnnnnnnnnnnnnnnnnnnnnnnnnnnnnnnnnnnnnnnnnnnnnnnnnnnnnnnnnnnnnnnnnnnnnnnnnnnnnnnnnnnnnnnnnnnnnnnnnnnnnnnnnnnnnnnnnnnnnnnnnnnnnnnnnnnnnnnnnnnnnnnnnnnnnnnnnnnnnnnnnnnnnnnnnnnnnnnnnnnnnnnnnnnnnnnnnnnnnnnnnnnnnnnnnnnnnnnnnnnnnnnnnnnnnnnnnnnnnnnnnnnnnnnnnnnnnnnnnnnnnnnnnnnnnnnnnnnnnnnnnnnnnnnnnnnnnnnnnnnnnnnnnnnnnnnnnnnnnnnnnnnnnnnnnnnnnnnnnnnnnnnnnnnnnnnnnnnnnnnnnnnnnnnnnnnnnnnnnnnnnnnnnnnnnnnnnnnnnnnnnnnnnnnnnnnnnnnnnnnnnnnnnnnnnnnnnnnnnnnnnnnnnnnnnnnnnnnnnnnnnnnnnnnnnnnnnnnnnnnnnnnnnnnnnnnnnnnnnnnnnnnnnnnnnnnnnnnnnnnnnnnnnnnnnnnnnnnnnnnnnnnnnnnnnnnnnnnnnnnnnnnnnnnnnnnnnnnnnnnnnnnnnnnnnnnnnnnnnnnnnnnnnnnnnnnnnnnnnnnnnnnnnnnnnnnnnnnnnnnnnnnnnnnnnnnnnnnnnnnnnnnnnnnnnnnnnnnnnnnnnnnnnnnnnnnnnnnnnnnnnnnnnnnnnnnnnnnnnnnnnnnnnnnnnnnnnnnnnnnnnnnnnnnnnnnnnnnnnnnnnnnnnnnnnnnnnnnnnnnnnnnnnnnnnnnnnnnnnnnnnnnnnnnnnnnnnnnnnnnnnnnnnnnnnnnnnnnnnnnnnnnnnnnnnnnnnnnnnnnnnnnnnnnnnnnnnnnnnnnnnnnnnnnnnnnnnnnnnnnnnnnnnnnnnnnnnnnnnnnnnnnnnnnnnnnnnnnnnnnnnnnnnnnnnnnnnnnnnnnnnnnnnnnnnnnnnnnnnnnnnnnnnnnnnnnnnnnnnnnnnnnnnnnnnnnnnnnnnnnnnnnnnnnnnnnnnnnnnnnnnnnnnnnnnnnnnnnnnnnnnnnnnnnnnnnnnnnnnnnnnnnnnnnnnnnnnnnnnnnnnnnnnnnnnnnnnnnnnnnnnnnnnnnnnnnnnnnnnnnnnnnnnnnnnnnnnnnnnnnnnnnnnnnnnnnnnnnnnnnnnnnnnnnnnnnnnnnnnnnnnnnnnnnnnnnnnnnnnnnnnnnnnnnnnnnnnnnnnnnnnnnnnnnnnnnnnnnnnnnnnnnnnnnnnnnnnnnnnnnnnnnnnnnnnnnnnnnnnnnnnnnnnnnnnnnnnnnnnnnnnnnnnnnnnnnnnnnnnnnnnnnnnnnnnnnnnnnnnnnnnnnnnnnnnnnnnnnnnnnnnnnnnnnnnnnnnnnnnnnnnnnnnnnnnnnnnnnnnnnnnnnnnnnnnnnnnnnnnnnnnnnnnnnnnnnnnnnnnnnnnnnnnnnnnnnnnnnnnnnnnnnnnnnnnnnnnnnnnnnnnnnnnnnnnnnnnnnnnnnnnnnnnnnnnnnnnnnnnnnnnnnnnnnnnnnnnnnnnnnnnnnnnnnnnnnnnnnnnnnnnnnnnnnnnnnnnnnnnnnnnnnnnnnnnnnnnnnnnnnnnnnnnnnnnnnnnnnnnnnnnnnnnnnnnnnnnnnnnnnnnnnnnnnnnnnnnnnnnnnnnnnnnnnnnnnnnnnnnnnnnnnnnnnnnnnnnnnnnnnnnnnnnnnnnnnnnnnnnnnnnnnnnnnnnnnnnnnnnnnnnnnnnnnnnnnnnnnnnnnnnnnnnnnnnnnnnnnnnnnnnnnnnnnnnnnnnnnnnnnnnnnnnnnnnnnnnnnnnnnnnnnnnnnnnnnnnnnnnnnnnnnnnnnnnnnnnnnnnnnnnnnnnnnnnnnnnnnnnnnnnnnnnnnnnnnnnnnnnnnnnnnnnnnnnnnnnnnnnnnnnnnnnnnnnnnnnnnnnnnnnnnnnnnnnnnnnnnnnnnnnnnnnnnnnnnnnnnnnnnnnnnnnnnnnnnnnnnnnnnnnnnnnnnnnnnnnnnnnnnnnnnnnnnnnnnnnnnnnnnnnnnnnnnnnnnnnnnnnnnnnnnnnnnnnnnnnnnnnnnnnnnnnnnnnnnnnnnnnnnnnnnnnnnnnnnnnnnnnnnnnnnnnnnnnnnnnnnnnnnnnnnnnnnnnnnnnnnnnnnnnnnnnnnnnnnnnnnnnnnnnnnnnnnnnnnnnnnnnnnnnnnnnnnnnnnnnnnnnnnnnnnnnnnnnnnnnnnnnnnnnnnnnnnnnnnnnnnnnnnnnnnnnnnnnnnnnnnnnnnnnnnnnnnnnnnnnnnnnnnnnnnnnnnnnnnnnnnnnnnnnnnnnnnnnnnnnnnnnnnnnnnnnnnnnnnnnnnnnnnnnnnnnnnnnnnnnnnnnnnnnnnnnnnnnnnnnnnnnnnnnnnnnnnnnnnnnnnnnnnnnnnnnnnnnnnnnnnnnnnnnnnnnnnnnnnnnnnnnnnnnnnnnnnnnnnnnnnnnnnnnnnnnnnnnnnnnnnnnnnnnnnnnnnnnnnnnnnnnnnnnnnnnnnnnnnnnnnnnnnnnnnnnnnnnnnnnnnnnnnnnnnnnnnnnnnnnnnnnnnnnnnnnnnnnnnnnnnnnnnnnnnnnnnnnnnnnnnnnnnnnnnnnnnnnnnnnnnnnnnnnnnnnnnnnnnnnnnnnnnnnnnnnnnnnnnnnnnnnnnnnnnnnnnnnnnnnnnnnnnnnnnnnnnnnnnnnnnnnnnnnnnnnnnnnnnnnnnnnnnnnnnnnnnnnnnnnnnnnnnnnnnnnnnnnnnnnnnnnnnnnnnnnnnnnnnnnnnnnnnnnnnnnnnnnnnnnnnnnnnnnnnnnnnnnnnnnnnnnnnnnnnnnnnnnnnnnnnnnnnnnnnnnnnnnnnnnnnnnnnnnnnnnnnnnnnnnnnnnnnnnnnnnnnnnnnnnnnnnnnnnnnnnnnnnnnnnnnnnnnnnnnnnnnnnnnnnnnnnnnnnnnnnnnnnnnnnnnnnnnnnnnnnnnnnnnnnnnnnnnnnnnnnnnnnnnnnnnnnnnnnnnnnnnnnnnnnnnnnnnnnnnnnnnnnnnnnnnnnnnnnnnnnnnnnnnnnnnnnnnnnnnnnnnnnnnnnnnnnnnnnnnnnnnnnnnnnnnnnnnnnnnnnnnnnnnnnnnnnnnnnnnnnnnnnnnnnnnnnnnnnnnnnnnnnnnnnnnnnnnnnnnnnnnnnnnnnnnnnnnnnnnnnnnnnnnnnnnnnnnnnnnnnnnnnnnnnnnnnnnnnnnnnnnnnnnnnnnnnnnnnnnnnnnnnnnnnnnnnnnnnnnnnnnnnnnnnnnnnnnnnnnnnnnnnnnnnnnnnnnnnnnnnnnnnnnnnnnnnnnnnnnnnnnnnnnnnnnnnnnnnnnnnnnnnnnnnnnnnnnnnnnnnnnnnnnnnnnnnnnnnnnnnnnnnnnnnnnnnnnnnnnnnnnnnnnnnnnnnnnnnnnnnnnnnnnnnnnnnnnnnnnnnnnnnnnnnnnnnnnnnnnnnnnnnnnnnnnnnnnnnnnnnnnnnnnnnnnnnnnnnnnnnnnnnnnnnnnnnnnnnnnnnnnnnnnnnnnnnnnnnnnnnnnnnnnnnnnnnnnnnnnnnnnnnnnnnnnnnnnnnnnnnnnnnnnnnnnnnnnnnnnnnnnnnnnnnnnnnnnnnnnnnnnnnnnnnnnnnnnnnnnnnnnnnnnnnnnnnnnnnnnnnnnnnnnnnnnnnnnnnnnnnnnnnnnnnnnnnnnnnnnnnnnnnnnnnnnnnnnnnnnnnnnnnnnnnnnnnnnnnnnnnnnnnnnnnnnnnnnnnnnnnnnnnnnnnnnnnnnnnnnnnnnnnnnnnnnnnnnnnnnnnnnnnnnnnnnnnnnnnnnnnnnnnnnnnnnnnnnnnnnnnnnnnnnnnnnnnnnnnnnnnnnnnnnnnnnnnnnnnnnnnnnnnnnnnnnnnnnnnnnnnnnnnnnnnnnnnnnnnnnnnnnnnnnnnnnnnnnnnnnnnnnnnnnnnnnnnnnnnnnnnnnnnnnnnnnnnnnnnnnnnnnnnnnnnnnnnnnnnnnnnnnnnnnnnnnnnnnnnnnnnnnnnnnnnnnnnnnnnnnnnnnnnnnnnnnnnnnnnnnnnnnnnnnnnnnnnnnnnnnnnnnnnnnnnnnnnnnnnnnnnnnnnnnnnnnnnnnnnnnnnnnnnnnnnnnnnnnnnnnnnnnnnnnnnnnnnnnnnnnnnnnnnnnnnnnnnnnnnnnnnnnnnnnnnnnnnnnnnnnnnnnnnnnnnnnnnnnnnnnnnnnnnnnnnnnnnnnnnnnnnnnnnnnnnnnnnnnnnnnnnnnnnnnnnnnnnnnnnnnnnnnnnnnnnnnnnnnnnnnnnnnnnnnnnnnnnnnnnnnnnnnnnnnnnnnnnnnnnnnnnnnnnnnnnnnnnnnnnnnnnnnnnnnnnnnnnnnnnnnnnnnnnnnnnnnnnnnnnnnnnnnnnnnnnnnnnnnnnnnnnnnnnnnnnnnnnnnnnnnnnnnnnnnnnnnnnnnnnnnnnnnnnnnnnnnnnnnnnnnnnnnnnnnnnnnnnnnnnnnnnnnnnnnnnnnnnnnnnnnnnnnnnnnnnnnnnnnnnnnnnnnnnnnnnnnnnnnnnnnnnnnnnnnnnnnnnnnnnnnnnnnnnnnnnnnnnnnnnnnnnnnnnnnnnnnnnnnnnnnnnnnnnnnnnnnnnnnnnnnnnnnnnnnnnnnnnnnnnnnnnnnnnnnnnnnnnnnnnnnnnnnnnnnnnnnnnnnnnnnnnnnnnnnnnnnnnnnnnnnnnnnnnnnnnnnnnnnnnnnnnnnnnnnnnnnnnnnnnnnnnnnnnnnnnnnnnnnnnnnnnnnnnnnnnnnnnnnnnnnnnnnnnnnnnnnnnnnnnnnnnnnnnnnnnnnnnnnnnnnnnnnnnnnnnnnnnnnnnnnnnnnnnnnnnnnnnnnnnnnnnnnnnnnnnnnnnnnnnnnnnnnnnnnnnnnnnnnnnnnnnnnnnnnnnnnnnnnnnnnnnnnnnnnnnnnnnnnnnnnnnnnnnnnnnnnnnnnnnnnnnnnnnnnnnnnnnnnnnnnnnnnnnnnnnnnnnnnnnnnnnnnnnnnnnnnnnnnnnnnnnnnnnnnnnnnnnnnnnnnnnnnnnnnnnnnnnnnnnnnnnnnnnnnnnnnnnnnnnnnnnnnnnnnnnnnnnnnnnnnnnnnnnnnnnnnnnnnnnnnnnnnnnnnnnnnnnnnnnnnnnnnnnnnnnnnnnnnnnnnnnnnnnnnnnnnnnnnnnnnnnnnnnnnnnnnnnnnnnnnnnnnnnnnnnnnnnnnnnnnnnnnnnnnnnnnnnnnnnnnnnnnnnnnnnnnnnnnnnnnnnnnnnnnnnnnnnnnnnnnnnnnnnnnnnnnnnnnnnnnnnnnnnnnnnnnnnnnnnnnnnnnnnnnnnnnnnnnnnnnnnnnnnnnnnnnnnnnnnnnnnnnnnnnnnnnnnnnnnnnnnnnnnnnnnnnnnnnnnnnnnnnnnnnnnnnnnnnnnnnnnnnnnnnnnnnnnnnnnnnnnnnnnnnnnnnnnnnnnnnnnnnnnnnnnnnnnnnnnnnnnnnnnnnnnnnnnnnnnnnnnnnnnnnnnnnnnnnnnnnnnnnnnnnnnnnnnnnnnnnnnnnnnnnnnnnnnnnnnnnnnnnnnnnnnnnnnnnnnnnnnnnnnnnnnnnnnnnnnnnnnnnnnnnnnnnnnnnnnnnnnnnnnnnnnnnnnnnnnnnnnnnnnnnnnnnnnnnnnnnnnnnnnnnnnnnnnnnnnnnnnnnnnnnnnnnnnnnnnnnnnnnnnnnnnnnnnnnnnnnnnnnnnnnnnnnnnnnnnnnnnnnnnnnnnnnnnnnnnnnnnnnnnnnnnnnnnnnnnnnnnnnnnnnnnnnnnnnnnnnnnnnnnnnnnnnnnnnnnnnnnnnnnnnnnnnnnnnnnnnnnnnnnnnnnnnnnnnnnnnnnnnnnnnnnnnnnnnnnnnnnnnnnnnnnnnnnnnnnnnnnnnnnnnnnnnnnnnnnnnnnnnnnnnnnnnnnnnnnnnnnnnnnnnnnnnnnnnnnnnnnnnnnnnnnnnnnnnnnnnnnnnnnnnnnnnnnnnnnnnnnnnnnnnnnnnnnnnnnnnnnnnnnnnnnnnnnnnnnnnnnnnnnnnnnnnnnnnnnnnnnnnnnnnnnnnnnnnnnnnnnnnnnnnnnnnnnnnnnnnnnnnnnnnnnnnnnnnnnnnnnnnnnnnnnnnnnnnnnnnnnnnnnnnnnnnnnnnnnnnnnnnnnnnnnnnnnnnnnnnnnnnnnnnnnnnnnnnnnnnnnnnnnnnnnnnnnnnnnnnnnnnnnnnnnnnnnnnnnnnnnnnnnnnnnnnnnnnnnnnnnnnnnnnnnnnnnnnnnnnnnnnnnnnnnnnnnnnnnnnnnnnnnnnnnnnnnnnnnnnnnnnnnnnnnnnnnnnnnnnnnnnnnnnnnnnnnnnnnnnnnnnnnnnnnnnnnnnnnnnnnnnnnnnnnnnnnnnnnnnnnnnnnnnnnnnnnnnnnnnnnnnnnnnnnnnnnnnnnnnnnnnnnnnnnnnnnnnnnnnnnnnnnnnnnnnnnnnnnnnnnnnnnnnnnnnnnnnnnnnnnnnnnnnnnnnnnnnnnnnnnnnnnnnnnnnnnnnnnnnnnnnnnnnnnnnnnnnnnnnnnnnnnnnnnnnnnnnnnnnnnnnnnnnnnnnnnnnnnnnnnnnnnnnnnnnnnnnnnnnnnnnnnnnnnnnnnnnnnnnnnnnnnnnnnnnnnnnnnnnnnnnnnnnnnnnnnnnnnnnnnnnnnnnnnnnnnnnnnnnnnnnnnnnnnnnnnnnnnnnnnnnnnnnnnnnnnnnnnnnnnnnnnnnnnnnnnnnnnnnnnnnnnnnnnnnnnnnnnnnnnnnnnnnnnnnnnnnnnnnnnnnnnnnnnnnnnnnnnnnnnnnnnnnnnnnnnnnnnnnnnnnnnnnnnnnnnnnnnnnnnnnnnnnnnnnnnnnnnnnnnnnnnnnnnnnnnnnnnnnnnnnnnnnnnnnnnnnnnnnnnnnnnnnnnnnnnnnnnnnnnnnnnnnnnnnnnnnnnnnnnnnnnnnnnnnnnnnnnnnnnnnnnnnnnnnnnnnnnnnnnnnnnnnnnnnnnnnnnnnnnnnnnnnnnnnnnnnnnnnnnnnnnnnnnnnnnnnnnnnnnnnnnnnnnnnnnnnnnnnnnnnnnnnnnnnnnnnnnnnnnnnnnnnnnnnnnnnnnnnnnnnnnnnnnnnnnnnnnnnnnnnnnnnnnnnnnnnnnnnnnnnnnnnnnnnnnnnnnnnnnnnnnnnnnnnnnnnnnnnnnnnnnnnnnnnnnnnnnnnnnnnnnnnnnnnnnnnnnnnnnnnnnnnnnnnnnnnnnnnnnnnnnnnnnnnnnnnnnnnnnnnnnnnnnnnnnnnnnnnnnnnnnnnnnnnnnnnnnnnnnnnnnnnnnnnnnnnnnnnnnnnnnnnnnnnnnnnnnnnnnnnnnnnnnnnnnnnnnnnnnnnnnnnnnnnnnnnnnnnnnnnnnnnnnnnnnnnnnnnnnnnnnnnnnnnnnnnnnnnnnnnnnnnnnnnnnnnnnnnnnnnnnnnnnnnnnnnnnnnnnnnnnnnnnnnnnnnnnnnnnnnnnnnnnnnnnnnnnnnnnnnnnnnnnnnnnnnnnnnnnnnnnnnnnnnnnnnnnnnnnnnnnnnnnnnnnnnnnnnnnnnnnnnnnnnnnnnnnnnnnnnnnnnnnnnnnnnnnnnnnnnnnnnnnnnnnnnnnnnnnnnnnnnnnnnnnnnnnnnnnnnnnnnnnnnnnnnnnnnnnnnnnnnnnnnnnnnnnnnnnnnnnnnnnnnnnnnnnnnnnnnnnnnnnnnnnnnnnnnnnnnnnnnnnnnnnnnnnnnnnnnnnnnnnnnnnnnnnnnnnnnnnnnnnnnnnnnnnnnnnnnnnnnnnnnnnnnnnnnnnnnnnnnnnnnnnnnnnnnnnnnnnnnnnnnnnnnnnnnnnnnnnnnnnnnnnnnnnnnnnnnnnnnnnnnnnnnnnnnnnnnnnnnnnnnnnnnnnnnnnnnnnnnnnnnnnnnnnnnnnnnnnnnnnnnnnnnnnnnnnnnnnnnnnnnnnnnnnnnnnnnnnnnnnnnnnnnnnnnnnnnnnnnnnnnnnnnnnnnnnnnnnnnnnnnnnnnnnnnnnnnnnnnnnnnnnnnnnnnnnnnnnnnnnnnnnnnnnnnnnnnnnnnnnnnnnnnnnnnnnnnnnnnnnnnnnnnnnnnnnnnnnnnnnnnnnnnnnnnnnnnnnnnnnnnnnnnnnnnnnnnnnnnnnnnnnnnnnnnnnnnnnnnnnnnnnnnnnnnnnnnnnnnnnnnnnnnnnnnnnnnnnnnnnnnnnnnnnnnnnnnnnnnnnnnnnnnnnnnnnnnnnnnnnnnnnnnnnnnnnnnnnnnnnnnnnnnnnnnnnnnnnnnnnnnnnnnnnnnnnnnnnnnnnnnnnnnnnnnnnnnnnnnnnnnnnnnnnnnnnnnnnnnnnnnnnnnnnnnnnnnnnnnnnnnnnnnnnnnnnnnnnnnnnnnnnnnnnnnnnnnnnnnnnnnnnnnnnnnnnnnnnnnnnnnnnnnnnnnnnnnnnnnnnnnnnnnnnnnnnnnnnnnnnnnnnnnnnnnnnnnnnnnnnnnnnnnnnnnnnnnnnnnnnnnnnnnnnnnnnnnnnnnnnnnnnnnnnnnnnnnnnnnnnnnnnnnnnnnnnnnnnnnnnnnnnnnnnnnnnnnnnnnnnnnnnnnnnnnnnnnnnnnnnnnnnnnnnnnnnnnnnnnnnnnnnnnnnnnnnnnnnnnnnnnnnnnnnnnnnnnnnnnnnnnnnnnnnnnnnnnnnnnnnnnnnnnnnnnnnnnnnnnnnnnnnnnnnnnnnnnnnnnnnnnnnnnnnnnnnnnnnnnnnnnnnnnnnnnnnnnnnnnnnnnnnnnnnnnnnnnnnnnnnnnnnnnnnnnnnnnnnnnnnnnnnnnnnnnnnnnnnnnnnnnnnnnnnnnnnnnnnnnnnnnnnnnnnnnnnnnnnnnnnnnnnnnnnnnnnnnnnnnnnnnnnnnnnnnnnnnnnnnnnnnnnnnnnnnnnnnnnnnnnnnnnnnnnnnnnnnnnnnnnnnnnnnnnnnnnnnnnnnnnnnnnnnnnnnnnnnnnnnnnnnnnnnnnnnnnnnnnnnnnnnnnnnnnnnnnnnnnnnnnnnnnnnnnnnnnnnnnnnnnnnnnnnnnnnnnnnnnnnnnnnnnnnnnnnnnnnnnnnnnnnnnnnnnnnnnnnnnnnnnnnnnnnnnnnnnnnnnnnnnnnnnnnnnnnnnnnnnnnnnnnnnnnnnnnnnnnnnnnnnnnnnnnnnnnnnnnnnnnnnnnnnnnnnnnnnnnnnnnnnnnnnnnnnnnnnnnnnnnnnnnnnnnnnnnnnnnnnnnnnnnnnnnnnnnnnnnnnnnnnnnnnnnnnnnnnnnnnnnnnnnnnnnnnnnnnnnnnnnnnnnnnnnnnnnnnnnnnnnnnnnnnnnnnnnnnnnnnnnnnnnnnnnnnnnnnnnnnnnnnnnnnnnnnnnnnnnnnnnnnnnnnnnnnnnnnnnnnnnnnnnnnnnnnnnnnnnnnnnnnnnnnnnnnnnnnnnnnnnnnnnnnnnnnnnnnnnnnnnnnnnnnnnnnnnnnnnnnnnnnnnnnnnnnnnnnnnnnnnnnnnnnnnnnnnnnnnnnnnnnnnnnnnnnnnnnnnnnnnnnnnnnnnnnnnnnnnnnnnnnnnnnnnnnnnnnnnnnnnnnnnnnnnnnnnnnnnnnnnnnnnnnnnnnnnnnnnnnnnnnnnnnnnnnnnnnnnnnnnnnnnnnnnnnnnnnnnnnnnnnnnnnnnnnnnnnnnnnnnnnnnnnnnnnnnnnnnnnnnnnnnnnnnnnnnnnnnnnnnnnnnnnnnnnnnnnnnnnnnnnnnnnnnnnnnnnnnnnnnnnnnnnnnnnnnnnnnnnnnnnnnnnnnnnnnnnnnnnnnnnnnnnnnnnnnnnnnnnnnnnnnnnnnnnnnnnnnnnnnnnnnnnnnnnnnnnnnnnnnnnnnnnnnnnnnnnnnnnnnnnnnnnnnnnnnnnnnnnnnnnnnnnnnnnnnnnnnnnnnnnnnnnnnnnnnnnnnnnnnnnnnnnnnnnnnnnnnnnnnnnnnnnnnnnnnnnnnnnnnnnnnnnnnnnnnnnnnnnnnnnnnnnnnnnnnnnnnnnnnnnnnnnnnnnnnnnnnnnnnnnnnnnnnnnnnnnnnnnnnnnnnnnnnnnnnnnnnnnnnnnnnnnnnnnnnnnnnnnnnnnnnnnnnnnnnnnnnnnnnnnnnnnnnnnnnnnnnnnnnnnnnnnnnnnnnnnnnnnnnnnnnnnnnnnnnnnnnnnnnnnnnnnnnnnnnnnnnnnnnnnnnnnnnnnnnnnnnnnnnnnnnnnnnnnnnnnnnnnnnnnnnnnnnnnnnnnnnnnnnnnnnnnnnnnnnnnnnnnnnnnnnnnnnnnnnnnnnnnnnnnnnnnnnnnnnnnnnnnnnnnnnnnnnnnnnnnnnnnnnnnnnnnnnnnnnnnnnnnnnnnnnnnnnnnnnnnnnnnnnnnnnnnnnnnnnnnnnnnnnnnnnnnnnnnnnnnnnnnnnnnnnnnnnnnnnnnnnnnnnnnnnnnnnnnnnnnnnnnnnnnnnnnnnnnnnnnnnnnnnnnnnnnnnnnnnnnnnnnnnnnnnnnnnnnnnnnnnnnnnnnnnnnnnnnnnnnnnnnnnnnnnnnnnnnnnnnnnnnnnnnnnnnnnnnnnnnnnnnnnnnnnnnnnnnnnnnnnnnnnnnnnnnnnnnnnnnnnnnnnnnnnnnnnnnnnnnnnnnnnnnnnnnnnnnnnnnnnnnnnnnnnnnnnnnnnnnnnnnnnnnnnnnnnnnnnnnnnnnnnnnnnnnnnnnnnnnnnnnnnnnnnnnnnnnnnnnnnnnnnnnnnnnnnnnnnnnnnnnnnnnnnnnnnnnnnnnnnnnnnnnnnnnnnnnnnnnnnnnnnnnnnnnnnnnnnnnnnnnnnnnnnnnnnnnnnnnnnnnnnnnnnnnnnnnnnnnnnnnnnnnnnnnnnnnnnnnnnnnnnnnnnnnnnnnnnnnnnnnnnnnnnnnnnnnnnnnnnnnnnnnnnnnnnnnnnnnnnnnnnnnnnnnnnnnnnnnnnnnnnnnnnnnnnnnnnnnnnnnnnnnnnnnnnnnnnnnnnnnnnnnnnnnnnnnnnnnnnnnnnnnnnnnnnnnnnnnnnnnnnnnnnnnnnnnnnnnnnnnnnnnnnnnnnnnnnnnnnnnnnnnnnnnnnnnnnnnnnnnnnnnnnnnnnnnnnnnnnnnnnnnnnnnnnnnnnnnnnnnnnnnnnnnnnnnnnnnnnnnnnnnnnnnnnnnnnnnnnnnnnnnnnnnnnnnnnnnnnnnnnnnnnnnnnnnnnnnnnnnnnnnnnnnnnnnnnnnnnnnnnnnnnnnnnnnnnnnnnnnnnnnnnnnnnnnnnnnnnnnnnnnnnnnnnnnnnnnnnnnnnnnnnnnnnnnnnnnnnnnnnnnnnnnnnnnnnnnnnnnnnnnnnnnnnnnnnnnnnnnnnnnnnnnnnnnnnnnnnnnnnnnnnnnnnnnnnnnnnnnnnnnnnnnnnnnnnnnnnnnnnnnnnnnnnnnnnnnnnnnnnnnnnnnnnnnnnnnnnnnnnnnnnnnnnnnnnnnnnnnnnnnnnnnnnnnnnnnnnnnnnnnnnnnnnnnnnnnnnnnnnnnnnnnnnnnnnnnnnnnnnnnnnnnnnnnnnnnnnnnnnnnnnnnnnnnnnnnnnnnnnnnnnnnnnnnnnnnnnnnnnnnnnnnnnnnnnnnnnnnnnnnnnnnnnnnnnnnnnnnnnnnnnnnnnnnnnnnnnnnnnnnnnnnnnnnnnnnnnnnnnnnnnnnnnnnnnnnnnnnnnnnnnnnnnnnnnnnnnnnnnnnnnnnnnnnnnnnnnnnnnnnnnnnnnnnnnnnnnnnnnnnnnnnnnnnnnnnnnnnnnnnnnnnnnnnnnnnnnnnnnnnnnnnnnnnnnnnnnnnnnnnnnnnnnnnnnnnnnnnnnnnnnnnnnnnnnnnnnnnnnnnnnnnnnnnnnnnnnnnnnnnnnnnnnnnnnnnnnnnnnnnnnnnnnnnnnnnnnnnnnnnnnnnnnnnnnnnnnnnnnnnnnnnnnnnnnnnnnnnnnnnnnnnnnnnnnnnnnnnnnnnnnnnnnnnnnnnnnnnnnnnnnnnnnnnnnnnnnnnnnnnnnnnnnnnnnnnnnnnnnnnnnnnnnnnnnnnnnnnnnnnnnnnnnnnnnnnnnnnnnnnnnnnnnnnnnnnnnnnnnnnnnnnnnnnnnnnnnnnnnnnnnnnnnnnnnnnnnnnnnnnnnnnnnnnnnnnnnnnnnnnnnnnnnnnnnnnnnnnnnnnnnnnnnnnnnnnnnnnnnnnnnnnnnnnnnnnnnnnnnnnnnnnnnnnnnnnnnnnnnnnnnnnnnnnnnnnnnnnnnnnnnnnnnnnnnnnnnnnnnnnnnnnnnnnnnnnnnnnnnnnnnnnnnnnnnnnnnnnnnnnnnnnnnnnnnnnnnnnnnnnnnnnnnnnnnnnnnnnnnnnnnnnnnnnnnnnnnnnnnnnnnnnnnnnnnnnnnnnnnnnnnnnnnnnnnnnnnnnnnnnnnnnnnnnnnnnnnnnnnnnnnnnnnnnnnnnnnnnnnnnnnnnnnnnnnnnnnnnnnnnnnnnnnnnnnnnnnnnnnnnnnnnnnnnnnnnnnnnnnnnnnnnnnnnnnnnnnnnnnnnnnnnnnnnnnnnnnnnnnnnnnnnnnnnnnnnnnnnnnnnnnnnnnnnnnnnnnnnnnnnnnnnnnnnnnnnnnnnnnnnnnnnnnnnnnnnnnnnnnnnnnnnnnnnnnnnnnnnnnnnnnnnnnnnnnnnnnnnnnnnnnnnnnnnnnnnnnnnnnnnnnnnnnnnnnnnnnnnnnnnnnnnnnnnnnnnnnnnnnnnnnnnnnnnnnnnnnnnnnnnnnnnnnnnnnnnnnnnnnnnnnnnnnnnnnnnnnnnnnnnnnnnnnnnnnnnnnnnnnnnnnnnnnnnnnnnnnnnnnnnnnnnnnnnnnnnnnnnnnnnnnnnnnnnnnnnnnnnnnnnnnnnnnnnnnnnnnnnnnnnnnnnnnnnnnnnnnnnnnnnnnnnnnnnnnnnnnnnnnnnnnnnnnnnnnnnnnnnnnnnnnnnnnnnnnnnnnnnnnnnnnnnnnnnnnnnnnnnnnnnnnnnnnnnnnnnnnnnnnnnnnnnnnnnnnnnnnnnnnnnnnnnnnnnnnnnnnnnnnnnnnnnnnnnnnnnnnnnnnnnnnnnnnnnnnnnnnnnnnnnnnnnnnnnnnnnnnnnnnnnnnnnnnnnnnnnnnnnnnnnnnnnnnnnnnnnnnnnnnnnnnnnnnnnnnnnnnnnnnnnnnnnnnnnnnnnnnnnnnnnnnnnnnnnnnnnnnnnnnnnnnnnnnnnnnnnnnnnnnnnnnnnnnnnnnnnnnnnnnnnnnnnnnnnnnnnnnnnnnnnnnnnnnnnnnnnnnnnnnnnnnnnnnnnnnnnnnnnnnnnnnnnnnnnnnnnnnnnnnnnnnnnnnnnnnnnnnnnnnnnnnnnnnnnnnnnnnnnnnnnnnnnnnnnnnnnnnnnnnnnnnnnnnnnnnnnnnnnnnnnnnnnnnnnnnnnnnnnnnnnnnnnnnnnnnnnnnnnnnnnnnnnnnnnnnnnnnnnnnnnnnnnnnnnnnnnnnnnnnnnnnnnnnnnnnnnnnnnnnnnnnnnnnnnnnnnnnnnnnnnnnnnnnnnnnnnnnnnnnnnnnnnnnnnnnnnnnnnnnnnnnnnnnnnnnnnnnnnnnnnnnnnnnnnnnnnnnnnnnnnnnnnnnnnnnnnnnnnnnnnnnnnnnnnnnnnnnnnnnnnnnnnnnnnnnnnnnnnnnnnnnnnnnnnnnnnnnnnnnnnnnnnnnnnnnnnnnnnnnnnnnnnnnnnnnnnnnnnnnnnnnnnnnnnnnnnnnnnnnnnnnnnnnnnnnnnnnnnnnnnnnnnnnnnnnnnnnnnnnnnnnnnnnnnnnnnnnnnnnnnnnnnnnnnnnnnnnnnnnnnnnnnnnnnnnnnnnnnnnnnnnnnnnnnnnnnnnnnnnnnnnnnnnnnnnnnnnnnnnnnnnnnnnnnnnnnnnnnnnnnnnnnnnnnnnnnnnnnnnnnnnnnnnnnnnnnnnnnnnnnnnnnnnnnnnnnnnnnnnnnnnnnnnnnnnnnnnnnnnnnnnnnnnnnnnnnnnnnnnnnnnnnnnnnnnnnnnnnnnnnnnnnnnnnnnnnnnnnnnnnnnnnnnnnnnnnnnnnnnnnnnnnnnnnnnnnnnnnnnnnnnnnnnnnnnnnnnnnnnnnnnnnnnnnnnnnnnnnnnnnnnnnnnnnnnnnnnnnnnnnnnnnnnnnnnnnnnnnnnnnnnnnnnnnnnnnnnnnnnnnnnnnnnnnnnnnnnnnnnnnnnnnnnnnnnnnnnnnnnnnnnnnnnnnnnnnnnnnnnnnnnnnnnnnnnnnnnnnnnnnnnnnnnnnnnnnnnnnnnnnnnnnnnnnnnnnnnnnnnnnnnnnnnnnnnnnnnnnnnnnnnnnnnnnnnnnnnnnnnnnnnnnnnnnnnnnnnnnnnnnnnnnnnnnnnnnnnnnnnnnnnnnnnnnnnnnnnnnnnnnnnnnnnnnnnnnnnnnnnnnnnnnnnnnnnnnnnnnnnnnnnnnnnnnnnnnnnnnnnnnnnnnnnnnnnnnnnnnnnnnnnnnnnnnnnnnnnnnnnnnnnnnnnnnnnnnnnnnnnnnnnnnnnnnnnnnnnnnnnnnnnnnnnnnnnnnnnnnnnnnnnnnnnnnnnnnnnnnnnnnnnnnnnnnnnnnnnnnnnnnnnnnnnnnnnnnnnnnnnnnnnnnnnnnnnnnnnnnnnnnnnnnnnnnnnnnnnnnnnnnnnnnnnnnnnnnnnnnnnnnnnnnnnnnnnnnnnnnnnnnnnnnnnnnnnnnnnnnnnnnnnnnnnnnnnnnnnnnnnnnnnnnnnnnnnnnnnnnnnnnnnnnnnnnnnnnnnnnnnnnnnnnnnnnnnnnnnnnnnnnnnnnnnnnnnnnnnnnnnnnnnnnnnnnnnnnnnnnnnnnnnnnnnnnnnnnnnnnnnnnnnnnnnnnnnnnnnnnnnnnnnnnnnnnnnnnnnnnnnnnnnnnnnnnnnnnnnnnnnnnnnnnnnnnnnnnnnnnnnnnnnnnnnnnnnnnnnnnnnnnnnnnnnnnnnnnnnnnnnnnnnnnnnnnnnnnnnnnnnnnnnnnnnnnnnnnnnnnnnnnnnnnnnnnnnnnnnnnnnnnnnnnnnnnnnnnnnnnnnnnnnnnnnnnnnnnnnnnnnnnnnnnnnnnnnnnnnnnnnnnnnnnnnnnnnnnnnnnnnnnnnnnnnnnnnnnnnnnnnnnnnnnnnnnnnnnnnnnnnnnnnnnnnnnnnnnnnnnnnnnnnnnnnnnnnnnnnnnnnnnnnnnnnnnnnnnnnnnnnnnnnnnnnnnnnnnnnnnnnnnnnnnnnnnnnnnnnnnnnnnnnnnnnnnnnnnnnnnnnnnnnnnnnnnnnnnnnnnnnnnnnnnnnnnnnnnnnnnnnnnnnnnnnnnnnnnnnnnnnnnnnnnnnnnnnnnnnnnnnnnnnnnnnnnnnnnnnnnnnnnnnnnnnnnnnnnnnnnnnnnnnnnnnnnnnnnnnnnnnnnnnnnnnnnnnnnnnnnnnnnnnnnnnnnnnnnnnnnnnnnnnnnnnnnnnnnnnnnnnnnnnnnnnnnnnnnnnnnnnnnnnnnnnnnnnnnnnnnnnnnnnnnnnnnnnnnnnnnnnnnnnnnnnnnnnnnnnnnnnnnnnnnnnnnnnnnnnnnnnnnnnnnnnnnnnnnnnnnnnnnnnnnnnnnnnnnnnnnnnnnnnnnnnnnnnnnnnnnnnnnnnnnnnnnnnnnnnnnnnnnnnnnnnnnnnnnnnnnnnnnnnnnnnnnnnnnnnnnnnnnnnnnnnnnnnnnnnnnnnnnnnnnnnnnnnnnnnnnnnnnnnnnnnnnnnnnnnnnnnnnnnnnnnnnnnnnnnnnnnnnnnnnnnnnnnnnnnnnnnnnnnnnnnnnnnnnnnnnnnnnnnnnnnnnnnnnnnnnnnnnnnnnnnnnnnnnnnnnnnnnnnnnnnnnnnnnnnnnnnnnnnnnnnnnnnnnnnnnnnnnnnnnnnnnnnnnnnnnnnnnnnnnnnnnnnnnnnnnnnnnnnnnnnnnnnnnnnnnnnnnnnnnnnnnnnnnnnnnnnnnnnnnnnnnnnnnnnnnnnnnnnnnnnnnnnnnnnnnnnnnnnnnnnnnnnnnnnnnnnnnnnnnnnnnnnnnnnnnnnnnnnnnnnnnnnnnnnnnnnnnnnnnnnnnnnnnnnnnnnnnnnnnnnnnnnnnnnnnnnnnnnnnnnnnnnnnnnnnnnnnnnnnnnnnnnnnnnnnnnnnnnnnnnnnnnnnnnnnnnnnnnnnnnnnnnnnnnnnnnnnnnnnnnnnnnnnnnnnnnnnnnnnnnnnnnnnnnnnnnnnnnnnnnnnnnnnnnnnnnnnnnnnnnnnnnnnnnnnnnnnnnnnnnnnnnnnnnnnnnnnnnnnnnnnnnnnnnnnnnnnnnnnnnnnnnnnnnnnnnnnnnnnnnnnnnnnnnnnnnnnnnnnnnnnnnnnnnnnnnnnnnnnnnnnnnnnnnnnnnnnnnnnnnnnnnnnnnnnnnnnnnnnnnnnnnnnnnnnnnnnnnnnnnnnnnnnnnnnnnnnnnnnnnnnnnnnnnnnnnnnnnnnnnnnnnnnnnnnnnnnnnnnnnnnnnnnnnnnnnnnnnnnnnnnnnnnnnnnnnnnnnnnnnnnnnnnnnnnnnnnnnnnnnnnnnnnnnnnnnnnnnnnnnnnnnnnnnnnnnnnnnnnnnnnnnnnnnnnnnnnnnnnnnnnnnnnnnnnnnnnnnnnnnnnnnnnnnnnnnnnnnnnnnnnnnnnnnnnnnnnnnnnnnnnnnnnnnnnnnnnnnnnnnnnnnnnnnnnnnnnnnnnnnnnnnnnnnnnnnnnnnnnnnnnnnnnnnnnnnnnnnnnnnnnnnnnnnnnnnnnnnnnnnnnnnnnnnnnnnnnnnnnnnnnnnnnnnnnnnnnnnnnnnnnnnnnnnnnnnnnnnnnnnnnnnnnnnnnnnnnnnnnnnnnnnnnnnnnnnnnnnnnnnnnnnnnnnnnnnnnnnnnnnnnnnnnnnnnnnnnnnnnnnnnnnnnnnnnnnnnnnnnnnnnnnnnnnnnnnnnnnnnnnnnnnnnnnnnnnnnnnnnnnnnnnnnnnnnnnnnnnnnnnnnnnnnnnnnnnnnnnnnnnnnnnnnnnnnnnnnnnnnnnnnnnnnnnnnnnnnnnnnnnnnnnnnnnnnnnnnnnnnnnnnnnnnnnnnnnnnnnnnnnnnnnnnnnnnnnnnnnnnnnnnnnnnnnnnnnnnnnnnnnnnnnnnnnnnnnnnnnnnnnnnnnnnnnnnnnnnnnnnnnnnnnnnnnnnnnnnnnnnnnnnnnnnnnnnnnnnnnnnnnnnnnnnnnnnnnnnnnnnnnnnnnnnnnnnnnnnnnnnnnnnnnnnnnnnnnnnnnnnnnnnnnnnnnnnnnnnnnnnnnnnnnnnnnnnnnnnnnnnnnnnnnnnnnnnnnnnnnnnnnnnnnnnnnnnnnnnnnnnnnnnnnnnnnnnnnnnnnnnnnnnnnnnnnnnnnnnnnnnnnnnnnnnnnnnnnnnnnnnnnnnnnnnnnnnnnnnnnnnnnnnnnnnnnnnnnnnnnnnnnnnnnnnnnnnnnnnnnnnnnnnnnnnnnnnnnnnnnnnnnnnnnnnnnnnnnnnnnnnnnnnnnnnnnnnnnnnnnnnnnnnnnnnnnnnnnnnnnnnnnnnnnnnnnnnnnnnnnnnnnnnnnnnnnnnnnnnnnnnnnnnnnnnnnnnnnnnnnnnnnnnnnnnnnnnnnnnnnnnnnnnnnnnnnnnnnnnnnnnnnnnnnnnnnnnnnnnnnnnnnnnnnnnnnnnnnnnnnnnnnnnnnnnnnnnnnnnnnnnnnnnnnnnnnnnnnnnnnnnnnnnnnnnnnnnnnnnnnnnnnnnnnnnnnnnnnnnnnnnnnnnnnnnnnnnnnnnnnnnnnnnnnnnnnnnnnnnnnnnnnnnnnnnnnnnnnnnnnnnnnnnnnnnnnnnnnnnnnnnnnnnnnnnnnnnnnnnnnnnnnnnnnnnnnnnnnnnnnnnnnnnnnnnnnnnnnnnnnnnnnnnnnnnnnnnnnnnnnnnnnnnnnnnnnnnnnnnnnnnnnnnnnnnnnnnnnnnnnnnnnnnnnnnnnnnnnnnnnnnnnnnnnnnnnnnnnnnnnnnnnnnnnnnnnnnnnnnnnnnnnnnnnnnnnnnnnnnnnnnnnnnnnnnnnnnnnnnnnnnnnnnnnnnnnnnnnnnnnnnnnnnnnnnnnnnnnnnnnnnnnnnnnnnnnnnnnnnnnnnnnnnnnnnnnnnnnnnnnnnnnnnnnnnnnnnnnnnnnnnnnnnnnnnnnnnnnnnnnnnnnnnnnnnnnnnnnnnnnnnnnnnnnnnnnnnnnnnnnnnnnnnnnnnnnnnnnnnnnnnnnnnnnnnnnnnnnnnnnnnnnnnnnnnnnnnnnnnnnnnnnnnnnnnnnnnnnnnnnnnnnnnnnnnnnnnnnnnnnnnnnnnnnnnnnnnnnnnnnnnnnnnnnnnnnnnnnnnnnnnnnnnnnnnnnnnnnnnnnnnnnnnnnnnnnnnnnnnnnnnnnnnnnnnnnnnnnnnnnnnnnnnnnnnnnnnnnnnnnnnnnnnnnnnnnnnnnnnnnnnnnnnnnnnnnnnnnnnnnnnnnnnnnnnnnnnnnnnnnnnnnnnnnnnnnnnnnnnnnnnnnnnnnnnnnnnnnnnnnnnnnnnnnnnnnnnnnnnnnnnnnnnnnnnnnnnnnnnnnnnnnnnnnnnnnnnnnnnnnnnnnnnnnnnnnnnnnnnnnnnnnnnnnnnnnnnnnnnnnnnnnnnnnnnnnnnnnnnnnnnnnnnnnnnnnnnnnnnnnnnnnnnnnnnnnnnnnnnnnnnnnnnnnnnnnnnnnnnnnnnnnnnnnnnnnnnnnnnnnnnnnnnnnnnnnnnnnnnnnnnnnnnnnnnnnnnnnnnnnnnnnnnnnnnnnnnnnnnnnnnnnnnnnnnnnnnnnnnnnnnnnnnnnnnnnnnnnnnnnnnnnnnnnnnnnnnnnnnnnnnnnnnnnnnnnnnnnnnnnnnnnnnnnnnnnnnnnnnnnnnnnnnnnnnnnnnnnnnnnnnnnnnnnnnnnnnnnnnnnnnnnnnnnnnnnnnnnnnnnnnnnnnnnnnnnnnnnnnnnnnnnnnnnnnnnnnnnnnnnnnnnnnnnnnnnnnnnnnnnnnnnnnnnnnnnnnnnnnnnnnnnnnnnnnnnnnnnnnnnnnnnnnnnnnnnnnnnnnnnnnnnnnnnnnnnnnnnnnnnnnnnnnnnnnnnnnnnnnnnnnnnnnnnnnnnnnnnnnnnnnnnnnnnnnnnnnnnnnnnnnnnnnnnnnnnnnnnnnnnnnnnnnnnnnnnnnnnnnnnnnnnnnnnnnnnnnnnnnnnnnnnnnnnnnnnnnnnnnnnnnnnnnnnnnnnnnnnnnnnnnnnnnnnnnnnnnnnnnnnnnnnnnnnnnnnnnnnnnnnnnnnnnnnnnnnnnnnnnnnnnnnnnnnnnnnnnnnnnnnnnnnnnnnnnnnnnnnnnnnnnnnnnnnnnnnnnnnnnnnnnnnnnnnnnnnnnnnnnnnnnnnnnnnnnnnnnnnnnnnnnnnnnnnnnnnnnnnnnnnnnnnnnnnnnnnnnnnnnnnnnnnnnnnnnnnnnnnnnnnnnnnnnnnnnnnnnnnnnnnnnnnnnnnnnnnnnnnnnnnnnnnnnnnnnnnnnnnnnnnnnnnnnnnnnnnnnnnnnnnnnnnnnnnnnnnnnnnnnnnnnnnnnnnnnnnnnnnnnnnnnnnnnnnnnnnnnnnnnnnnnnnnnnnnnnnnnnnnnnnnnnnnnnnnnnnnnnnnnnnnnnnnnnnnnnnnnnnnnnnnnnnnnnnnnnnnnnnnnnnnnnnnnnnnnnnnnnnnnnnnnnnnnnnnnnnnnnnnnnnnnnnnnnnnnnnnnnnnnnnnnnnnnnnnnnnnnnnnnnnnnnnnnnnnnnnnnnnnnnnnnnnnnnnnnnnnnnnnnnnnnnnnnnnnnnnnnnnnnnnnnnnnnnnnnnnnnnnnnnnnnnnnnnnnnnnnnnnnnnnnnnnnnnnnnnnnnnnnnnnnnnnnnnnnnnnnnnnnnnnnnnnnnnnnnnnnnnnnnnnnnnnnnnnnnnnnnnnnnnnnnnnnnnnnnnnnnnnnnnnnnnnnnnnnnnnnnnnnnnnnnnnnnnnnnnnnnnnnnnnnnnnnnnnnnnnnnnnnnnnnnnnnnnnnnnnnnnnnnnnnnnnnnnnnnnnnnnnnnnnnnnnnnnnnnnnnnnnnnnnnnnnnnnnnnnnnnnnnnnnnnnnnnnnnnnnnnnnnnnnnnnnnnnnnnnnnnnnnnnnnnnnnnnnnnnnnnnnnnnnnnnnnnnnnnnnnnnnnnnnnnnnnnnnnnnnnnnnnnnnnnnnnnnnnnnnnnnnnnnnnnnnnnnnnnnnnnnnnnnnnnnnnnnnnnnnnnnnnnnnnnnnnnnnnnnnnnnnnnnnnnnnnnnnnnnnnnnnnnnnnnnnnnnnnnnnnnnnnnnnnnnnnnnnnnnnnnnnnnnnnnnnnnnnnnnnnnnnnnnnnnnnnnnnnnnnnnnnnnnnnnnnnnnnnnnnnnnnnnnnnnnnnnnnnnnnnnnnnnnnnnnnnnnnnnnnnnnnnnnnnnnnnnnnnnnnnnnnnnnnnnnnnnnnnnnnnnnnnnnnnnnnnnnnnnnnnnnnnnnnnnnnnnnnnnnnnnnnnnnnnnnnnnnnnnnnnnnnnnnnnnnnnnnnnnnnnnnnnnnnnnnnnnnnnnnnnnnnnnnnnnnnnnnnnnnnnnnnnnnnnnnnnnnnnnnnnnnnnnnnnnnnnnnnnnnnnnnnnnnnnnnnnnnnnnnnnnnnnnnnnnnnnnnnnnnnnnnnnnnnnnnnnnnnnnnnnnnnnnnnnnnnnnnnnnnnnnnnnnnnnnnnnnnnnnnnnnnnnnnnnnnnnnnnnnnnnnnnnnnnnnnnnnnnnnnnnnnnnnnnnnnnnnnnnnnnnnnnnnnnnnnnnnnnnnnnnnnnnnnnnnnnnnnnnnnnnnnnnnnnnnnnnnnnnnnnnnnnnnnnnnnnnnnnnnnnnnnnnnnnnnnnnnnnnnnnnnnnnnnnnnnnnnnnnnnnnnnnnnnnnnnnnnnnnnnnnnnnnnnnnnnnnnnnnnnnnnnnnnnnnnnnnnnnnnnnnnnnnnnnnnnnnnnnnnnnnnnnnnnnnnnnnnnnnnnnnnnnnnnnnnnnnnnnnnnnnnnnnnnnnnnnnnnnnnnnnnnnnnnnnnnnnnnnnnnnnnnnnnnnnnnnnnnnnnnnnnnnnnnnnnnnnnnnnnnnnnnnnnnnnnnnnnnnnnnnnnnnnnnnnnnnnnnnnnnnnnnnnnnnnnnnnnnnnnnnnnnnnnnnnnnnnnnnnnnnnnnnnnnnnnnnnnnnnnnnnnnnnnnnnnnnnnnnnnnnnnnnnnnnnnnnnnnnnnnnnnnnnnnnnnnnnnnnnnnnnnnnnnnnnnnnnnnnnnnnnnnnnnnnnnnnnnnnnnnnnnnnnnnnnnnnnnnnnnnnnnnnnnnnnnnnnnnnnnnnnnnnnnnnnnnnnnnnnnnnnnnnnnnnnnnnnnnnnnnnnnnnnnnnnnnnnnnnnnnnnnnnnnnnnnnnnnnnnnnnnnnnnnnnnnnnnnnnnnnnnnnnnnnnnnnnnnnnnnnnnnnnnnnnnnnnnnnnnnnnnnnnnnnnnnnnnnnnnnnnnnnnnnnnnnnnnnnnnnnnnnnnnnnnnnnnnnnnnnnnnnnnnnnnnnnnnnnnnnnnnnnnnnnnnnnnnnnnnnnnnnnnnnnnnnnnnnnnnnnnnnnnnnnnnnnnnnnnnnnnnnnnnnnnnnnnnnnnnnnnnnnnnnnnnnnnnnnnnnnnnnnnnnnnnnnnnnnnnnnnnnnnnnnnnnnnnnnnnnnnnnnnnnnnnnnnnnnnnnnnnnnnnnnnnnnnnnnnnnnnnnnnnnnnnnnnnnnnnnnnnnnnnnnnnnnnnnnnnnnnnnnnnnnnnnnnnnnnnnnnnnnnnnnnnnnnnnnnnnnnnnnnnnnnnnnnnnnnnnnnnnnnnnnnnnnnnnnnnnnnnnnnnnnnnnnnnnnnnnnnnnnnnnnnnnnnnnnnnnnnnnnnnnnnnnnnnnnnnnnnnnnnnnnnnnnnnnnnnnnnnnnnnnnnnnnnnnnnnnnnnnnnnnnnnnnnnnnnnnnnnnnnnnnnnnnnnnnnnnnnnnnnnnnnnnnnnnnnnnnnnnnnnnnnnnnnnnnnnnnnnnnnnnnnnnnnnnnnnnnnnnnnnnnnnnnnnnnnnnnnnnnnnnnnnnnnnnnnnnnnnnnnnnnnnnnnnnnnnnnnnnnnnnnnnnnnnnnnnnnnnnnnnnnnnnnnnnnnnnnnnnnnnnnnnnnnnnnnnnnnnnnnnnnnnnnnnnnnnnnnnnnnnnnnnnnnnnnnnnnnnnnnnnnnnnnnnnnnnnnnnnnnnnnnnnnnnnnnnnnnnnnnnnnnnnnnnnnnnnnnnnnnnnnnnnnnnnnnnnnnnnnnnnnnnnnnnnnnnnnnnnnnnnnnnnnnnnnnnnnnnnnnnnnnnnnnnnnnnnnnnnnnnnnnnnnnnnnnnnnnnnnnnnnnnnnnnnnnnnnnnnnnnnnnnnnnnnnnnnnnnnnnnnnnnnnnnnnnnnnnnnnnnnnnnnnnnnnnnnnnnnnnnnnnnnnnnnnnnnnnnnnnnnnnnnnnnnnnnnnnnnnnnnnnnnnnnnnnnnnnnnnnnnnnnnnnnnnnnnnnnnnnnnnnnnnnnnnnnnnnnnnnnnnnnnnnnnnnnnnnnnnnnnnnnnnnnnnnnnnnnnnnnnnnnnnnnnnnnnnnnnnnnnnnnnnnnnnnnnnnnnnnnnnnnnnnnnnnnnnnnnnnnnnnnnnnnnnnnnnnnnnnnnnnnnnnnnnnnnnnnnnnnnnnnnnnnnnnnnnnnnnnnnnnnnnnnnnnnnnnnnnnnnnnnnnnnnnnnnnnnnnnnnnnnnnnnnnnnnnnnnnnnnnnnnnnnnnnnnnnnnnnnnnnnnnnnnnnnnnnnnnnnnnnnnnnnnnnnnnnnnnnnnnnnnnnnnnnnnnnnnnnnnnnnnnnnnnnnnnnnnnnnnnnnnnnnnnnnnnnnnnnnnnnnnnnnnnnnnnnnnnnnnnnnnnnnnnnnnnnnnnnnnnnnnnnnnnnnnnnnnnnnnnnnnnnnnnnnnnnnnnnnnnnnnnnnnnnnnnnnnnnnnnnnnnnnnnnnnnnnnnnnnnnnnnnnnnnnnnnnnnnnnnnnnnnnnnnnnnnnnnnnnnnnnnnnnnnnnnnnnnnnnnnnnnnnnnnnnnnnnnnnnnnnnnnnnnnnnnnnnnnnnnnnnnnnnnnnnnnnnnnnnnnnnnnnnnnnnnnnnnnnnnnnnnnnnnnnnnnnnnnnnnnnnnnnnnnnnnnnnnnnnnnnnnnnnnnnnnnnnnnnnnnnnnnnnnnnnnnnnnnnnnnnnnnnnnnnnnnnnnnnnnnnnnnnnnnnnnnnnnnnnnnnnnnnnnnnnnnnnnnnnnnnnnnnnnnnnnnnnnnnnnnnnnnnnnnnnnnnnnnnnnnnnnnnnnnnnnnnnnnnnnnnnnnnnnnnnnnnnnnnnnnnnnnnnnnnnnnnnnnnnnnnnnnnnnnnnnnnnnnnnnnnnnnnnnnnnnnnnnnnnnnnnnnnnnnnnnnnnnnnnnnnnnnnnnnnnnnnnnnnnnnnnnnnnnnnnnnnnnnnnnnnnnnnnnnnnnnnnnnnnnnnnnnnnnnnnnnnnnnnnnnnnnnnnnnnnnnnnnnnnnnnnnnnnnnnnnnnnnnnnnnnnnnnnnnnnnnnnnnnnnnnnnnnnnnnnnnnnnnnnnnnnnnnnnnnnnnnnnnnnnnnnnnnnnnnnnnnnnnnnnnnnnnnnnnnnnnnnnnnnnnnnnnnnnnnnnnnnnnnnnnnnnnnnnnnnnnnnnnnnnnnnnnnnnnnnnnnnnnnnnnnnnnnnnnnnnnnnnnnnnnnnnnnnnnnnnnnnnnnnnnnnnnnnnnnnnnnnnnnnnnnnnnnnnnnnnnnnnnnnnnnnnnnnnnnnnnnnnnnnnnnnnnnnnnnnnnnnnnnnnnnnnnnnnnnnnnnnnnnnnnnnnnnnnnnnnnnnnnnnnnnnnnnnnnnnnnnnnnnnnnnnnnnnnnnnnnnnnnnnnnnnnnnnnnnnnnnnnnnnnnnnnnnnnnnnnnnnnnnnnnnnnnnnnnnnnnnnnnnnnnnnnnnnnnnnnnnnnnnnnnnnnnnnnnnnnnnnnnnnnnnnnnnnnnnnnnnnnnnnnnnnnnnnnnnnnnnnnnnnnnnnnnnnnnnnnnnnnnnnnnnnnnnnnnnnnnnnnnnnnnnnnnnnnnnnnnnnnnnnnnnnnnnnnnnnnnnnnnnnnnnnnnnnnnnnnnnnnnnnnnnnnnnnnnnnnnnnnnnnnnnnnnnnnnnnnnnnnnnnnnnnnnnnnnnnnnnnnnnnnnnnnnnnnnnnnnnnnnnnnnnnnnnnnnnnnnnnnnnnnnnnnnnnnnnnnnnnnnnnnnnnnnnnnnnnnnnnnnnnnnnnnnnnnnnnnnnnnnnnnnnnnnnnnnnnnnnnnnnnnnnnnnnnnnnnnnnnnnnnnnnnnnnnnnnnnnnnnnnnnnnnnnnnnnnnnnnnnnnnnnnnnnnnnnnnnnnnnnnnnnnnnnnnnnnnnnnnnnnnnnnnnnnnnnnnnnnnnnnnnnnnnnnnnnnnnnnnnnnnnnnnnnnnnnnnnnnnnnnnnnnnnnnnnnnnnnnnnnnnnnnnnnnnnnnnnnnnnnnnnnnnnnnnnnnnnnnnnnnnnnnnnnnnnnnnnnnnnnnnnnnnnnnnnnnnnnnnnnnnnnnnnnnnnnnnnnnnnnnnnnnnnnnnnnnnnnnnnnnnnnnnnnnnnnnnnnnnnnnnnnnnnnnnnnnnnnnnnnnnnnnnnnnnnnnnnnnnnnnnnnnnnnnnnnnnnnnnnnnnnnnnnnnnnnnnnnnnnnnnnnnnnnnnnnnnnnnnnnnnnnnnnnnnnnnnnnnnnnnnnnnnnnnnnnnnnnnnnnnnnnnnnnnnnnnnnnnnnnnnnnnnnnnnnnnnnnnnnnnnnnnnnnnnnnnnnnnnnnnnnnnnnnnnnnnnnnnnnnnnnnnnnnnnnnnnnnnnnnnnnnnnnnnnnnnnnnnnnnnnnnnnnnnnnnnnnnnnnnnnnnnnnnnnnnnnnnnnnnnnnnnnnnnnnnnnnnnnnnnnnnnnnnnnnnnnnnnnnnnnnnnnnnnnnnnnnnnnnnnnnnnnnnnnnnnnnnnnnnnnnnnnnnnnnnnnnnnnnnnnnnnnnnnnnnnnnnnnnnnnnnnnnnnnnnnnnnnnnnnnnnnnnnnnnnnnnnnnnnnnnnnnnnnnnnnnnnnnnnnnnnnnnnnnnnnnnnnnnnnnnnnnnnnnnnnnnnnnnnnnnnnnnnnnnnnnnnnnnnnnnnnnnnnnnnnnnnnnnnnnnnnnnnnnnnnnnnnnnnnnnnnnnnnnnnnnnnnnnnnnnnnnnnnnnnnnnnnnnnnnnnnnnnnnnnnnnnnnnnnnnnnnnnnnnnnnnnnnnnnnnnnnnnnnnnnnnnnnnnnnnnnnnnnnnnnnnnnnnnnnnnnnnnnnnnnnnnnnnnnnnnnnnnnnnnnnnnnnnnnnnnnnnnnnnnnnnnnnnnnnnnnnnnnnnnnnnnnnnnnnnnnnnnnnnnnnnnnnnnnnnnnnnnnnnnnnnnnnnnnnnnnnnnnnnnnnnnnnnnnnnnnnnnnnnnnnnnnnnnnnnnnnnnnnnnnnnnnnnnnnnnnnnnnnnnnnnnnnnnnnnnnnnnnnnnnnnnnnnnnnnnnnnnnnnnnnnnnnnnnnnnnnnnnnnnnnnnnnnnnnnnnnnnnnnnnnnnnnnnnnnnnnnnnnnnnnnnnnnnnnnnnnnnnnnnnnnnnnnnnnnnnnnnnnnnnnnnnnnnnnnnnnnnnnnnnnnnnnnnnnnnnnnnnnnnnnnnnnnnnnnnnnnnnnnnnnnnnnnnnnnnnnnnnnnnnnnnnnnnnnnnnnnnnnnnnnnnnnnnnnnnnnnnnnnnnnnnnnnnnnnnnnnnnnnnnnnnnnnnnnnnnnnnnnnnnnnnnnnnnnnnnnnnnnnnnnnnnnnnnnnnnnnnnnnnnnnnnnnnnnnnnnnnnnnnnnnnnnnnnnnnnnnnnnnnnnnnnnnnnnnnnnnnnnnnnnnnnnnnnnnnnnnnnnnnnnnnnnnnnnnnnnnnnnnnnnnnnnnnnnnnnnnnnnnnnnnnnnnnnnnnnnnnnnnnnnnnnnnnnnnnnnnnnnnnnnnnnnnnnnnnnnnnnnnnnnnnnnnnnnnnnnnnnnnnnnnnnnnnnnnnnnnnnnnnnnnnnnnnnnnnnnnnnnnnnnnnnnnnnnnnnnnnnnnnnnnnnnnnnnnnnnnnnnnnnnnnnnnnnnnnnnnnnnnnnnnnnnnnnnnnnnnnnnnnnnnnnnnnnnnnnnnnnnnnnnnnnnnnnnnnnnnnnnnnnnnnnnnnnnnnnnnnnnnnnnnnnnnnnnnnnnnnnnnnnnnnnnnnnnnnnnnnnnnnnnnnnnnnnnnnnnnnnnnnnnnnnnnnnnnnnnnnnnnnnnnnnnnnnnnnnnnnnnnnnnnnnnnnnnnnnnnnnnnnnnnnnnnnnnnnnnnnnnnnnnnnnnnnnnnnnnnnnnnnnnnnnnnnnnnnnnnnnnnnnnnnnnnnnnnnnnnnnnnnnnnnnnnnnnnnnnnnnnnnnnnnnnnnnnnnnnnnnnnnnnnnnnnnnnnnnnnnnnnnnnnnnnnnnnnnnnnnnnnnnnnnnnnnnnnnnnnnnnnnnnnnnnnnnnnnnnnnnnnnnnnnnnnnnnnnnnnnnnnnnnnnnnnnnnnnnnnnnnnnnnnnnnnnnnnnnnnnnnnnnnnnnnnnnnnnnnnnnnnnnnnnnnnnnnnnnnnnnnnnnnnnnnnnnnnnnnnnnnnnnnnnnnnnnnnnnnnnnnnnnnnnnnnnnnnnnnnnnnnnnnnnnnnnnnnnnnnnnnnnnnnnnnnnnnnnnnnnnnnnnnnnnnnnnnnnnnnnnnnnnnnnnnnnnnnnnnnnnnnnnnnnnnnnnnnnnnnnnnnnnnnnnnnnnnnnnnnnnnnnnnnnnnnnnnnnnnnnnnnnnnnnnnnnnnnnnnnnnnnnnnnnnnnnnnnnnnnnnnnnnnnnnnnnnnnnnnnnnnnnnnnnnnnnnnnnnnnnnnnnnnnnnnnnnnnnnnnnnnnnnnnnnnnnnnnnnnnnnnnnnnnnnnnnnnnnnnnnnnnnnnnnnnnnnnnnnnnnnnnnnnnnnnnnnnnnnnnnnnnnnnnnnnnnnnnnnnnnnnnnnnnnnnnnnnnnnnnnnnnnnnnnnnnnnnnnnnnnnnnnnnnnnnnnnnnnnnnnnnnnnnnnnnnnnnnnnnnnnnnnnnnnnnnnnnnnnnnnnnnnnnnnnnnnnnnnnnnnnnnnnnnnnnnnnnnnnnnnnnnnnnnnnnnnnnnnnnnnnnnnnnnnnnnnnnnnnnnnnnnnnnnnnnnnnnnnnnnnnnnnnnnnnnnnnnnnnnnnnnnnnnnnnnnnnnnnnnnnnnnnnnnnnnnnnnnnnnnnnnnnnnnnnnnnnnnnnnnnnnnnnnnnnnnnnnnnnnnnnnnnnnnnnnnnnnnnnnnnnnnnnnnnnnnnnnnnnnnnnnnnnnnnnnnnnnnnnnnnnnnnnnnnnnnnnnnnnnnnnnnnnnnnnnnnnnnnnnnnnnnnnnnnnnnnnnnnnnnnnnnnnnnnnnnnnnnnnnnnnnnnnnnnnnnnnnnnnnnnnnnnnnnnnnnnnnnnnnnnnnnnnnnnnnnnnnnnnnnnnnnnnnnnnnnnnnnnnnnnnnnnnnnnnnnnnnnnnnnnnnnnnnnnnnnnnnnnnnnnnnnnnnnnnnnnnnnnnnnnnnnnnnnnnnnnnnnnnnnnnnnnnnnnnnnnnnnnnnnnnnnnnnnnnnnnnnnnnnnnnnnnnnnnnnnnnnnnnnnnnnnnnnnnnnnnnnnnnnnnnnnnnnnnnnnnnnnnnnnnnnnnnnnnnnnnnnnnnnnnnnnnnnnnnnnnnnnnnnnnnnnnnnnnnnnnnnnnnnnnnnnnnnnnnnnnnnnnnnnnnnnnnnnnnnnnnnnnnnnnnnnnnnnnnnnnnnnnnnnnnnnnnnnnnnnnnnnnnnnnnnnnnnnnnnnnnnnnnnnnnnnnnnnnnnnnnnnnnnnnnnnnnnnnnnnnnnnnnnnnnnnnnnnnnnnnnnnnnnnnnnnnnnnnnnnnnnnnnnnnnnnnnnnnnnnnnnnnnnnnnnnnnnnnnnnnnnnnnnnnnnnnnnnnnnnnnnnnnnnnnnnnnnnnnnnnnnnnnnnnnnnnnnnnnnnnnnnnnnnnnnnnnnnnnnnnnnnnnnnnnnnnnnnnnnnnnnnnnnnnnnnnnnnnnnnnnnnnnnnnnnnnnnnnnnnnnnnnnnnnnnnnnnnnnnnnnnnnnnnnnnnnnnnnnnnnnnnnnnnnnnnnnnnnnnnnnnnnnnnnnnnnnnnnnnnnnnnnnnnnnnnnnnnnnnnnnnnnnnnnnnnnnnnnnnnnnnnnnnnnnnnnnnnnnnnnnnnnnnnnnnnnnnnnnnnnnnnnnnnnnnnnnnnnnnnnnnnnnnnnnnnnnnnnnnnnnnnnnnnnnnnnnnnnnnnnnnnnnnnnnnnnnnnnnnnnnnnnnnnnnnnnnnnnnnnnnnnnnnnnnnnnnnnnnnnnnnnnnnnnnnnnnnnnnnnnnnnnnnnnnnnnnnnnnnnnnnnnnnnnnnnnnnnnnnnnnnnnnnnnnnnnnnnnnnnnnnnnnnnnnnnnnnnnnnnnnnnnnnnnnnnnnnnnnnnnnnnnnnnnnnnnnnnnnnnnnnnnnnnnnnnnnnnnnnnnnnnnnnnnnnnnnnnnnnnnnnnnnnnnnnnnnnnnnnnnnnnnnnnnnnnnnnnnnnnnnnnnnnnnnnnnnnnnnnnnnnnnnnnnnnnnnnnnnnnnnnnnnnnnnnnnnnnnnnnnnnnnnnnnnnnnnnnnnnnnnnnnnnnnnnnnnnnnnnnnnnnnnnnnnnnnnnnnnnnnnnnnnnnnnnnnnnnnnnnnnnnnnnnnnnnnnnnnnnnnnnnnnnnnnnnnnnnnnnnnnnnnnnnnnnnnnnnnnnnnnnnnnnnnnnnnnnnnnnnnnnnnnnnnnnnnnnnnnnnnnnnnnnnnnnnnnnnnnnnnnnnnnnnnnnnnnnnnnnnnnnnnnnnnnnnnnnnnnnnnnnnnnnnnnnnnnnnnnnnnnnnnnnnnnnnnnnnnnnnnnnnnnnnnnnnnnnnnnnnnnnnnnnnnnnnnnnnnnnnnnnnnnnnnnnnnnnnnnnnnnnnnnnnnnnnnnnnnnnnnnnnnnnnnnnnnnnnnnnnnnnnnnnnnnnnnnnnnnnnnnnnnnnnnnnnnnnnnnnnnnnnnnnnnnnnnnnnnnnnnnnnnnnnnnnnnnnnnnnnnnnnnnnnnnnnnnnnnnnnnnnnnnnnnnnnnnnnnnnnnnnnnnnnnnnnnnnnnnnnnnnnnnnnnnnnnnnnnnnnnnnnnnnnnnnnnnnnnnnnnnnnnnnnnnnnnnnnnnnnnnnnnnnnnnnnnnnnnnnnnnnnnnnnnnnnnnnnnnnnnnnnnnnnnnnnnnnnnnnnnnnnnnnnnnnnnnnnnnnnnnnnnnnnnnnnnnnnnnnnnnnnnnnnnnnnnnnnnnnnnnnnnnnnnnnnnnnnnnnnnnnnnnnnnnnnnnnnnnnnnnnnnnnnnnnnnnnnnnnnnnnnnnnnnnnnnnnnnnnnnnnnnnnnnnnnnnnnnnnnnnnnnnnnnnnnnnnnnnnnnnnnnnnnnnnnnnnnnnnnnnnnnnnnnnnnnnnnnnnnnnnnnnnnnnnnnnnnnnnnnnnnnnnnnnnnnnnnnnnnnnnnnnnnnnnnnnnnnnnnnnnnnnnnnnnnnnnnnnnnnnnnnnnnnnnnnnnnnnnnnnnnnnnnnnnnnnnnnnnnnnnnnnnnnnnnnnnnnnnnnnnnnnnnnnnnnnnnnnnnnnnnnnnnnnnnnnnnnnnnnnnnnnnnnnnnnnnnnnnnnnnnnnnnnnnnnnnnnnnnnnnnnnnnnnnnnnnnnnnnnnnnnnnnnnnnnnnnnnnnnnnnnnnnnnnnnnnnnnnnnnnnnnnnnnnnnnnnnnnnnnnnnnnnnnnnnnnnnnnnnnnnnnnnnnnnnnnnnnnnnnnnnnnnnnnnnnnnnnnnnnnnnnnnnnnnnnnnnnnnnnnnnnnnnnnnnnnnnnnnnnnnnnnnnnnnnnnnnnnnnnnnnnnnnnnnnnnnnnnnnnnnnnnnnnnnnnnnnnnnnnnnnnnnnnnnnnnnnnnnnnnnnnnnnnnnnnnnnnnnnnnnnnnnnnnnnnnnnnnnnnnnnnnnnnnnnnnnnnnnnnnnnnnnnnnnnnnnnnnnnnnnnnnnnnnnnnnnnnnnnnnnnnnnnnnnnnnnnnnnnnnnnnnnnnnnnnnnnnnnnnnnnnnnnnnnnnnnnnnnnnnnnnnnnnnnnnnnnnnnnnnnnnnnnnnnnnnnnnnnnnnnnnnnnnnnnnnnnnnnnnnnnnnnnnnnnnnnnnnnnnnnnnnnnnnnnnnnnnnnnnnnnnnnnnnnnnnnnnnnnnnnnnnnnnnnnnnnnnnnnnnnnnnnnnnnnnnnnnnnnnnnnnnnnnnnnnnnnnnnnnnnnnnnnnnnnnnnnnnnnnnnnnnnnnnnnnnnnnnnnnnnnnnnnnnnnnnnnnnnnnnnnnnnnnnnnnnnnnnnnnnnnnnnnnnnnnnnnnnnnnnnnnnnnnnnnnnnnnnnnnnnnnnnnnnnnnnnnnnnnnnnnnnnnnnnnnnnnnnnnnnnnnnnnnnnnnnnnnnnnnnnnnnnnnnnnnnnnnnnnnnnnnnnnnnnnnnnnnnnnnnnnnnnnnnnnnnnnnnnnnnnnnnnnnnnnnnnnnnnnnnnnnnnnnnnnnnnnnnnnnnnnnnnnnnnnnnnnnnnnnnnnnnnnnnnnnnnnnnnnnnnnnnnnnnnnnnnnnnnnnnnnnnnnnnnnnnnnnnnnnnnnnnnnnnnnnnnnnnnnnnnnnnnnnnnnnnnnnnnnnnnnnnnnnnnnnnnnnnnnnnnnnnnnnnnnnnnnnnnnnnnnnnnnnnnnnnnnnnnnnnnnnnnnnnnnnnnnnnnnnnnnnnnnnnnnnnnnnnnnnnnnnnnnnnnnnnnnnnnnnnnnnnnnnnnnnnnnnnnnnnnnnnnnnnnnnnnnnnnnnnnnnnnnnnnnnnnnnnnnnnnnnnnnnnnnnnnnnnnnnnnnnnnnnnnnnnnnnnnnnnnnnnnnnnnnnnnnnnnnnnnnnnnnnnnnnnnnnnnnnnnnnnnnnnnnnnnnnnnnnnnnnnnnnnnnnnnnnnnnnnnnnnnnnnnnnnnnnnnnnnnnnnnnnnnnnnnnnnnnnnnnnnnnnnnnnnnnnnnnnnnnnnnnnnnnnnnnnnnnnnnnnnnnnnnnnnnnnnnnnnnnnnnnnnnnnnnnnnnnnnnnnnnnnnnnnnnnnnnnnnnnnnnnnnnnnnnnnnnnnnnnnnnnnnnnnnnnnnnnnnnnnnnnnnnnnnnnnnnnnnnnnnnnnnnnnnnnnnnnnnnnnnnnnnnnnnnnnnnnnnnnnnnnnnnnnnnnnnnnnnnnnnnnnnnnnnnnnnnnnnnnnnnnnnnnnnnnnnnnnnnnnnnnnnnnnnnnnnnnnnnnnnnnnnnnnnnnnnnnnnnnnnnnnnnnnnnnnnnnnnnnnnnnnnnnnnnnnnnnnnnnnnnnnnnnnnnnnnnnnnnnnnnnnnnnnnnnnnnnnnnnnnnnnnnnnnnnnnnnnnnnnnnnnnnnnnnnnnnnnnnnnnnnnnnnnnnnnnnnnnnnnnnnnnnnnnnnnnnnnnnnnnnnnnnnnnnnnnnnnnnnnnnnnnnnnnnnnnnnnnnnnnnnnnnnnnnnnnnnnnnnnnnnnnnnnnnnnnnnnnnnnnnnnnnnnnnnnnnnnnnnnnnnnnnnnnnnnnnnnnnnnnnnnnnnnnnnnnnnnnnnnnnnnnnnnnnnnnnnnnnnnnnnnnnnnnnnnnnnnnnnnnnnnnnnnnnnnnnnnnnnnnnnnnnnnnnnnnnnnnnnnnnnnnnnnnnnnnnnnnnnnnnnnnnnnnnnnnnnnnnnnnnnnnnnnnnnnnnnnnnnnnnnnnnnnnnnnnnnnnnnnnnnnnnnnnnnnnnnnnnnnnnnnnnnnnnnnnnnnnnnnnnnnnnnnnnnnnnnnnnnnnnnnnnnnnnnnnnnnnnnnnnnnnnnnnnnnnnnnnnnnnnnnnnnnnnnnnnnnnnnnnnnnnnnnnnnnnnnnnnnnnnnnnnnnnnnnnnnnnnnnnnnnnnnnnnnnnnnnnnnnnnnnnnnnnnnnnnnnnnnnnnnnnnnnnnnnnnnnnnnnnnnnnnnnnnnnnnnnnnnnnnnnnnnnnnnnnnnnnnnnnnnnnnnnnnnnnnnnnnnnnnnnnnnnnnnnnnnnnnnnnnnnnnnnnnnnnnnnnnnnnnnnnnnnnnnnnnnnnnnnnnnnnnnnnnnnnnnnnnnnnnnnnnnnnnnnnnnnnnnnnnnnnnnnnnnnnnnnnnnnnnnnnnnnnnnnnnnnnnnnnnnnnnnnnnnnnnnnnnnnnnnnnnnnnnnnnnnnnnnnnnnnnnnnnnnnnnnnnnnnnnnnnnnnnnnnnnnnnnnnnnnnnnnnnnnnnnnnnnnnnnnnnnnnnnnnnnnnnnnnnnnnnnnnnnnnnnnnnnnnnnnnnnnnnnnnnnnnnnnnnnnnnnnnnnnnnnnnnnnnnnnnnnnnnnnnnnnnnnnnnnnnnnnnnnnnnnnnnnnnnnnnnnnnnnnnnnnnnnnnnnnnnnnnnnnnnnnnnnnnnnnnnnnnnnnnnnnnnnnnnnnnnnnnnnnnnnnnnnnnnnnnnnnnnnnnnnnnnnnnnnnnnnnnnnnnnnnnnnnnnnnnnnnnnnnnnnnnnnnnnnnnnnnnnnnnnnnnnnnnnnnnnnnnnnnnnnnnnnnnnnnnnnnnnnnnnnnnnnnnnnnnnnnnnnnnnnnnnnnnnnnnnnnnnnnnnnnnnnnnnnnnnnnnnnnnnnnnnnnnnnnnnnnnnnnnnnnnnnnnnnnnnnnnnnnnnnnnnnnnnnnnnnnnnnnnnnnnnnnnnnnnnnnnnnnnnnnnnnnnnnnnnnnnnnnnnnnnnnnnnnnnnnnnnnnnnnnnnnnnnnnnnnnnnnnnnnnnnnnnnnnnnnnnnnnnnnnnnnnnnnnnnnnnnnnnnnnnnnnnnnnnnnnnnnnnnnnnnnnnnnnnnnnnnnnnnnnnnnnnnnnnnnnnnnnnnnnnnnnnnnnnnnnnnnnnnnnnnnnnnnnnnnnnnnnnnnnnnnnnnnnnnnnnnnnnnnnnnnnnnnnnnnnnnnnnnnnnnnnnnnnnnnnnnnnnnnnnnnnnnnnnnnnnnnnnnnnnnnnnnnnnnnnnnnnnnnnnnnnnnnnnnnnnnnnnnnnnnnnnnnnnnnnnnnnnnnnnnnnnnnnnnnnnnnnnnnnnnnnnnnnnnnnnnnnnnnnnnnnnnnnnnnnnnnnnnnnnnnnnnnnnnnnnnnnnnnnnnnnnnnnnnnnnnnnnnnnnnnnnnnnnnnnnnnnnnnnnnnnnnnnnnnnnnnnnnnnnnnnnnnnnnnnnnnnnnnnnnnnnnnnnnnnnnnnnnnnnnnnnnnnnnnnnnnnnnnnnnnnnnnnnnnnnnnnnnnnnnnnnnnnnnnnnnnnnnnnnnnnnnnnnnnnnnnnnnnnnnnnnnnnnnnnnnnnnnnnnnnnnnnnnnnnnnnnnnnnnnnnnnnnnnnnnnnnnnnnnnnnnnnnnnnnnnnnnnnnnnnnnnnnnnnnnnnnnnnnnnnnnnnnnnnnnnnnnnnnnnnnnnnnnnnnnnnnnnnnnnnnnnnnnnnnnnnnnnnnnnnnnnnnnnnnnnncgaaaaagccaaccagcagctcctatacggtattttcggtgacgcgaactgggcaaacaaagaaaaacttcctgattcgctacttaccaacctcatcgaacacttttcccaatacaatctgtcaaacgaggcagtcgaacccgacgttctcggtaaagcgtatgaatatctgattagccaatttgccgaccttactaataaaaaggcgggtgaattttacacgccacgttcggttgtccatttgatcgggctcattatcgatgtccaagaaggtgaatccgtttacgatcctgcctgcggaaccggtggtatgctgctggagagtatcgagcacttgcggcgaaccaaccgggattaccgaacgctcaaaatgtacggtcaggaaaaaaacttgacgacttccaccattgctcgcatcaatatgtacctgcacggcatcgaggatttccgaatcgagcgtggcgatacgctgcgtcaaccggcattcgttgaaaacgatcaactccagcaattcgattgtgttgttgccaatccgcccttctctttaaaagaatggggtgcggagcaatgggtgaatgatccctacggacgtaacatcgccggtgtgccaccgaagggaaatggggatatggcttgggtacaacacatgattcaatccatgaaacccgataccgggcgaatggctgtcgtgttacctcatggtgcgctctttcgaaagggtgcggaaggtcgtatccgtcaaaaactgattgatagcgatcggttggatactataatcggactgggagctaatgtattttatggagcgacacttgcggcttgtattctgattttccgggcgaagaaacccaagcaacgaaaacggaaggtgctgtttatcgatgcgtccgatcaaatcagagtcggtagagcacaaaatttcctggaagcacagcatgtcgaaacaatctataaatggtatcgtgagtacaaatcacttcctgatcatgtacgagtcgtcgataatgaagagatcgtaacgaaagagtacaacctcaatattccgctctatattgagaaaaccatagtcgacaacctcccttcgatggaagaggcgattgccgaactcgaaattgcagcacaagcggcatggcaagctgaagatcgctttaaagagttgctcatggaattcgggttgctatcatgatgaaacgcaaggagctggaaagttatctttggggtgcagcgacctatctgcgcggccatatcgatgccggtgattacaagcagtttattttccctctgttgttttacaagcgaatttgtgatgtttacgacgaggagtaccagcaagcattagccgagagtggcggtgacctggagtatgcatccttcgccgaaaatcaccggtttcaggtgccgaaagggtcgcattggaatgatgtccgctcggtgactcgaaatgttggcgaagcgctacagaagggtatgcgcgaattagagaaagcgaatcaggaacaattattcggaatattcggagatgcatcgtggacgaataaggatcggttgaacaatgagacgctcaccaacctaatcgagcatttcagtcagcatagtctcagcatcggtaatgtcccccaagatgaacttggtgatgcctacgagtttctgattaagaaattcgccgacgacagcgggcataccgccgcggaattttataccaaccgtaccgtcgttcggttaatgacgttaatttccgacccgcaaccgggagagagtgtgtacgacccaacttgcggttccggcgggttgttattgaactgtgcgctccagttgaaagacacgggtaaggaataccggacgctgaaattgtacggacaagagatcaacctgattacttcctcaattgctcgtatgaatatgtttatgcacggtatcgaggattttcagattgttcgcggcaatactctcagcaaccccgcgtttctggaaaacgaccgactgaagacattcaacgtgatacttgccaatcctccatacagtatcaaggcatgggatcagaaagcatttgcgagcgatccattcggcagaaatatctgggggacgcctcctcagggatatgccgattacgtattccaacaacacatccatacatctctcgatcctgacaacgggaggtgtgttattctttggccggatggtattctctatagagatgccgaatctgctatccgccgtaaaatgatagaaagtgatgtggtggaatgtgtgatcggtttgggaccgaatctcttctataactcaccaatggagagttatctcctgatctgtaggaacaataaaccgaaaacgcggcaaggaaaaattctctttatcaatgccgtgaaagaagttcataaagaaaaagcgacgagttacttggaagagaaacacattcagaagattttcaatacatatcatgactaccaaacgatagacggcttcagcaaggttatatcggttgaaggtgtgcttgataagaaagctaatttgaacattacgctttacaccggatcaatgcagaaaaccggtaatggtgagaacttacacgatgcaattgatcaatggaatagtagcgcagatgaattacgacagtcgattcaaaagctgatagcgaaactacagtgaagcaaacattcgacaagcaaggttggaaacgaatcaagttcggtgaagtatgccgcaacttgaatattgccgagcgtgatccattatcgaatgggatcgaccgatttgttggattggagcatatcgaaccggaaaacctacatcttaagtcgtggggcaatatcgctgatggtataactttttcgaaacgattcaaacccggtcaagtactgttcggtaaacgtcgttcgtatcagaaaaaagttgcgtttgcagagttcgatggaatttgttctagtgatattctggtcttagaagccaatgagaaacgaatcgaaccaagtttgttccctttcttattacagagtgagcggttcttggagcatgcggttaatacatcggctggggctctttcacctcgaacaaagtttcaagaccttgctcaattcgagttcctccttcccccaaaagaacaacaagcgaaaatcgctgaattgttgtgggcagcggataacgccacacaaaaggcaatatcgttggtaaatgggctaggagaacttctaaaactctcatcagatctaatttttgaaacatacacaaagaaaccaactattaataacgtcagaaatttggatgggtatcaagagtgtcccgtaacggatttgttaagcacaaaactgcttaatggaatttataaatcaaaagaatatcttgggcatgggataaaattggtaaatatgggagaattattcgcttatcctaaactgtataacccggatatgcaaagaatcacgttaagcgataaagaggaaaaacaattcttacttcaaaaaggcgacttacttttcgctagacgttcgttagtcatcgaaggagctggtaagtgttcgattgtgatgactgatgaagagaaaatgacttttgaatcttcgattatcagactacggctcaacacaaaattaatactcccaatgtactgccattattttttccggtcttctgagggtgtaaaaagaataaagagaatagtcggatatacaactgttgccggtattactggatcagatctctacaatatttcagtaccggttatcgaaaaaaaagaacaagaaaaatgtgtcgaaaatttgggcagaatcgaagagttaattactgaagccaaaaaccatgttaccaaaactgagaatgtaatcaagaatttaattcacaaggtgttctaatatgccttttaccgaaatgaatagcgtcgaacatttcattgtgcaacaactcaccggtgtcaatctgaatgccggtgatggggttgtttcatctccagacactggtcgtcacgtctggcgctatatgcctaccgacacactcgaccgcgagattactgaagttcttgttgaaagcgagctaaaacaggcactaattcggatcaaccctgaaatcgccgaacaacccgaccgcgccgacgaattgattcacaaactacgcgccatcctcatcacagtaaataatgtgggattagtaaagtcaaatgaagagtttgccaagtggtacaagggtgagattacgatgccgttcggcatcgacggtaagcacgttggtgtaaacctaatcgactttgatcatcctgaaaacaactcctatatcttgactaaccagttcaaaattcgtgcccgcgagaccaagattcccgatatcgttctgttcataaacggcattccggtagtagtcggcgaagcgaaaacgccagtacgaccggcagtaacatgggtcgatggtgcgcacgaaatccatgcggtttacgagaatactgtcccgaatctgtttgtacccaacatcctcagtttcgctaccgacggtcgcgatttcttctatggtgccgttcgcacaccacttgaattttggtgcccatggcgattggatgaatccaatagtactcttgcacttttttccggactgaatgaagtcggtaaacaactcaacagtttgttacgaccggaaactttgctcgatatcctgcgtcatttttcaatttatgcgaccaatccgcaaaaacgcaagatcaaagttgtctgtcgctaccagcaatatgaaggtgcaaatgcaatcgtacagcgggtttccgaaggacatatcaagaaggggttgatttggcacttccaaggttctggtaaatcgctactcatgctatttgctgcgcagaaactgcgaaagaaagccgacctcaagagtcctactatcatcattgtcgtggatcgggtcgatctcgatacacagataaccaatactcttggtgctgccgaagttcctaatatggtcaatgctgatagtatccaagcgttacacgacctgctcgaacgcgacatccgtaagattattgttacgacgattcacaaattcaaggatgcctatcccgacatgaatctgcgggataatatcattcttatggtcgatgaagcccaccgcacacaggaaggtgatctcggtcgtaaaatgcgtgcagcactcccgaatgcgtttctcttcggtatgaccggtactccgatcaatcgttccgacaagaacactttttgggcatttggtgcaccggaggatgagggtggatacctcagccgctatacatttcaggaaagtatccgcgatttacaaacgcttccacttcacttcgaaccgcgactccccaatgttcacattgacaaggaagggctcgatattgctttccgcgaaatggctaatgatctaacggaagaagatcgcaacaaattgagtcaaaaagctgcgaagatgctgctcttcctcaaatcgccagagcggatcagaacgattgtcgaagacattgcgaaccattatcgcacacatgtcgaaccgcacagttttaaagcgatgattgtgactccggatcgtctcgcttgtgttgcttacaaagaagcactcgatgaacaactcggtgtggatgccagtcgagtggtcatttcaacgaccgcaaacgacccactcgaattcaaacaaaaatggggattggataaagaccagcaagagaaagttattgagcagttcaacaatccggattctcaactaaagttcttgattgtgaccgctaaattacttgccggattcgatgctcaactcttgcagacgatgtacctcgataaatcgctgaaagatcacacattattacaagcgatctgtcgcaccaaccgcgtctatccaaataaaacttacggtcgcattgtcgattactttggggttttcgatgatactgcgaaggcgttagagtttgacgaagcgactgtgcgtgctgtaataacgaacctgcaggaattgagagacaaacttccagaattgatcgagaaagcgtgttcccattttcccggagttgatcgtacgattgaaggattcgaaggtctgagtcgggcgcaggattgtatcaactcgaatgaaatgcgcgatgcgtttgctaaggactacgtcactctatcaaaagtgtgggaagcactgagtcccgattcaattctcaatcgttttcagcgtgactacaaatggttatcgcaagtctatacctctgttcgaccagcttcggatgacaacggacgattactctggcatgcgtttggaccgcagacggaaaaattgattcacgagcatgttcatgtctccggcattcacgatgacatggaagagatggtgctcgatgccgagttaatcgacggattgatgaatagtaaggacactaagcgagccaaacagatcgttcttattcttgtcggtcgattagggaaacatccaggtaatcctaagtttaagaaacttagcgagcggttagaggaattgcggaatcgtgctgagcaagggttgattagcagtatcgattttatcaagcacctctgccaaatcgcgcgcgatacgttagagaccgagcgtgagttattttctgcagacgaacggagaactgccaagacagcacttacagaactttttcttgaaatgcgcacagataagacaccgtcagtagtcgaacgcattgtcaacgatatcgatgagatcgtgaaaattgttcggtttgacggttggcagactacgattgcaggagagcgcgaagtccagaaatcgctacgcaagactcttctaaagtatcagcttcataaagaggaagaactgtttgagaaggcgtatgcatatatcaaggaatactactgagcgaatttgtagttgagtacattcatgatctgatgagtttcagtcattgagagcgatttatgcctagtaaaaaacgacaaatagttgaacccaatgagaaacgtcgtgctttaggtcggactcgagccgaggcaacttttcctgtcgcagcacccctatcagggatgccaaaaggttacaacgaatttttccagcagatcaaacaacatattcaacgggaacgattgaaaacggttcttgctgcgaatgccgctatggttttactttactgggatatcggtcggacgattctcgaacgtcaggaacaggagggttggggagcacaagtaattgatcgattgtctgtcgatctacaaaaatcgtttccagaaatgcgcggcttctcgccacgcaacctgaaatacatgcgggcatttgcctctgcatggactgaccggacaattgtgcaagaggcacttgcacaaatcacatggtatcataacctcaccttattggaaaaattagacgatcctgaaacacgcttgtggtacattaacaaaaccgttgagcatgggtggtcccgcaacattctcgcattacagattgactcacaacttcacaaacgccaaggcaaagcaattacgaattttccggtaacgctccctccaactgaatcggatatggctgcacaggtgttcaaagacccatatttgttcgactttttgggtactgccgatccccggcgtgagcatgaaatcgagcaggcattggttgaccatattcagagttttctactggagctgggagcgggatttgcctttgttggcaggcaggttcgattggaagttggggatcaagaattcttagtggacttattattctaccatctcaaattgcgttgttttgtcgtaatcgagctaaaagctgtaccattcgatcctgctttcattggacaaataaatctttacctatctgctgtcgacgatctactacgtcatcccgacgataagccgacaatcggattgctactatgtaggacgaaaaacgagttggtagtggagtatgcactacgcagtttgaagaaaccaattggtgttgccggttgggagactaaaatcgttaaaacacttccaaaggagctgaagggaagcctgccgtcgattaaagaaattgaggatgaacttggcaaccacgaataatgaactacgttatatctttcaactacgggagcgcttatgtgctataacctgttagagaaaaaatggattccggtactctatcgaaacggacaattcgaccgggtcgggatcaaagacgcgctaattaaagccggtcaaatccgagagatcgccgcatcgaatccgatggacaggtttgcagtgatgcgttttttgctcgccattttgtattggtgcaaggggaatccccctgatgaaacaaatatcgattcgtttccagcagagtggttttccaaacttgaagagacagagaatcgggattgcttcaatttacttggaaacggaaagcggttttatcaggatgctgatgcaagacgttctcgtcccacgacagatttgtatcaagagataccaactggacacaatttttggcattttaaacacacaaccgattttcaagaggggttgtgcgcttcctgttgtgcaataggactacttcggctcccattatttatgacttttggtggcaatactaaaccatacctttatccgggaataaatggagttccgcctgtttacataatgtcggtgggcaattcgttgttcgagactctccacaaaaactggatacctcgcgccattcctttcggtgaaccatcttggatcgacctcaattttaatgtgggcgacactgccgaaattccactactcaaagggctaacgatgctcgcccgtaaagtttggttggcagaaacggagagccatcaaacttgctacaactgtggagtaaaatccgatacgattatccgcagttgtgaatttcaatcgccaggtaagcaggaaactgccctttggagagacccacacgcactttatctcagtagcacttctcaaaaatcgataaaagcacctgatccggtttcggctggaaaatttaagatggatcgacccttatggaaattacttgcacctgttatcgaagccgctaaaacgatttatccaacttcgaccacttttgctatcatcggtctcggtacagataatgcgaagtatgtcgatgtttgggaacgaattgttgagttaccatcaaataattcagtacccgaagcagcggtgtctacggttgagcaatggcagaaagagacatcgaacaacgaattcgtaaagcgtctgcctaagacgatgcgagtgaaacggaaactcgatcacctgaaagcaacctacgattccaatcgtcctcatgtcgagcatgccgtctcaacagctgttgggaatcttctatccgggggtgaaacggaatggcaaaacgcagcatcggaatatcgtccaatgcaggagatgatcgcgaaatcactcgcacccggcgctacactaacagcgacgatacggcgaaagagtatcgcgaacgcattacccgatatgcgagcaaaacatgacccaccggagaaaacgaaacgtagaaagtcggctacagaatgagttcaaccaatgattttatcatggtcttacaaacattaaaagcaggtgacctaggactcttgcgaacccatgctaataaaggacttgaccagactgttgatgggttcgatctgtttaccggtttgtggtggccgctacggcaaaagaaccagtttgcaccgcgacgggaagtcgcgtggttgatcgctaaactatatgcaaagtgtcccattgaacatcagtctgattgtttgtttgcacaccaactacagcgatgcgaaccaagagaagaacgtgcgcgaaaccggtttcgacagaaattcgatgaactgataaccactcccttggagcaaatcgagcccacattgcgaagagcgcttcaagaaatttcttcccatgaattgaaactcgactgggtaaaactgaccgatgatctctccttttgggaacaggagaccaagcatcaggaatggataaaccaatatctcagcatcaacgaaagggtacaaccatgttgatcgaaattcacatgatccagaaccacagcccggcgaatcttaatagggacgacctcggcgcaccaaaaacctgttatttcggtggtgtattacgctcgcgcatctcgagtcaatgcatcaagcgaagtattcggatgagtccagagtttgcgaaactgttaggaggagtaagaacgcgcgatctcgctaagaggattcttgacaagatcgaaggtgatgcaaacgacaaaaaacgagtcgaaggcattctcaaagtttgcggtttcaaaccaaagactgaatcaaaagcgaagaaaccgcgcaccactgcaggcgaagaaggagagaccgatgaatccgatgaaaccagtcagagaagcaaggcaccgctcttcgtgacccaacaagccattgagaagattgtgaatctcttccaatcaaggaacagcaaatctgatgatgagttagcaaaagaatttgcgaaagcaatcgctctttacacacaagcgcccgatatggcactaagtggacgtatgcttgaacccgacaaatctgcgaagaaaatttgggaaaaactagaaaagaatgtcgaggcatcgttgcaaacggctcacgctatatcgacccacgccgcctttcctgaaactgattacttcgtggcaatgggagacgaaacacgcgaggaaaaagaagaagctggtgccgatttaatcggtgaacaactatttgcttccgcgtgtttctacaaatatttctccattaattttgagcaacttgtagagaatctcggcgataacaaacaattagccgctcatacagtaggcacatttattcgcactgccgcagtagtaaatccgagtgggaagcaaaacagtttcgccgcgaacaatcctcccgatgggatactcatcgagatcaaaggcacgccaatcagctatgccaacgcctttgcgaatccagtgccagccaaaggggaacgggaaatcatttcacaaagtatcgctcaattaggtcaatatatgcatgaccttgatactgggtttggcatccctaaacagcgcttctggttttcacccaatcttcgctatcccctctacgtggttgaaaacaaacaagagatcgcactaaccgaccataatatcaagtcacttgatgaactgataccaatggttatagctgcaatcggtttcgactggaacgaggtacaacaggcaatcgttaacaacgaggcatagcatgagcgatctgcccaatacgctctttctccgcctagaaagttccatgcaatcatggggtgtacacgaatcgaaattcgtagttcgacgaactgccgaagcgccgacgaaatcgggagtcatcggattgttctgtgctgcgctaggtattacccgtcaacaagcgccggacgagtggttaccgaaactaagtgaacttcgaattggtgtacgaattgatgtaccgggaattcgctggtgggattaccacaccgtcggtgccgaaatgcaaatgcgaaccgcaaagggagaatgtaagtcgggagcaatgctcacccgacgcgagtacctttgcgatgccagttttttggtagtattgcagggcgacccatctctcattcaagagttagaaaaagcggtcaaatacccacagtggacactctaccttggtcgcaaatgctgtgttccgtcgcgaccattgttggaacatccggctgggttctttcccgatccgctctctgcgttaagttcgattccgtggcggaaacgactcaaacgtgataacgaacccaaaaagaacctcgtctgcctgatcgactggcaacccacttcggaacaacccgacgcccctgacgatgcacaggtctggtacgatataccggttagtttcgatccgccctcgcatcgacctcgattcgtcattcgtgaagagttgactgttggcgaacatgggcagataagcattgcaaatgaaccattgcagcacgaaacaccgcgaccaccaagaccccgcgccgattacactaatacgaaatacaaagcgaaaagacgcgaacggctatctcaggatcagcatctctgcgtcttctgcaaatctccggcaaccaccgtgcaacatattacctatcgacacgcgggaggcgaagaaaagcccgacgaattgcgttcgctttgtcgactttgccatgatgccgtgacgatgatcgagtatggggtcgggatgggattagatcgcatcaatcccgaagaggaacgttggcgtgaacttatcatcgaaaaacgctctgaaattgtcgcattccgttcattggaaacccgtcgtcgtcggctatccatcgaggaggtagagtgatgtatcattccaatctcatgatcgatgtcggcgataatccagaccgacctcgccccggtcgtttatggttgcgtaacatctatcacgttcatcaacgattgtcgatggcatttcccatgtccacgacgcaaaaagtcgatccgaattttcttctcccattcgatccaaacgggtttgaccgctctcgttttctcttccgtatcgatcaaatcgttcgagataattatcaacagacgatcatcattgtccaatcggaaacggagccagattggaagtatgcgttccacaacttagatatggttctagcagcaccaataaagccatacgagtacactcctgcatttcagaatggggacattcgtagatttcggattcgtgtcaatccgacgaaaaagagtgctacctacggatcgaatggtgcagatagaaacccttcttccaagtcgcaagggaaacgtgttactctttgggacaaagagacaaaaccaacagatgcgatccttgattggtttgctcgcaaaggatcgcagaaaggtttttctgtcggtagttgcgatgtcgtgaacttgggatgggtagttggtaaaaaaccgaacggaaagggtgacgaacacgtcatgcgctttcgttctgcattgttggaaggaaaactgactgtcaccgatgctatggaatttcatgctgcgataaatgcaggaattggatcggcgaagggattcggatttggtctactttctgtcttcccaattggagatcaccaatgaacgatctccgtgccctacctaaattacgtgatggtttatcgtatgcatacttcgaacattgccgggtcgaacaagacgaaatgtcgattgcggtttggacgaaagaaggaatcatacccgtacctgctgcttcacttggtgtattgttgttgggtcccggctcaacgattacccacgcggcagtgaaagcgcttgctgacaatggttgtatggtattgtggacgggtgaaggcgcgatccggttttatgcgaccggtatcggtgaaacccggaaaggagggcacctcgaacgacaagcggcactgtgggctgaccctgagtcacacgaacgaatcgtgcttcgaatgtaccggatgcgtttccgaaaacgattaccgaagggtttatcattggaacaaattcggggaatggaaggtgttcgtgtacgcgaagcgtatgcgattgcctcgaacgaaaccggtgtggagtgggtcggtcgaagctatgaccggaaccattgggagaattccgatccagtcaatcgcgcactttcggcagcaaatgcctgcctttattcgttgtgccatactgccatcgtgagtggcggctatactcccggtcttggtttcgtccatgtcggtaaagcgctctcattcgtgtacgatattggcgatctatacaaggttgagacgacgatcccactctcgtttcgcgtcgtacaggaatccactgacaacttggaaagtcgggtgcggcatctctgtcgagattacttccacgagtacaaattattagaacgtattttacctgatatcgaccgtttgtttgatttcaacttggacgacgaatctttcggttgggatatcgatgaagacccggcacgtccaactccgtattggaacccaccggaagtggaaaaggaattgacaaatggtagtgatgattcttgagaaggttcctgcgtcattgcgcggtgaattgacacgatggctgttcgaagcaaagaccggtgtctttatcggaaaggtttccgcgatagtccgcgataagctttgggatctttgtgtgggtcgtcgtggaacaccagcggtcattcaaatctggaacgacaacaatgagcaagggttttcgttgcggtcgaatggcgatacatcaaggaattttcaggaaaaagaaggattgtggtttgctgtaaagcatcttcctaaagaggatgcagttgccactgatacttaacacccttttcgtgatctaacttcaatgattacgaagggtaatccccacgcgcgtggggatgaaccgttgaacactccaattttatcaaaactgttgaggtaatccccacgcgcgtggggatgaaccggcgttaaaattccgcgcgttcgacattgaattgtaatccccacgcgcgtggggatgaaccggttgttccgatacgatacttcaataatttaggagtaatccccacgcgcgtggggatgaaccgagcaatagcgttctgaagtctctccggttcgcgtaatccccacgcgcgtggggatgaaccgaatattatagcgaccgcctcaaattttgttgtggtaatccccacgcgcgtggggatgaaccgaaaaatccacgaacacgaccaaca

SEQ ID NO: 1004 - DNA, 103674 bp, Artificial Sequence
  Synthetic Oligonucleotide
  misc_feature (1)..(89185): n is a, c, g, or t
nnnnnnnnnnnnnnnnnnnnnnnnnnnnnnnnnnnnnnnnnnnnnnnnnnnnnnnnnnnnnnnnnnnnnnnnnnnnnnnnnnnnnnnnnnnnnnnnnnnnnnnnnnnnnnnnnnnnnnnnnnnnnnnnnnnnnnnnnnnnnnnnnnnnnnnnnnnnnnnnnnnnnnnnnnnnnnnnnnnnnnnnnnnnnnnnnnnnnnnnnnnnnnnnnnnnnnnnnnnnnnnnnnnnnnnnnnnnnnnnnnnnnnnnnnnnnnnnnnnnnnnnnnnnnnnnnnnnnnnnnnnnnnnnnnnnnnnnnnnnnnnnnnnnnnnnnnnnnnnnnnnnnnnnnnnnnnnnnnnnnnnnnnnnnnnnnnnnnnnnnnnnnnnnnnnnnnnnnnnnnnnnnnnnnnnnnnnnnnnnnnnnnnnnnnnnnnnnnnnnnnnnnnnnnnnnnnnnnnnnnnnnnnnnnnnnnnnnnnnnnnnnnnnnnnnnnnnnnnnnnnnnnnnnnnnnnnnnnnnnnnnnnnnnnnnnnnnnnnnnnnnnnnnnnnnnnnnnnnnnnnnnnnnnnnnnnnnnnnnnnnnnnnnnnnnnnnnnnnnnnnnnnnnnnnnnnnnnnnnnnnnnnnnnnnnnnnnnnnnnnnnnnnnnnnnnnnnnnnnnnnnnnnnnnnnnnnnnnnnnnnnnnnnnnnnnnnnnnnnnnnnnnnnnnnnnnnnnnnnnnnnnnnnnnnnnnnnnnnnnnnnnnnnnnnnnnnnnnnnnnnnnnnnnnnnnnnnnnnnnnnnnnnnnnnnnnnnnnnnnnnnnnnnnnnnnnnnnnnnnnnnnnnnnnnnnnnnnnnnnnnnnnnnnnnnnnnnnnnnnnnnnnnnnnnnnnnnnnnnnnnnnnnnnnnnnnnnnnnnnnnnnnnnnnnnnnnnnnnnnnnnnnnnnnnnnnnnnnnnnnnnnnnnnnnnnnnnnnnnnnnnnnnnnnnnnnnnnnnnnnnnnnnnnnnnnnnnnnnnnnnnnnnnnnnnnnnnnnnnnnnnnnnnnnnnnnnnnnnnnnnnnnnnnnnnnnnnnnnnnnnnnnnnnnnnnnnnnnnnnnnnnnnnnnnnnnnnnnnnnnnnnnnnnnnnnnnnnnnnnnnnnnnnnnnnnnnnnnnnnnnnnnnnnnnnnnnnnnnnnnnnnnnnnnnnnnnnnnnnnnnnnnnnnnnnnnnnnnnnnnnnnnnnnnnnnnnnnnnnnnnnnnnnnnnnnnnnnnnnnnnnnnnnnnnnnnnnnnnnnnnnnnnnnnnnnnnnnnnnnnnnnnnnnnnnnnnnnnnnnnnnnnnnnnnnnnnnnnnnnnnnnnnnnnnnnnnnnnnnnnnnnnnnnnnnnnnnnnnnnnnnnnnnnnnnnnnnnnnnnnnnnnnnnnnnnnnnnnnnnnnnnnnnnnnnnnnnnnnnnnnnnnnnnnnnnnnnnnnnnnnnnnnnnnnnnnnnnnnnnnnnnnnnnnnnnnnnnnnnnnnnnnnnnnnnnnnnnnnnnnnnnnnnnnnnnnnnnnnnnnnnnnnnnnnnnnnnnnnnnnnnnnnnnnnnnnnnnnnnnnnnnnnnnnnnnnnnnnnnnnnnnnnnnnnnnnnnnnnnnnnnnnnnnnnnnnnnnnnnnnnnnnnnnnnnnnnnnnnnnnnnnnnnnnnnnnnnnnnnnnnnnnnnnnnnnnnnnnnnnnnnnnnnnnnnnnnnnnnnnnnnnnnnnnnnnnnnnnnnnnnnnnnnnnnnnnnnnnnnnnnnnnnnnnnnnnnnnnnnnnnnnnnnnnnnnnnnnnnnnnnnnnnnnnnnnnnnnnnnnnnnnnnnnnnnnnnnnnnnnnnnnnnnnnnnnnnnnnnnnnnnnnnnnnnnnnnnnnnnnnnnnnnnnnnnnnnnnnnnnnnnnnnnnnnnnnnnnnnnnnnnnnnnnnnnnnnnnnnnnnnnnnnnnnnnnnnnnnnnnnnnnnnnnnnnnnnnnnnnnnnnnnnnnnnnnnnnnnnnnnnnnnnnnnnnnnnnnnnnnnnnnnnnnnnnnnnnnnnnnnnnnnnnnnnnnnnnnnnnnnnnnnnnnnnnnnnnnnnnnnnnnnnnnnnnnnnnnnnnnnnnnnnnnnnnnnnnnnnnnnnnnnnnnnnnnnnnnnnnnnnnnnnnnnnnnnnnnnnnnnnnnnnnnnnnnnnnnnnnnnnnnnnnnnnnnnnnnnnnnnnnnnnnnnnnnnnnnnnnnnnnnnnnnnnnnnnnnnnnnnnnnnnnnnnnnnnnnnnnnnnnnnnnnnnnnnnnnnnnnnnnnnnnnnnnnnnnnnnnnnnnnnnnnnnnnnnnnnnnnnnnnnnnnnnnnnnnnnnnnnnnnnnnnnnnnnnnnnnnnnnnnnnnnnnnnnnnnnnnnnnnnnnnnnnnnnnnnnnnnnnnnnnnnnnnnnnnnnnnnnnnnnnnnnnnnnnnnnnnnnnnnnnnnnnnnnnnnnnnnnnnnnnnnnnnnnnnnnnnnnnnnnnnnnnnnnnnnnnnnnnnnnnnnnnnnnnnnnnnnnnnnnnnnnnnnnnnnnnnnnnnnnnnnnnnnnnnnnnnnnnnnnnnnnnnnnnnnnnnnnnnnnnnnnnnnnnnnnnnnnnnnnnnnnnnnnnnnnnnnnnnnnnnnnnnnnnnnnnnnnnnnnnnnnnnnnnnnnnnnnnnnnnnnnnnnnnnnnnnnnnnnnnnnnnnnnnnnnnnnnnnnnnnnnnnnnnnnnnnnnnnnnnnnnnnnnnnnnnnnnnnnnnnnnnnnnnnnnnnnnnnnnnnnnnnnnnnnnnnnnnnnnnnnnnnnnnnnnnnnnnnnnnnnnnnnnnnnnnnnnnnnnnnnnnnnnnnnnnnnnnnnnnnnnnnnnnnnnnnnnnnnnnnnnnnnnnnnnnnnnnnnnnnnnnnnnnnnnnnnnnnnnnnnnnnnnnnnnnnnnnnnnnnnnnnnnnnnnnnnnnnnnnnnnnnnnnnnnnnnnnnnnnnnnnnnnnnnnnnnnnnnnnnnnnnnnnnnnnnnnnnnnnnnnnnnnnnnnnnnnnnnnnnnnnnnnnnnnnnnnnnnnnnnnnnnnnnnnnnnnnnnnnnnnnnnnnnnnnnnnnnnnnnnnnnnnnnnnnnnnnnnnnnnnnnnnnnnnnnnnnnnnnnnnnnnnnnnnnnnnnnnnnnnnnnnnnnnnnnnnnnnnnnnnnnnnnnnnnnnnnnnnnnnnnnnnnnnnnnnnnnnnnnnnnnnnnnnnnnnnnnnnnnnnnnnnnnnnnnnnnnnnnnnnnnnnnnnnnnnnnnnnnnnnnnnnnnnnnnnnnnnnnnnnnnnnnnnnnnnnnnnnnnnnnnnnnnnnnnnnnnnnnnnnnnnnnnnnnnnnnnnnnnnnnnnnnnnnnnnnnnnnnnnnnnnnnnnnnnnnnnnnnnnnnnnnnnnnnnnnnnnnnnnnnnnnnnnnnnnnnnnnnnnnnnnnnnnnnnnnnnnnnnnnnnnnnnnnnnnnnnnnnnnnnnnnnnnnnnnnnnnnnnnnnnnnnnnnnnnnnnnnnnnnnnnnnnnnnnnnnnnnnnnnnnnnnnnnnnnnnnnnnnnnnnnnnnnnnnnnnnnnnnnnnnnnnnnnnnnnnnnnnnnnnnnnnnnnnnnnnnnnnnnnnnnnnnnnnnnnnnnnnnnnnnnnnnnnnnnnnnnnnnnnnnnnnnnnnnnnnnnnnnnnnnnnnnnnnnnnnnnnnnnnnnnnnnnnnnnnnnnnnnnnnnnnnnnnnnnnnnnnnnnnnnnnnnnnnnnnnnnnnnnnnnnnnnnnnnnnnnnnnnnnnnnnnnnnnnnnnnnnnnnnnnnnnnnnnnnnnnnnnnnnnnnnnnnnnnnnnnnnnnnnnnnnnnnnnnnnnnnnnnnnnnnnnnnnnnnnnnnnnnnnnnnnnnnnnnnnnnnnnnnnnnnnnnnnnnnnnnnnnnnnnnnnnnnnnnnnnnnnnnnnnnnnnnnnnnnnnnnnnnnnnnnnnnnnnnnnnnnnnnnnnnnnnnnnnnnnnnnnnnnnnnnnnnnnnnnnnnnnnnnnnnnnnnnnnnnnnnnnnnnnnnnnnnnnnnnnnnnnnnnnnnnnnnnnnnnnnnnnnnnnnnnnnnnnnnnnnnnnnnnnnnnnnnnnnnnnnnnnnnnnnnnnnnnnnnnnnnnnnnnnnnnnnnnnnnnnnnnnnnnnnnnnnnnnnnnnnnnnnnnnnnnnnnnnnnnnnnnnnnnnnnnnnnnnnnnnnnnnnnnnnnnnnnnnnnnnnnnnnnnnnnnnnnnnnnnnnnnnnnnnnnnnnnnnnnnnnnnnnnnnnnnnnnnnnnnnnnnnnnnnnnnnnnnnnnnnnnnnnnnnnnnnnnnnnnnnnnnnnnnnnnnnnnnnnnnnnnnnnnnnnnnnnnnnnnnnnnnnnnnnnnnnnnnnnnnnnnnnnnnnnnnnnnnnnnnnnnnnnnnnnnnnnnnnnnnnnnnnnnnnnnnnnnnnnnnnnnnnnnnnnnnnnnnnnnnnnnnnnnnnnnnnnnnnnnnnnnnnnnnnnnnnnnnnnnnnnnnnnnnnnnnnnnnnnnnnnnnnnnnnnnnnnnnnnnnnnnnnnnnnnnnnnnnnnnnnnnnnnnnnnnnnnnnnnnnnnnnnnnnnnnnnnnnnnnnnnnnnnnnnnnnnnnnnnnnnnnnnnnnnnnnnnnnnnnnnnnnnnnnnnnnnnnnnnnnnnnnnnnnnnnnnnnnnnnnnnnnnnnnnnnnnnnnnnnnnnnnnnnnnnnnnnnnnnnnnnnnnnnnnnnnnnnnnnnnnnnnnnnnnnnnnnnnnnnnnnnnnnnnnnnnnnnnnnnnnnnnnnnnnnnnnnnnnnnnnnnnnnnnnnnnnnnnnnnnnnnnnnnnnnnnnnnnnnnnnnnnnnnnnnnnnnnnnnnnnnnnnnnnnnnnnnnnnnnnnnnnnnnnnnnnnnnnnnnnnnnnnnnnnnnnnnnnnnnnnnnnnnnnnnnnnnnnnnnnnnnnnnnnnnnnnnnnnnnnnnnnnnnnnnnnnnnnnnnnnnnnnnnnnnnnnnnnnnnnnnnnnnnnnnnnnnnnnnnnnnnnnnnnnnnnnnnnnnnnnnnnnnnnnnnnnnnnnnnnnnnnnnnnnnnnnnnnnnnnnnnnnnnnnnnnnnnnnnnnnnnnnnnnnnnnnnnnnnnnnnnnnnnnnnnnnnnnnnnnnnnnnnnnnnnnnnnnnnnnnnnnnnnnnnnnnnnnnnnnnnnnnnnnnnnnnnnnnnnnnnnnnnnnnnnnnnnnnnnnnnnnnnnnnnnnnnnnnnnnnnnnnnnnnnnnnnnnnnnnnnnnnnnnnnnnnnnnnnnnnnnnnnnnnnnnnnnnnnnnnnnnnnnnnnnnnnnnnnnnnnnnnnnnnnnnnnnnnnnnnnnnnnnnnnnnnnnnnnnnnnnnnnnnnnnnnnnnnnnnnnnnnnnnnnnnnnnnnnnnnnnnnnnnnnnnnnnnnnnnnnnnnnnnnnnnnnnnnnnnnnnnnnnnnnnnnnnnnnnnnnnnnnnnnnnnnnnnnnnnnnnnnnnnnnnnnnnnnnnnnnnnnnnnnnnnnnnnnnnnnnnnnnnnnnnnnnnnnnnnnnnnnnnnnnnnnnnnnnnnnnnnnnnnnnnnnnnnnnnnnnnnnnnnnnnnnnnnnnnnnnnnnnnnnnnnnnnnnnnnnnnnnnnnnnnnnnnnnnnnnnnnnnnnnnnnnnnnnnnnnnnnnnnnnnnnnnnnnnnnnnnnnnnnnnnnnnnnnnnnnnnnnnnnnnnnnnnnnnnnnnnnnnnnnnnnnnnnnnnnnnnnnnnnnnnnnnnnnnnnnnnnnnnnnnnnnnnnnnnnnnnnnnnnnnnnnnnnnnnnnnnnnnnnnnnnnnnnnnnnnnnnnnnnnnnnnnnnnnnnnnnnnnnnnnnnnnnnnnnnnnnnnnnnnnnnnnnnnnnnnnnnnnnnnnnnnnnnnnnnnnnnnnnnnnnnnnnnnnnnnnnnnnnnnnnnnnnnnnnnnnnnnnnnnnnnnnnnnnnnnnnnnnnnnnnnnnnnnnnnnnnnnnnnnnnnnnnnnnnnnnnnnnnnnnnnnnnnnnnnnnnnnnnnnnnnnnnnnnnnnnnnnnnnnnnnnnnnnnnnnnnnnnnnnnnnnnnnnnnnnnnnnnnnnnnnnnnnnnnnnnnnnnnnnnnnnnnnnnnnnnnnnnnnnnnnnnnnnnnnnnnnnnnnnnnnnnnnnnnnnnnnnnnnnnnnnnnnnnnnnnnnnnnnnnnnnnnnnnnnnnnnnnnnnnnnnnnnnnnnnnnnnnnnnnnnnnnnnnnnnnnnnnnnnnnnnnnnnnnnnnnnnnnnnnnnnnnnnnnnnnnnnnnnnnnnnnnnnnnnnnnnnnnnnnnnnnnnnnnnnnnnnnnnnnnnnnnnnnnnnnnnnnnnnnnnnnnnnnnnnnnnnnnnnnnnnnnnnnnnnnnnnnnnnnnnnnnnnnnnnnnnnnnnnnnnnnnnnnnnnnnnnnnnnnnnnnnnnnnnnnnnnnnnnnnnnnnnnnnnnnnnnnnnnnnnnnnnnnnnnnnnnnnnnnnnnnnnnnnnnnnnnnnnnnnnnnnnnnnnnnnnnnnnnnnnnnnnnnnnnnnnnnnnnnnnnnnnnnnnnnnnnnnnnnnnnnnnnnnnnnnnnnnnnnnnnnnnnnnnnnnnnnnnnnnnnnnnnnnnnnnnnnnnnnnnnnnnnnnnnnnnnnnnnnnnnnnnnnnnnnnnnnnnnnnnnnnnnnnnnnnnnnnnnnnnnnnnnnnnnnnnnnnnnnnnnnnnnnnnnnnnnnnnnnnnnnnnnnnnnnnnnnnnnnnnnnnnnnnnnnnnnnnnnnnnnnnnnnnnnnnnnnnnnnnnnnnnnnnnnnnnnnnnnnnnnnnnnnnnnnnnnnnnnnnnnnnnnnnnnnnnnnnnnnnnnnnnnnnnnnnnnnnnnnnnnnnnnnnnnnnnnnnnnnnnnnnnnnnnnnnnnnnnnnnnnnnnnnnnnnnnnnnnnnnnnnnnnnnnnnnnnnnnnnnnnnnnnnnnnnnnnnnnnnnnnnnnnnnnnnnnnnnnnnnnnnnnnnnnnnnnnnnnnnnnnnnnnnnnnnnnnnnnnnnnnnnnnnnnnnnnnnnnnnnnnnnnnnnnnnnnnnnnnnnnnnnnnnnnnnnnnnnnnnnnnnnnnnnnnnnnnnnnnnnnnnnnnnnnnnnnnnnnnnnnnnnnnnnnnnnnnnnnnnnnnnnnnnnnnnnnnnnnnnnnnnnnnnnnnnnnnnnnnnnnnnnnnnnnnnnnnnnnnnnnnnnnnnnnnnnnnnnnnnnnnnnnnnnnnnnnnnnnnnnnnnnnnnnnnnnnnnnnnnnnnnnnnnnnnnnnnnnnnnnnnnnnnnnnnnnnnnnnnnnnnnnnnnnnnnnnnnnnnnnnnnnnnnnnnnnnnnnnnnnnnnnnnnnnnnnnnnnnnnnnnnnnnnnnnnnnnnnnnnnnnnnnnnnnnnnnnnnnnnnnnnnnnnnnnnnnnnnnnnnnnnnnnnnnnnnnnnnnnnnnnnnnnnnnnnnnnnnnnnnnnnnnnnnnnnnnnnnnnnnnnnnnnnnnnnnnnnnnnnnnnnnnnnnnnnnnnnnnnnnnnnnnnnnnnnnnnnnnnnnnnnnnnnnnnnnnnnnnnnnnnnnnnnnnnnnnnnnnnnnnnnnnnnnnnnnnnnnnnnnnnnnnnnnnnnnnnnnnnnnnnnnnnnnnnnnnnnnnnnnnnnnnnnnnnnnnnnnnnnnnnnnnnnnnnnnnnnnnnnnnnnnnnnnnnnnnnnnnnnnnnnnnnnnnnnnnnnnnnnnnnnnnnnnnnnnnnnnnnnnnnnnnnnnnnnnnnnnnnnnnnnnnnnnnnnnnnnnnnnnnnnnnnnnnnnnnnnnnnnnnnnnnnnnnnnnnnnnnnnnnnnnnnnnnnnnnnnnnnnnnnnnnnnnnnnnnnnnnnnnnnnnnnnnnnnnnnnnnnnnnnnnnnnnnnnnnnnnnnnnnnnnnnnnnnnnnnnnnnnnnnnnnnnnnnnnnnnnnnnnnnnnnnnnnnnnnnnnnnnnnnnnnnnnnnnnnnnnnnnnnnnnnnnnnnnnnnnnnnnnnnnnnnnnnnnnnnnnnnnnnnnnnnnnnnnnnnnnnnnnnnnnnnnnnnnnnnnnnnnnnnnnnnnnnnnnnnnnnnnnnnnnnnnnnnnnnnnnnnnnnnnnnnnnnnnnnnnnnnnnnnnnnnnnnnnnnnnnnnnnnnnnnnnnnnnnnnnnnnnnnnnnnnnnnnnnnnnnnnnnnnnnnnnnnnnnnnnnnnnnnnnnnnnnnnnnnnnnnnnnnnnnnnnnnnnnnnnnnnnnnnnnnnnnnnnnnnnnnnnnnnnnnnnnnnnnnnnnnnnnnnnnnnnnnnnnnnnnnnnnnnnnnnnnnnnnnnnnnnnnnnnnnnnnnnnnnnnnnnnnnnnnnnnnnnnnnnnnnnnnnnnnnnnnnnnnnnnnnnnnnnnnnnnnnnnnnnnnnnnnnnnnnnnnnnnnnnnnnnnnnnnnnnnnnnnnnnnnnnnnnnnnnnnnnnnnnnnnnnnnnnnnnnnnnnnnnnnnnnnnnnnnnnnnnnnnnnnnnnnnnnnnnnnnnnnnnnnnnnnnnnnnnnnnnnnnnnnnnnnnnnnnnnnnnnnnnnnnnnnnnnnnnnnnnnnnnnnnnnnnnnnnnnnnnnnnnnnnnnnnnnnnnnnnnnnnnnnnnnnnnnnnnnnnnnnnnnnnnnnnnnnnnnnnnnnnnnnnnnnnnnnnnnnnnnnnnnnnnnnnnnnnnnnnnnnnnnnnnnnnnnnnnnnnnnnnnnnnnnnnnnnnnnnnnnnnnnnnnnnnnnnnnnnnnnnnnnnnnnnnnnnnnnnnnnnnnnnnnnnnnnnnnnnnnnnnnnnnnnnnnnnnnnnnnnnnnnnnnnnnnnnnnnnnnnnnnnnnnnnnnnnnnnnnnnnnnnnnnnnnnnnnnnnnnnnnnnnnnnnnnnnnnnnnnnnnnnnnnnnnnnnnnnnnnnnnnnnnnnnnnnnnnnnnnnnnnnnnnnnnnnnnnnnnnnnnnnnnnnnnnnnnnnnnnnnnnnnnnnnnnnnnnnnnnnnnnnnnnnnnnnnnnnnnnnnnnnnnnnnnnnnnnnnnnnnnnnnnnnnnnnnnnnnnnnnnnnnnnnnnnnnnnnnnnnnnnnnnnnnnnnnnnnnnnnnnnnnnnnnnnnnnnnnnnnnnnnnnnnnnnnnnnnnnnnnnnnnnnnnnnnnnnnnnnnnnnnnnnnnnnnnnnnnnnnnnnnnnnnnnnnnnnnnnnnnnnnnnnnnnnnnnnnnnnnnnnnnnnnnnnnnnnnnnnnnnnnnnnnnnnnnnnnnnnnnnnnnnnnnnnnnnnnnnnnnnnnnnnnnnnnnnnnnnnnnnnnnnnnnnnnnnnnnnnnnnnnnnnnnnnnnnnnnnnnnnnnnnnnnnnnnnnnnnnnnnnnnnnnnnnnnnnnnnnnnnnnnnnnnnnnnnnnnnnnnnnnnnnnnnnnnnnnnnnnnnnnnnnnnnnnnnnnnnnnnnnnnnnnnnnnnnnnnnnnnnnnnnnnnnnnnnnnnnnnnnnnnnnnnnnnnnnnnnnnnnnnnnnnnnnnnnnnnnnnnnnnnnnnnnnnnnnnnnnnnnnnnnnnnnnnnnnnnnnnnnnnnnnnnnnnnnnnnnnnnnnnnnnnnnnnnnnnnnnnnnnnnnnnnnnnnnnnnnnnnnnnnnnnnnnnnnnnnnnnnnnnnnnnnnnnnnnnnnnnnnnnnnnnnnnnnnnnnnnnnnnnnnnnnnnnnnnnnnnnnnnnnnnnnnnnnnnnnnnnnnnnnnnnnnnnnnnnnnnnnnnnnnnnnnnnnnnnnnnnnnnnnnnnnnnnnnnnnnnnnnnnnnnnnnnnnnnnnnnnnnnnnnnnnnnnnnnnnnnnnnnnnnnnnnnnnnnnnnnnnnnnnnnnnnnnnnnnnnnnnnnnnnnnnnnnnnnnnnnnnnnnnnnnnnnnnnnnnnnnnnnnnnnnnnnnnnnnnnnnnnnnnnnnnnnnnnnnnnnnnnnnnnnnnnnnnnnnnnnnnnnnnnnnnnnnnnnnnnnnnnnnnnnnnnnnnnnnnnnnnnnnnnnnnnnnnnnnnnnnnnnnnnnnnnnnnnnnnnnnnnnnnnnnnnnnnnnnnnnnnnnnnnnnnnnnnnnnnnnnnnnnnnnnnnnnnnnnnnnnnnnnnnnnnnnnnnnnnnnnnnnnnnnnnnnnnnnnnnnnnnnnnnnnnnnnnnnnnnnnnnnnnnnnnnnnnnnnnnnnnnnnnnnnnnnnnnnnnnnnnnnnnnnnnnnnnnnnnnnnnnnnnnnnnnnnnnnnnnnnnnnnnnnnnnnnnnnnnnnnnnnnnnnnnnnnnnnnnnnnnnnnnnnnnnnnnnnnnnnnnnnnnnnnnnnnnnnnnnnnnnnnnnnnnnnnnnnnnnnnnnnnnnnnnnnnnnnnnnnnnnnnnnnnnnnnnnnnnnnnnnnnnnnnnnnnnnnnnnnnnnnnnnnnnnnnnnnnnnnnnnnnnnnnnnnnnnnnnnnnnnnnnnnnnnnnnnnnnnnnnnnnnnnnnnnnnnnnnnnnnnnnnnnnnnnnnnnnnnnnnnnnnnnnnnnnnnnnnnnnnnnnnnnnnnnnnnnnnnnnnnnnnnnnnnnnnnnnnnnnnnnnnnnnnnnnnnnnnnnnnnnnnnnnnnnnnnnnnnnnnnnnnnnnnnnnnnnnnnnnnnnnnnnnnnnnnnnnnnnnnnnnnnnnnnnnnnnnnnnnnnnnnnnnnnnnnnnnnnnnnnnnnnnnnnnnnnnnnnnnnnnnnnnnnnnnnnnnnnnnnnnnnnnnnnnnnnnnnnnnnnnnnnnnnnnnnnnnnnnnnnnnnnnnnnnnnnnnnnnnnnnnnnnnnnnnnnnnnnnnnnnnnnnnnnnnnnnnnnnnnnnnnnnnnnnnnnnnnnnnnnnnnnnnnnnnnnnnnnnnnnnnnnnnnnnnnnnnnnnnnnnnnnnnnnnnnnnnnnnnnnnnnnnnnnnnnnnnnnnnnnnnnnnnnnnnnnnnnnnnnnnnnnnnnnnnnnnnnnnnnnnnnnnnnnnnnnnnnnnnnnnnnnnnnnnnnnnnnnnnnnnnnnnnnnnnnnnnnnnnnnnnnnnnnnnnnnnnnnnnnnnnnnnnnnnnnnnnnnnnnnnnnnnnnnnnnnnnnnnnnnnnnnnnnnnnnnnnnnnnnnnnnnnnnnnnnnnnnnnnnnnnnnnnnnnnnnnnnnnnnnnnnnnnnnnnnnnnnnnnnnnnnnnnnnnnnnnnnnnnnnnnnnnnnnnnnnnnnnnnnnnnnnnnnnnnnnnnnnnnnnnnnnnnnnnnnnnnnnnnnnnnnnnnnnnnnnnnnnnnnnnnnnnnnnnnnnnnnnnnnnnnnnnnnnnnnnnnnnnnnnnnnnnnnnnnnnnnnnnnnnnnnnnnnnnnnnnnnnnnnnnnnnnnnnnnnnnnnnnnnnnnnnnnnnnnnnnnnnnnnnnnnnnnnnnnnnnnnnnnnnnnnnnnnnnnnnnnnnnnnnnnnnnnnnnnnnnnnnnnnnnnnnnnnnnnnnnnnnnnnnnnnnnnnnnnnnnnnnnnnnnnnnnnnnnnnnnnnnnnnnnnnnnnnnnnnnnnnnnnnnnnnnnnnnnnnnnnnnnnnnnnnnnnnnnnnnnnnnnnnnnnnnnnnnnnnnnnnnnnnnnnnnnnnnnnnnnnnnnnnnnnnnnnnnnnnnnnnnnnnnnnnnnnnnnnnnnnnnnnnnnnnnnnnnnnnnnnnnnnnnnnnnnnnnnnnnnnnnnnnnnnnnnnnnnnnnnnnnnnnnnnnnnnnnnnnnnnnnnnnnnnnnnnnnnnnnnnnnnnnnnnnnnnnnnnnnnnnnnnnnnnnnnnnnnnnnnnnnnnnnnnnnnnnnnnnnnnnnnnnnnnnnnnnnnnnnnnnnnnnnnnnnnnnnnnnnnnnnnnnnnnnnnnnnnnnnnnnnnnnnnnnnnnnnnnnnnnnnnnnnnnnnnnnnnnnnnnnnnnnnnnnnnnnnnnnnnnnnnnnnnnnnnnnnnnnnnnnnnnnnnnnnnnnnnnnnnnnnnnnnnnnnnnnnnnnnnnnnnnnnnnnnnnnnnnnnnnnnnnnnnnnnnnnnnnnnnnnnnnnnnnnnnnnnnnnnnnnnnnnnnnnnnnnnnnnnnnnnnnnnnnnnnnnnnnnnnnnnnnnnnnnnnnnnnnnnnnnnnnnnnnnnnnnnnnnnnnnnnnnnnnnnnnnnnnnnnnnnnnnnnnnnnnnnnnnnnnnnnnnnnnnnnnnnnnnnnnnnnnnnnnnnnnnnnnnnnnnnnnnnnnnnnnnnnnnnnnnnnnnnnnnnnnnnnnnnnnnnnnnnnnnnnnnnnnnnnnnnnnnnnnnnnnnnnnnnnnnnnnnnnnnnnnnnnnnnnnnnnnnnnnnnnnnnnnnnnnnnnnnnnnnnnnnnnnnnnnnnnnnnnnnnnnnnnnnnnnnnnnnnnnnnnnnnnnnnnnnnnnnnnnnnnnnnnnnnnnnnnnnnnnnnnnnnnnnnnnnnnnnnnnnnnnnnnnnnnnnnnnnnnnnnnnnnnnnnnnnnnnnnnnnnnnnnnnnnnnnnnnnnnnnnnnnnnnnnnnnnnnnnnnnnnnnnnnnnnnnnnnnnnnnnnnnnnnnnnnnnnnnnnnnnnnnnnnnnnnnnnnnnnnnnnnnnnnnnnnnnnnnnnnnnnnnnnnnnnnnnnnnnnnnnnnnnnnnnnnnnnnnnnnnnnnnnnnnnnnnnnnnnnnnnnnnnnnnnnnnnnnnnnnnnnnnnnnnnnnnnnnnnnnnnnnnnnnnnnnnnnnnnnnnnnnnnnnnnnnnnnnnnnnnnnnnnnnnnnnnnnnnnnnnnnnnnnnnnnnnnnnnnnnnnnnnnnnnnnnnnnnnnnnnnnnnnnnnnnnnnnnnnnnnnnnnnnnnnnnnnnnnnnnnnnnnnnnnnnnnnnnnnnnnnnnnnnnnnnnnnnnnnnnnnnnnnnnnnnnnnnnnnnnnnnnnnnnnnnnnnnnnnnnnnnnnnnnnnnnnnnnnnnnnnnnnnnnnnnnnnnnnnnnnnnnnnnnnnnnnnnnnnnnnnnnnnnnnnnnnnnnnnnnnnnnnnnnnnnnnnnnnnnnnnnnnnnnnnnnnnnnnnnnnnnnnnnnnnnnnnnnnnnnnnnnnnnnnnnnnnnnnnnnnnnnnnnnnnnnnnnnnnnnnnnnnnnnnnnnnnnnnnnnnnnnnnnnnnnnnnnnnnnnnnnnnnnnnnnnnnnnnnnnnnnnnnnnnnnnnnnnnnnnnnnnnnnnnnnnnnnnnnnnnnnnnnnnnnnnnnnnnnnnnnnnnnnnnnnnnnnnnnnnnnnnnnnnnnnnnnnnnnnnnnnnnnnnnnnnnnnnnnnnnnnnnnnnnnnnnnnnnnnnnnnnnnnnnnnnnnnnnnnnnnnnnnnnnnnnnnnnnnnnnnnnnnnnnnnnnnnnnnnnnnnnnnnnnnnnnnnnnnnnnnnnnnnnnnnnnnnnnnnnnnnnnnnnnnnnnnnnnnnnnnnnnnnnnnnnnnnnnnnnnnnnnnnnnnnnnnnnnnnnnnnnnnnnnnnnnnnnnnnnnnnnnnnnnnnnnnnnnnnnnnnnnnnnnnnnnnnnnnnnnnnnnnnnnnnnnnnnnnnnnnnnnnnnnnnnnnnnnnnnnnnnnnnnnnnnnnnnnnnnnnnnnnnnnnnnnnnnnnnnnnnnnnnnnnnnnnnnnnnnnnnnnnnnnnnnnnnnnnnnnnnnnnnnnnnnnnnnnnnnnnnnnnnnnnnnnnnnnnnnnnnnnnnnnnnnnnnnnnnnnnnnnnnnnnnnnnnnnnnnnnnnnnnnnnnnnnnnnnnnnnnnnnnnnnnnnnnnnnnnnnnnnnnnnnnnnnnnnnnnnnnnnnnnnnnnnnnnnnnnnnnnnnnnnnnnnnnnnnnnnnnnnnnnnnnnnnnnnnnnnnnnnnnnnnnnnnnnnnnnnnnnnnnnnnnnnnnnnnnnnnnnnnnnnnnnnnnnnnnnnnnnnnnnnnnnnnnnnnnnnnnnnnnnnnnnnnnnnnnnnnnnnnnnnnnnnnnnnnnnnnnnnnnnnnnnnnnnnnnnnnnnnnnnnnnnnnnnnnnnnnnnnnnnnnnnnnnnnnnnnnnnnnnnnnnnnnnnnnnnnnnnnnnnnnnnnnnnnnnnnnnnnnnnnnnnnnnnnnnnnnnnnnnnnnnnnnnnnnnnnnnnnnnnnnnnnnnnnnnnnnnnnnnnnnnnnnnnnnnnnnnnnnnnnnnnnnnnnnnnnnnnnnnnnnnnnnnnnnnnnnnnnnnnnnnnnnnnnnnnnnnnnnnnnnnnnnnnnnnnnnnnnnnnnnnnnnnnnnnnnnnnnnnnnnnnnnnnnnnnnnnnnnnnnnnnnnnnnnnnnnnnnnnnnnnnnnnnnnnnnnnnnnnnnnnnnnnnnnnnnnnnnnnnnnnnnnnnnnnnnnnnnnnnnnnnnnnnnnnnnnnnnnnnnnnnnnnnnnnnnnnnnnnnnnnnnnnnnnnnnnnnnnnnnnnnnnnnnnnnnnnnnnnnnnnnnnnnnnnnnnnnnnnnnnnnnnnnnnnnnnnnnnnnnnnnnnnnnnnnnnnnnnnnnnnnnnnnnnnnnnnnnnnnnnnnnnnnnnnnnnnnnnnnnnnnnnnnnnnnnnnnnnnnnnnnnnnnnnnnnnnnnnnnnnnnnnnnnnnnnnnnnnnnnnnnnnnnnnnnnnnnnnnnnnnnnnnnnnnnnnnnnnnnnnnnnnnnnnnnnnnnnnnnnnnnnnnnnnnnnnnnnnnnnnnnnnnnnnnnnnnnnnnnnnnnnnnnnnnnnnnnnnnnnnnnnnnnnnnnnnnnnnnnnnnnnnnnnnnnnnnnnnnnnnnnnnnnnnnnnnnnnnnnnnnnnnnnnnnnnnnnnnnnnnnnnnnnnnnnnnnnnnnnnnnnnnnnnnnnnnnnnnnnnnnnnnnnnnnnnnnnnnnnnnnnnnnnnnnnnnnnnnnnnnnnnnnnnnnnnnnnnnnnnnnnnnnnnnnnnnnnnnnnnnnnnnnnnnnnnnnnnnnnnnnnnnnnnnnnnnnnnnnnnnnnnnnnnnnnnnnnnnnnnnnnnnnnnnnnnnnnnnnnnnnnnnnnnnnnnnnnnnnnnnnnnnnnnnnnnnnnnnnnnnnnnnnnnnnnnnnnnnnnnnnnnnnnnnnnnnnnnnnnnnnnnnnnnnnnnnnnnnnnnnnnnnnnnnnnnnnnnnnnnnnnnnnnnnnnnnnnnnnnnnnnnnnnnnnnnnnnnnnnnnnnnnnnnnnnnnnnnnnnnnnnnnnnnnnnnnnnnnnnnnnnnnnnnnnnnnnnnnnnnnnnnnnnnnnnnnnnnnnnnnnnnnnnnnnnnnnnnnnnnnnnnnnnnnnnnnnnnnnnnnnnnnnnnnnnnnnnnnnnnnnnnnnnnnnnnnnnnnnnnnnnnnnnnnnnnnnnnnnnnnnnnnnnnnnnnnnnnnnnnnnnnnnnnnnnnnnnnnnnnnnnnnnnnnnnnnnnnnnnnnnnnnnnnnnnnnnnnnnnnnnnnnnnnnnnnnnnnnnnnnnnnnnnnnnnnnnnnnnnnnnnnnnnnnnnnnnnnnnnnnnnnnnnnnnnnnnnnnnnnnnnnnnnnnnnnnnnnnnnnnnnnnnnnnnnnnnnnnnnnnnnnnnnnnnnnnnnnnnnnnnnnnnnnnnnnnnnnnnnnnnnnnnnnnnnnnnnnnnnnnnnnnnnnnnnnnnnnnnnnnnnnnnnnnnnnnnnnnnnnnnnnnnnnnnnnnnnnnnnnnnnnnnnnnnnnnnnnnnnnnnnnnnnnnnnnnnnnnnnnnnnnnnnnnnnnnnnnnnnnnnnnnnnnnnnnnnnnnnnnnnnnnnnnnnnnnnnnnnnnnnnnnnnnnnnnnnnnnnnnnnnnnnnnnnnnnnnnnnnnnnnnnnnnnnnnnnnnnnnnnnnnnnnnnnnnnnnnnnnnnnnnnnnnnnnnnnnnnnnnnnnnnnnnnnnnnnnnnnnnnnnnnnnnnnnnnnnnnnnnnnnnnnnnnnnnnnnnnnnnnnnnnnnnnnnnnnnnnnnnnnnnnnnnnnnnnnnnnnnnnnnnnnnnnnnnnnnnnnnnnnnnnnnnnnnnnnnnnnnnnnnnnnnnnnnnnnnnnnnnnnnnnnnnnnnnnnnnnnnnnnnnnnnnnnnnnnnnnnnnnnnnnnnnnnnnnnnnnnnnnnnnnnnnnnnnnnnnnnnnnnnnnnnnnnnnnnnnnnnnnnnnnnnnnnnnnnnnnnnnnnnnnnnnnnnnnnnnnnnnnnnnnnnnnnnnnnnnnnnnnnnnnnnnnnnnnnnnnnnnnnnnnnnnnnnnnnnnnnnnnnnnnnnnnnnnnnnnnnnnnnnnnnnnnnnnnnnnnnnnnnnnnnnnnnnnnnnnnnnnnnnnnnnnnnnnnnnnnnnnnnnnnnnnnnnnnnnnnnnnnnnnnnnnnnnnnnnnnnnnnnnnnnnnnnnnnnnnnnnnnnnnnnnnnnnnnnnnnnnnnnnnnnnnnnnnnnnnnnnnnnnnnnnnnnnnnnnnnnnnnnnnnnnnnnnnnnnnnnnnnnnnnnnnnnnnnnnnnnnnnnnnnnnnnnnnnnnnnnnnnnnnnnnnnnnnnnnnnnnnnnnnnnnnnnnnnnnnnnnnnnnnnnnnnnnnnnnnnnnnnnnnnnnnnnnnnnnnnnnnnnnnnnnnnnnnnnnnnnnnnnnnnnnnnnnnnnnnnnnnnnnnnnnnnnnnnnnnnnnnnnnnnnnnnnnnnnnnnnnnnnnnnnnnnnnnnnnnnnnnnnnnnnnnnnnnnnnnnnnnnnnnnnnnnnnnnnnnnnnnnnnnnnnnnnnnnnnnnnnnnnnnnnnnnnnnnnnnnnnnnnnnnnnnnnnnnnnnnnnnnnnnnnnnnnnnnnnnnnnnnnnnnnnnnnnnnnnnnnnnnnnnnnnnnnnnnnnnnnnnnnnnnnnnnnnnnnnnnnnnnnnnnnnnnnnnnnnnnnnnnnnnnnnnnnnnnnnnnnnnnnnnnnnnnnnnnnnnnnnnnnnnnnnnnnnnnnnnnnnnnnnnnnnnnnnnnnnnnnnnnnnnnnnnnnnnnnnnnnnnnnnnnnnnnnnnnnnnnnnnnnnnnnnnnnnnnnnnnnnnnnnnnnnnnnnnnnnnnnnnnnnnnnnnnnnnnnnnnnnnnnnnnnnnnnnnnnnnnnnnnnnnnnnnnnnnnnnnnnnnnnnnnnnnnnnnnnnnnnnnnnnnnnnnnnnnnnnnnnnnnnnnnnnnnnnnnnnnnnnnnnnnnnnnnnnnnnnnnnnnnnnnnnnnnnnnnnnnnnnnnnnnnnnnnnnnnnnnnnnnnnnnnnnnnnnnnnnnnnnnnnnnnnnnnnnnnnnnnnnnnnnnnnnnnnnnnnnnnnnnnnnnnnnnnnnnnnnnnnnnnnnnnnnnnnnnnnnnnnnnnnnnnnnnnnnnnnnnnnnnnnnnnnnnnnnnnnnnnnnnnnnnnnnnnnnnnnnnnnnnnnnnnnnnnnnnnnnnnnnnnnnnnnnnnnnnnnnnnnnnnnnnnnnnnnnnnnnnnnnnnnnnnnnnnnnnnnnnnnnnnnnnnnnnnnnnnnnnnnnnnnnnnnnnnnnnnnnnnnnnnnnnnnnnnnnnnnnnnnnnnnnnnnnnnnnnnnnnnnnnnnnnnnnnnnnnnnnnnnnnnnnnnnnnnnnnnnnnnnnnnnnnnnnnnnnnnnnnnnnnnnnnnnnnnnnnnnnnnnnnnnnnnnnnnnnnnnnnnnnnnnnnnnnnnnnnnnnnnnnnnnnnnnnnnnnnnnnnnnnnnnnnnnnnnnnnnnnnnnnnnnnnnnnnnnnnnnnnnnnnnnnnnnnnnnnnnnnnnnnnnnnnnnnnnnnnnnnnnnnnnnnnnnnnnnnnnnnnnnnnnnnnnnnnnnnnnnnnnnnnnnnnnnnnnnnnnnnnnnnnnnnnnnnnnnnnnnnnnnnnnnnnnnnnnnnnnnnnnnnnnnnnnnnnnnnnnnnnnnnnnnnnnnnnnnnnnnnnnnnnnnnnnnnnnnnnnnnnnnnnnnnnnnnnnnnnnnnnnnnnnnnnnnnnnnnnnnnnnnnnnnnnnnnnnnnnnnnnnnnnnnnnnnnnnnnnnnnnnnnnnnnnnnnnnnnnnnnnnnnnnnnnnnnnnnnnnnnnnnnnnnnnnnnnnnnnnnnnnnnnnnnnnnnnnnnnnnnnnnnnnnnnnnnnnnnnnnnnnnnnnnnnnnnnnnnnnnnnnnnnnnnnnnnnnnnnnnnnnnnnnnnnnnnnnnnnnnnnnnnnnnnnnnnnnnnnnnnnnnnnnnnnnnnnnnnnnnnnnnnnnnnnnnnnnnnnnnnnnnnnnnnnnnnnnnnnnnnnnnnnnnnnnnnnnnnnnnnnnnnnnnnnnnnnnnnnnnnnnnnnnnnnnnnnnnnnnnnnnnnnnnnnnnnnnnnnnnnnnnnnnnnnnnnnnnnnnnnnnnnnnnnnnnnnnnnnnnnnnnnnnnnnnnnnnnnnnnnnnnnnnnnnnnnnnnnnnnnnnnnnnnnnnnnnnnnnnnnnnnnnnnnnnnnnnnnnnnnnnnnnnnnnnnnnnnnnnnnnnnnnnnnnnnnnnnnnnnnnnnnnnnnnnnnnnnnnnnnnnnnnnnnnnnnnnnnnnnnnnnnnnnnnnnnnnnnnnnnnnnnnnnnnnnnnnnnnnnnnnnnnnnnnnnnnnnnnnnnnnnnnnnnnnnnnnnnnnnnnnnnnnnnnnnnnnnnnnnnnnnnnnnnnnnnnnnnnnnnnnnnnnnnnnnnnnnnnnnnnnnnnnnnnnnnnnnnnnnnnnnnnnnnnnnnnnnnnnnnnnnnnnnnnnnnnnnnnnnnnnnnnnnnnnnnnnnnnnnnnnnnnnnnnnnnnnnnnnnnnnnnnnnnnnnnnnnnnnnnnnnnnnnnnnnnnnnnnnnnnnnnnnnnnnnnnnnnnnnnnnnnnnnnnnnnnnnnnnnnnnnnnnnnnnnnnnnnnnnnnnnnnnnnnnnnnnnnnnnnnnnnnnnnnnnnnnnnnnnnnnnnnnnnnnnnnnnnnnnnnnnnnnnnnnnnnnnnnnnnnnnnnnnnnnnnnnnnnnnnnnnnnnnnnnnnnnnnnnnnnnnnnnnnnnnnnnnnnnnnnnnnnnnnnnnnnnnnnnnnnnnnnnnnnnnnnnnnnnnnnnnnnnnnnnnnnnnnnnnnnnnnnnnnnnnnnnnnnnnnnnnnnnnnnnnnnnnnnnnnnnnnnnnnnnnnnnnnnnnnnnnnnnnnnnnnnnnnnnnnnnnnnnnnnnnnnnnnnnnnnnnnnnnnnnnnnnnnnnnnnnnnnnnnnnnnnnnnnnnnnnnnnnnnnnnnnnnnnnnnnnnnnnnnnnnnnnnnnnnnnnnnnnnnnnnnnnnnnnnnnnnnnnnnnnnnnnnnnnnnnnnnnnnnnnnnnnnnnnnnnnnnnnnnnnnnnnnnnnnnnnnnnnnnnnnnnnnnnnnnnnnnnnnnnnnnnnnnnnnnnnnnnnnnnnnnnnnnnnnnnnnnnnnnnnnnnnnnnnnnnnnnnnnnnnnnnnnnnnnnnnnnnnnnnnnnnnnnnnnnnnnnnnnnnnnnnnnnnnnnnnnnnnnnnnnnnnnnnnnnnnnnnnnnnnnnnnnnnnnnnnnnnnnnnnnnnnnnnnnnnnnnnnnnnnnnnnnnnnnnnnnnnnnnnnnnnnnnnnnnnnnnnnnnnnnnnnnnnnnnnnnnnnnnnnnnnnnnnnnnnnnnnnnnnnnnnnnnnnnnnnnnnnnnnnnnnnnnnnnnnnnnnnnnnnnnnnnnnnnnnnnnnnnnnnnnnnnnnnnnnnnnnnnnnnnnnnnnnnnnnnnnnnnnnnnnnnnnnnnnnnnnnnnnnnnnnnnnnnnnnnnnnnnnnnnnnnnnnnnnnnnnnnnnnnnnnnnnnnnnnnnnnnnnnnnnnnnnnnnnnnnnnnnnnnnnnnnnnnnnnnnnnnnnnnnnnnnnnnnnnnnnnnnnnnnnnnnnnnnnnnnnnnnnnnnnnnnnnnnnnnnnnnnnnnnnnnnnnnnnnnnnnnnnnnnnnnnnnnnnnnnnnnnnnnnnnnnnnnnnnnnnnnnnnnnnnnnnnnnnnnnnnnnnnnnnnnnnnnnnnnnnnnnnnnnnnnnnnnnnnnnnnnnnnnnnnnnnnnnnnnnnnnnnnnnnnnnnnnnnnnnnnnnnnnnnnnnnnnnnnnnnnnnnnnnnnnnnnnnnnnnnnnnnnnnnnnnnnnnnnnnnnnnnnnnnnnnnnnnnnnnnnnnnnnnnnnnnnnnnnnnnnnnnnnnnnnnnnnnnnnnnnnnnnnnnnnnnnnnnnnnnnnnnnnnnnnnnnnnnnnnnnnnnnnnnnnnnnnnnnnnnnnnnnnnnnnnnnnnnnnnnnnnnnnnnnnnnnnnnnnnnnnnnnnnnnnnnnnnnnnnnnnnnnnnnnnnnnnnnnnnnnnnnnnnnnnnnnnnnnnnnnnnnnnnnnnnnnnnnnnnnnnnnnnnnnnnnnnnnnnnnnnnnnnnnnnnnnnnnnnnnnnnnnnnnnnnnnnnnnnnnnnnnnnnnnnnnnnnnnnnnnnnnnnnnnnnnnnnnnnnnnnnnnnnnnnnnnnnnnnnnnnnnnnnnnnnnnnnnnnnnnnnnnnnnnnnnnnnnnnnnnnnnnnnnnnnnnnnnnnnnnnnnnnnnnnnnnnnnnnnnnnnnnnnnnnnnnnnnnnnnnnnnnnnnnnnnnnnnnnnnnnnnnnnnnnnnnnnnnnnnnnnnnnnnnnnnnnnnnnnnnnnnnnnnnnnnnnnnnnnnnnnnnnnnnnnnnnnnnnnnnnnnnnnnnnnnnnnnnnnnnnnnnnnnnnnnnnnnnnnnnnnnnnnnnnnnnnnnnnnnnnnnnnnnnnnnnnnnnnnnnnnnnnnnnnnnnnnnnnnnnnnnnnnnnnnnnnnnnnnnnnnnnnnnnnnnnnnnnnnnnnnnnnnnnnnnnnnnnnnnnnnnnnnnnnnnnnnnnnnnnnnnnnnnnnnnnnnnnnnnnnnnnnnnnnnnnnnnnnnnnnnnnnnnnnnnnnnnnnnnnnnnnnnnnnnnnnnnnnnnnnnnnnnnnnnnnnnnnnnnnnnnnnnnnnnnnnnnnnnnnnnnnnnnnnnnnnnnnnnnnnnnnnnnnnnnnnnnnnnnnnnnnnnnnnnnnnnnnnnnnnnnnnnnnnnnnnnnnnnnnnnnnnnnnnnnnnnnnnnnnnnnnnnnnnnnnnnnnnnnnnnnnnnnnnnnnnnnnnnnnnnnnnnnnnnnnnnnnnnnnnnnnnnnnnnnnnnnnnnnnnnnnnnnnnnnnnnnnnnnnnnnnnnnnnnnnnnnnnnnnnnnnnnnnnnnnnnnnnnnnnnnnnnnnnnnnnnnnnnnnnnnnnnnnnnnnnnnnnnnnnnnnnnnnnnnnnnnnnnnnnnnnnnnnnnnnnnnnnnnnnnnnnnnnnnnnnnnnnnnnnnnnnnnnnnnnnnnnnnnnnnnnnnnnnnnnnnnnnnnnnnnnnnnnnnnnnnnnnnnnnnnnnnnnnnnnnnnnnnnnnnnnnnnnnnnnnnnnnnnnnnnnnnnnnnnnnnnnnnnnnnnnnnnnnnnnnnnnnnnnnnnnnnnnnnnnnnnnnnnnnnnnnnnnnnnnnnnnnnnnnnnnnnnnnnnnnnnnnnnnnnnnnnnnnnnnnnnnnnnnnnnnnnnnnnnnnnnnnnnnnnnnnnnnnnnnnnnnnnnnnnnnnnnnnnnnnnnnnnnnnnnnnnnnnnnnnnnnnnnnnnnnnnnnnnnnnnnnnnnnnnnnnnnnnnnnnnnnnnnnnnnnnnnnnnnnnnnnnnnnnnnnnnnnnnnnnnnnnnnnnnnnnnnnnnnnnnnnnnnnnnnnnnnnnnnnnnnnnnnnnnnnnnnnnnnnnnnnnnnnnnnnnnnnnnnnnnnnnnnnnnnnnnnnnnnnnnnnnnnnnnnnnnnnnnnnnnnnnnnnnnnnnnnnnnnnnnnnnnnnnnnnnnnnnnnnnnnnnnnnnnnnnnnnnnnnnnnnnnnnnnnnnnnnnnnnnnnnnnnnnnnnnnnnnnnnnnnnnnnnnnnnnnnnnnnnnnnnnnnnnnnnnnnnnnnnnnnnnnnnnnnnnnnnnnnnnnnnnnnnnnnnnnnnnnnnnnnnnnnnnnnnnnnnnnnnnnnnnnnnnnnnnnnnnnnnnnnnnnnnnnnnnnnnnnnnnnnnnnnnnnnnnnnnnnnnnnnnnnnnnnnnnnnnnnnnnnnnnnnnnnnnnnnnnnnnnnnnnnnnnnnnnnnnnnnnnnnnnnnnnnnnnnnnnnnnnnnnnnnnnnnnnnnnnnnnnnnnnnnnnnnnnnnnnnnnnnnnnnnnnnnnnnnnnnnnnnnnnnnnnnnnnnnnnnnnnnnnnnnnnnnnnnnnnnnnnnnnnnnnnnnnnnnnnnnnnnnnnnnnnnnnnnnnnnnnnnnnnnnnnnnnnnnnnnnnnnnnnnnnnnnnnnnnnnnnnnnnnnnnnnnnnnnnnnnnnnnnnnnnnnnnnnnnnnnnnnnnnnnnnnnnnnnnnnnnnnnnnnnnnnnnnnnnnnnnnnnnnnnnnnnnnnnnnnnnnnnnnnnnnnnnnnnnnnnnnnnnnnnnnnnnnnnnnnnnnnnnnnnnnnnnnnnnnnnnnnnnnnnnnnnnnnnnnnnnnnnnnnnnnnnnnnnnnnnnnnnnnnnnnnnnnnnnnnnnnnnnnnnnnnnnnnnnnnnnnnnnnnnnnnnnnnnnnnnnnnnnnnnnnnnnnnnnnnnnnnnnnnnnnnnnnnnnnnnnnnnnnnnnnnnnnnnnnnnnnnnnnnnnnnnnnnnnnnnnnnnnnnnnnnnnnnnnnnnnnnnnnnnnnnnnnnnnnnnnnnnnnnnnnnnnnnnnnnnnnnnnnnnnnnnnnnnnnnnnnnnnnnnnnnnnnnnnnnnnnnnnnnnnnnnnnnnnnnnnnnnnnnnnnnnnnnnnnnnnnnnnnnnnnnnnnnnnnnnnnnnnnnnnnnnnnnnnnnnnnnnnnnnnnnnnnnnnnnnnnnnnnnnnnnnnnnnnnnnnnnnnnnnnnnnnnnnnnnnnnnnnnnnnnnnnnnnnnnnnnnnnnnnnnnnnnnnnnnnnnnnnnnnnnnnnnnnnnnnnnnnnnnnnnnnnnnnnnnnnnnnnnnnnnnnnnnnnnnnnnnnnnnnnnnnnnnnnnnnnnnnnnnnnnnnnnnnnnnnnnnnnnnnnnnnnnnnnnnnnnnnnnnnnnnnnnnnnnnnnnnnnnnnnnnnnnnnnnnnnnnnnnnnnnnnnnnnnnnnnnnnnnnnnnnnnnnnnnnnnnnnnnnnnnnnnnnnnnnnnnnnnnnnnnnnnnnnnnnnnnnnnnnnnnnnnnnnnnnnnnnnnnnnnnnnnnnnnnnnnnnnnnnnnnnnnnnnnnnnnnnnnnnnnnnnnnnnnnnnnnnnnnnnnnnnnnnnnnnnnnnnnnnnnnnnnnnnnnnnnnnnnnnnnnnnnnnnnnnnnnnnnnnnnnnnnnnnnnnnnnnnnnnnnnnnnnnnnnnnnnnnnnnnnnnnnnnnnnnnnnnnnnnnnnnnnnnnnnnnnnnnnnnnnnnnnnnnnnnnnnnnnnnnnnnnnnnnnnnnnnnnnnnnnnnnnnnnnnnnnnnnnnnnnnnnnnnnnnnnnnnnnnnnnnnnnnnnnnnnnnnnnnnnnnnnnnnnnnnnnnnnnnnnnnnnnnnnnnnnnnnnnnnnnnnnnnnnnnnnnnnnnnnnnnnnnnnnnnnnnnnnnnnnnnnnnnnnnnnnnnnnnnnnnnnnnnnnnnnnnnnnnnnnnnnnnnnnnnnnnnnnnnnnnnnnnnnnnnnnnnnnnnnnnnnnnnnnnnnnnnnnnnnnnnnnnnnnnnnnnnnnnnnnnnnnnnnnnnnnnnnnnnnnnnnnnnnnnnnnnnnnnnnnnnnnnnnnnnnnnnnnnnnnnnnnnnnnnnnnnnnnnnnnnnnnnnnnnnnnnnnnnnnnnnnnnnnnnnnnnnnnnnnnnnnnnnnnnnnnnnnnnnnnnnnnnnnnnnnnnnnnnnnnnnnnnnnnnnnnnnnnnnnnnnnnnnnnnnnnnnnnnnnnnnnnnnnnnnnnnnnnnnnnnnnnnnnnnnnnnnnnnnnnnnnnnnnnnnnnnnnnnnnnnnnnnnnnnnnnnnnnnnnnnnnnnnnnnnnnnnnnnnnnnnnnnnnnnnnnnnnnnnnnnnnnnnnnnnnnnnnnnnnnnnnnnnnnnnnnnnnnnnnnnnnnnnnnnnnnnnnnnnnnnnnnnnnnnnnnnnnnnnnnnnnnnnnnnnnnnnnnnnnnnnnnnnnnnnnnnnnnnnnnnnnnnnnnnnnnnnnnnnnnnnnnnnnnnnnnnnnnnnnnnnnnnnnnnnnnnnnnnnnnnnnnnnnnnnnnnnnnnnnnnnnnnnnnnnnnnnnnnnnnnnnnnnnnnnnnnnnnnnnnnnnnnnnnnnnnnnnnnnnnnnnnnnnnnnnnnnnnnnnnnnnnnnnnnnnnnnnnnnnnnnnnnnnnnnnnnnnnnnnnnnnnnnnnnnnnnnnnnnnnnnnnnnnnnnnnnnnnnnnnnnnnnnnnnnnnnnnnnnnnnnnnnnnnnnnnnnnnnnnnnnnnnnnnnnnnnnnnnnnnnnnnnnnnnnnnnnnnnnnnnnnnnnnnnnnnnnnnnnnnnnnnnnnnnnnnnnnnnnnnnnnnnnnnnnnnnnnnnnnnnnnnnnnnnnnnnnnnnnnnnnnnnnnnnnnnnnnnnnnnnnnnnnnnnnnnnnnnnnnnnnnnnnnnnnnnnnnnnnnnnnnnnnnnnnnnnnnnnnnnnnnnnnnnnnnnnnnnnnnnnnnnnnnnnnnnnnnnnnnnnnnnnnnnnnnnnnnnnnnnnnnnnnnnnnnnnnnnnnnnnnnnnnnnnnnnnnnnnnnnnnnnnnnnnnnnnnnnnnnnnnnnnnnnnnnnnnnnnnnnnnnnnnnnnnnnnnnnnnnnnnnnnnnnnnnnnnnnnnnnnnnnnnnnnnnnnnnnnnnnnnnnnnnnnnnnnnnnnnnnnnnnnnnnnnnnnnnnnnnnnnnnnnnnnnnnnnnnnnnnnnnnnnnnnnnnnnnnnnnnnnnnnnnnnnnnnnnnnnnnnnnnnnnnnnnnnnnnnnnnnnnnnnnnnnnnnnnnnnnnnnnnnnnnnnnnnnnnnnnnnnnnnnnnnnnnnnnnnnnnnnnnnnnnnnnnnnnnnnnnnnnnnnnnnnnnnnnnnnnnnnnnnnnnnnnnnnnnnnnnnnnnnnnnnnnnnnnnnnnnnnnnnnnnnnnnnnnnnnnnnnnnnnnnnnnnnnnnnnnnnnnnnnnnnnnnnnnnnnnnnnnnnnnnnnnnnnnnnnnnnnnnnnnnnnnnnnnnnnnnnnnnnnnnnnnnnnnnnnnnnnnnnnnnnnnnnnnnnnnnnnnnnnnnnnnnnnnnnnnnnnnnnnnnnnnnnnnnnnnnnnnnnnnnnnnnnnnnnnnnnnnnnnnnnnnnnnnnnnnnnnnnnnnnnnnnnnnnnnnnnnnnnnnnnnnnnnnnnnnnnnnnnnnnnnnnnnnnnnnnnnnnnnnnnnnnnnnnnnnnnnnnnnnnnnnnnnnnnnnnnnnnnnnnnnnnnnnnnnnnnnnnnnnnnnnnnnnnnnnnnnnnnnnnnnnnnnnnnnnnnnnnnnnnnnnnnnnnnnnnnnnnnnnnnnnnnnnnnnnnnnnnnnnnnnnnnnnnnnnnnnnnnnnnnnnnnnnnnnnnnnnnnnnnnnnnnnnnnnnnnnnnnnnnnnnnnnnnnnnnnnnnnnnnnnnnnnnnnnnnnnnnnnnnnnnnnnnnnnnnnnnnnnnnnnnnnnnnnnnnnnnnnnnnnnnnnnnnnnnnnnnnnnnnnnnnnnnnnnnnnnnnnnnnnnnnnnnnnnnnnnnnnnnnnnnnnnnnnnnnnnnnnnnnnnnnnnnnnnnnnnnnnnnnnnnnnnnnnnnnnnnnnnnnnnnnnnnnnnnnnnnnnnnnnnnnnnnnnnnnnnnnnnnnnnnnnnnnnnnnnnnnnnnnnnnnnnnnnnnnnnnnnnnnnnnnnnnnnnnnnnnnnnnnnnnnnnnnnnnnnnnnnnnnnnnnnnnnnnnnnnnnnnnnnnnnnnnnnnnnnnnnnnnnnnnnnnnnnnnnnnnnnnnnnnnnnnnnnnnnnnnnnnnnnnnnnnnnnnnnnnnnnnnnnnnnnnnnnnnnnnnnnnnnnnnnnnnnnnnnnnnnnnnnnnnnnnnnnnnnnnnnnnnnnnnnnnnnnnnnnnnnnnnnnnnnnnnnnnnnnnnnnnnnnnnnnnnnnnnnnnnnnnnnnnnnnnnnnnnnnnnnnnnnnnnnnnnnnnnnnnnnnnnnnnnnnnnnnnnnnnnnnnnnnnnnnnnnnnnnnnnnnnnnnnnnnnnnnnnnnnnnnnnnnnnnnnnnnnnnnnnnnnnnnnnnnnnnnnnnnnnnnnnnnnnnnnnnnnnnnnnnnnnnnnnnnnnnnnnnnnnnnnnnnnnnnnnnnnnnnnnnnnnnnnnnnnnnnnnnnnnnnnnnnnnnnnnnnnnnnnnnnnnnnnnnnnnnnnnnnnnnnnnnnnnnnnnnnnnnnnnnnnnnnnnnnnnnnnnnnnnnnnnnnnnnnnnnnnnnnnnnnnnnnnnnnnnnnnnnnnnnnnnnnnnnnnnnnnnnnnnnnnnnnnnnnnnnnnnnnnnnnnnnnnnnnnnnnnnnnnnnnnnnnnnnnnnnnnnnnnnnnnnnnnnnnnnnnnnnnnnnnnnnnnnnnnnnnnnnnnnnnnnnnnnnnnnnnnnnnnnnnnnnnnnnnnnnnnnnnnnnnnnnnnnnnnnnnnnnnnnnnnnnnnnnnnnnnnnnnnnnnnnnnnnnnnnnnnnnnnnnnnnnnnnnnnnnnnnnnnnnnnnnnnnnnnnnnnnnnnnnnnnnnnnnnnnnnnnnnnnnnnnnnnnnnnnnnnnnnnnnnnnnnnnnnnnnnnnnnnnnnnnnnnnnnnnnnnnnnnnnnnnnnnnnnnnnnnnnnnnnnnnnnnnnnnnnnnnnnnnnnnnnnnnnnnnnnnnnnnnnnnnnnnnnnnnnnnnnnnnnnnnnnnnnnnnnnnnnnnnnnnnnnnnnnnnnnnnnnnnnnnnnnnnnnnnnnnnnnnnnnnnnnnnnnnnnnnnnnnnnnnnnnnnnnnnnnnnnnnnnnnnnnnnnnnnnnnnnnnnnnnnnnnnnnnnnnnnnnnnnnnnnnnnnnnnnnnnnnnnnnnnnnnnnnnnnnnnnnnnnnnnnnnnnnnnnnnnnnnnnnnnnnnnnnnnnnnnnnnnnnnnnnnnnnnnnnnnnnnnnnnnnnnnnnnnnnnnnnnnnnnnnnnnnnnnnnnnnnnnnnnnnnnnnnnnnnnnnnnnnnnnnnnnnnnnnnnnnnnnnnnnnnnnnnnnnnnnnnnnnnnnnnnnnnnnnnnnnnnnnnnnnnnnnnnnnnnnnnnnnnnnnnnnnnnnnnnnnnnnnnnnnnnnnnnnnnnnnnnnnnnnnnnnnnnnnnnnnnnnnnnnnnnnnnnnnnnnnnnnnnnnnnnnnnnnnnnnnnnnnnnnnnnnnnnnnnnnnnnnnnnnnnnnnnnnnnnnnnnnnnnnnnnnnnnnnnnnnnnnnnnnnnnnnnnnnnnnnnnnnnnnnnnnnnnnnnnnnnnnnnnnnnnnnnnnnnnnnnnnnnnnnnnnnnnnnnnnnnnnnnnnnnnnnnnnnnnnnnnnnnnnnnnnnnnnnnnnnnnnnnnnnnnnnnnnnnnnnnnnnnnnnnnnnnnnnnnnnnnnnnnnnnnnnnnnnnnnnnnnnnnnnnnnnnnnnnnnnnnnnnnnnnnnnnnnnnnnnnnnnnnnnnnnnnnnnnnnnnnnnnnnnnnnnnnnnnnnnnnnnnnnnnnnnnnnnnnnnnnnnnnnnnnnnnnnnnnnnnnnnnnnnnnnnnnnnnnnnnnnnnnnnnnnnnnnnnnnnnnnnnnnnnnnnnnnnnnnnnnnnnnnnnnnnnnnnnnnnnnnnnnnnnnnnnnnnnnnnnnnnnnnnnnnnnnnnnnnnnnnnnnnnnnnnnnnnnnnnnnnnnnnnnnnnnnnnnnnnnnnnnnnnnnnnnnnnnnnnnnnnnnnnnnnnnnnnnnnnnnnnnnnnnnnnnnnnnnnnnnnnnnnnnnnnnnnnnnnnnnnnnnnnnnnnnnnnnnnnnnnnnnnnnnnnnnnnnnnnnnnnnnnnnnnnnnnnnnnnnnnnnnnnnnnnnnnnnnnnnnnnnnnnnnnnnnnnnnnnnnnnnnnnnnnnnnnnnnnnnnnnnnnnnnnnnnnnnnnnnnnnnnnnnnnnnnnnnnnnnnnnnnnnnnnnnnnnnnnnnnnnnnnnnnnnnnnnnnnnnnnnnnnnnnnnnnnnnnnnnnnnnnnnnnnnnnnnnnnnnnnnnnnnnnnnnnnnnnnnnnnnnnnnnnnnnnnnnnnnnnnnnnnnnnnnnnnnnnnnnnnnnnnnnnnnnnnnnnnnnnnnnnnnnnnnnnnnnnnnnnnnnnnnnnnnnnnnnnnnnnnnnnnnnnnnnnnnnnnnnnnnnnnnnnnnnnnnnnnnnnnnnnnnnnnnnnnnnnnnnnnnnnnnnnnnnnnnnnnnnnnnnnnnnnnnnnnnnnnnnnnnnnnnnnnnnnnnnnnnnnnnnnnnnnnnnnnnnnnnnnnnnnnnnnnnnnnnnnnnnnnnnnnnnnnnnnnnnnnnnnnnnnnnnnnnnnnnnnnnnnnnnnnnnnnnnnnnnnnnnnnnnnnnnnnnnnnnnnnnnnnnnnnnnnnnnnnnnnnnnnnnnnnnnnnnnnnnnnnnnnnnnnnnnnnnnnnnnnnnnnnnnnnnnnnnnnnnnnnnnnnnnnnnnnnnnnnnnnnnnnnnnnnnnnnnnnnnnnnnnnnnnnnnnnnnnnnnnnnnnnnnnnnnnnnnnnnnnnnnnnnnnnnnnnnnnnnnnnnnnnnnnnnnnnnnnnnnnnnnnnnnnnnnnnnnnnnnnnnnnnnnnnnnnnnnnnnnnnnnnnnnnnnnnnnnnnnnnnnnnnnnnnnnnnnnnnnnnnnnnnnnnnnnnnnnnnnnnnnnnnnnnnnnnnnnnnnnnnnnnnnnnnnnnnnnnnnnnnnnnnnnnnnnnnnnnnnnnnnnnnnnnnnnnnnnnnnnnnnnnnnnnnnnnnnnnnnnnnnnnnnnnnnnnnnnnnnnnnnnnnnnnnnnnnnnnnnnnnnnnnnnnnnnnnnnnnnnnnnnnnnnnnnnnnnnnnnnnnnnnnnnnnnnnnnnnnnnnnnnnnnnnnnnnnnnnnnnnnnnnnnnnnnnnnnnnnnnnnnnnnnnnnnnnnnnnnnnnnnnnnnnnnnnnnnnnnnnnnnnnnnnnnnnnnnnnnnnnnnnnnnnnnnnnnnnnnnnnnnnnnnnnnnnnnnnnnnnnnnnnnnnnnnnnnnnnnnnnnnnnnnnnnnnnnnnnnnnnnnnnnnnnnnnnnnnnnnnnnnnnnnnnnnnnnnnnnnnnnnnnnnnnnnnnnnnnnnnnnnnnnnnnnnnnnnnnnnnnnnnnnnnnnnnnnnnnnnnnnnnnnnnnnnnnnnnnnnnnnnnnnnnnnnnnnnnnnnnnnnnnnnnnnnnnnnnnnnnnnnnnnnnnnnnnnnnnnnnnnnnnnnnnnnnnnnnnnnnnnnnnnnnnnnnnnnnnnnnnnnnnnnnnnnnnnnnnnnnnnnnnnnnnnnnnnnnnnnnnnnnnnnnnnnnnnnnnnnnnnnnnnnnnnnnnnnnnnnnnnnnnnnnnnnnnnnnnnnnnnnnnnnnnnnnnnnnnnnnnnnnnnnnnnnnnnnnnnnnnnnnnnnnnnnnnnnnnnnnnnnnnnnnnnnnnnnnnnnnnnnnnnnnnnnnnnnnnnnnnnnnnnnnnnnnnnnnnnnnnnnnnnnnnnnnnnnnnnnnnnnnnnnnnnnnnnnnnnnnnnnnnnnnnnnnnnnnnnnnnnnnnnnnnnnnnnnnnnnnnnnnnnnnnnnnnnnnnnnnnnnnnnnnnnnnnnnnnnnnnnnnnnnnnnnnnnnnnnnnnnnnnnnnnnnnnnnnnnnnnnnnnnnnnnnnnnnnnnnnnnnnnnnnnnnnnnnnnnnnnnnnnnnnnnnnnnnnnnnnnnnnnnnnnnnnnnnnnnnnnnnnnnnnnnnnnnnnnnnnnnnnnnnnnnnnnnnnnnnnnnnnnnnnnnnnnnnnnnnnnnnnnnnnnnnnnnnnnnnnnnnnnnnnnnnnnnnnnnnnnnnnnnnnnnnnnnnnnnnnnnnnnnnnnnnnnnnnnnnnnnnnnnnnnnnnnnnnnnnnnnnnnnnnnnnnnnnnnnnnnnnnnnnnnnnnnnnnnnnnnnnnnnnnnnnnnnnnnnnnnnnnnnnnnnnnnnnnnnnnnnnnnnnnnnnnnnnnnnnnnnnnnnnnnnnnnnnnnnnnnnnnnnnnnnnnnnnnnnnnnnnnnnnnnnnnnnnnnnnnnnnnnnnnnnnnnnnnnnnnnnnnnnnnnnnnnnnnnnnnnnnnnnnnnnnnnnnnnnnnnnnnnnnnnnnnnnnnnnnnnnnnnnnnnnnnnnnnnnnnnnnnnnnnnnnnnnnnnnnnnnnnnnnnnnnnnnnnnnnnnnnnnnnnnnnnnnnnnnnnnnnnnnnnnnnnnnnnnnnnnnnnnnnnnnnnnnnnnnnnnnnnnnnnnnnnnnnnnnnnnnnnnnnnnnnnnnnnnnnnnnnnnnnnnnnnnnnnnnnnnnnnnnnnnnnnnnnnnnnnnnnnnnnnnnnnnnnnnnnnnnnnnnnnnnnnnnnnnnnnnnnnnnnnnnnnnnnnnnnnnnnnnnnnnnnnnnnnnnnnnnnnnnnnnnnnnnnnnnnnnnnnnnnnnnnnnnnnnnnnnnnnnnnnnnnnnnnnnnnnnnnnnnnnnnnnnnnnnnnnnnnnnnnnnnnnnnnnnnnnnnnnnnnnnnnnnnnnnnnnnnnnnnnnnnnnnnnnnnnnnnnnnnnnnnnnnnnnnnnnnnnnnnnnnnnnnnnnnnnnnnnnnnnnnnnnnnnnnnnnnnnnnnnnnnnnnnnnnnnnnnnnnnnnnnnnnnnnnnnnnnnnnnnnnnnnnnnnnnnnnnnnnnnnnnnnnnnnnnnnnnnnnnnnnnnnnnnnnnnnnnnnnnnnnnnnnnnnnnnnnnnnnnnnnnnnnnnnnnnnnnnnnnnnnnnnnnnnnnnnnnnnnnnnnnnnnnnnnnnnnnnnnnnnnnnnnnnnnnnnnnnnnnnnnnnnnnnnnnnnnnnnnnnnnnnnnnnnnnnnnnnnnnnnnnnnnnnnnnnnnnnnnnnnnnnnnnnnnnnnnnnnnnnnnnnnnnnnnnnnnnnnnnnnnnnnnnnnnnnnnnnnnnnnnnnnnnnnnnnnnnnnnnnnnnnnnnnnnnnnnnnnnnnnnnnnnnnnnnnnnnnnnnnnnnnnnnnnnnnnnnnnnnnnnnnnnnnnnnnnnnnnnnnnnnnnnnnnnnnnnnnnnnnnnnnnnnnnnnnnnnnnnnnnnnnnnnnnnnnnnnnnnnnnnnnnnnnnnnnnnnnnnnnnnnnnnnnnnnnnnnnnnnnnnnnnnnnnnnnnnnnnnnnnnnnnnnnnnnnnnnnnnnnnnnnnnnnnnnnnnnnnnnnnnnnnnnnnnnnnnnnnnnnnnnnnnnnnnnnnnnnnnnnnnnnnnnnnnnnnnnnnnnnnnnnnnnnnnnnnnnnnnnnnnnnnnnnnnnnnnnnnnnnnnnnnnnnnnnnnnnnnnnnnnnnnnnnnnnnnnnnnnnnnnnnnnnnnnnnnnnnnnnnnnnnnnnnnnnnnnnnnnnnnnnnnnnnnnnnnnnnnnnnnnnnnnnnnnnnnnnnnnnnnnnnnnnnnnnnnnnnnnnnnnnnnnnnnnnnnnnnnnnnnnnnnnnnnnnnnnnnnnnnnnnnnnnnnnnnnnnnnnnnnnnnnnnnnnnnnnnnnnnnnnnnnnnnnnnnnnnnnnnnnnnnnnnnnnnnnnnnnnnnnnnnnnnnnnnnnnnnnnnnnnnnnnnnnnnnnnnnnnnnnnnnnnnnnnnnnnnnnnnnnnnnnnnnnnnnnnnnnnnnnnnnnnnnnnnnnnnnnnnnnnnnnnnnnnnnnnnnnnnnnnnnnnnnnnnnnnnnnnnnnnnnnnnnnnnnnnnnnnnnnnnnnnnnnnnnnnnnnnnnnnnnnnnnnnnnnnnnnnnnnnnnnnnnnnnnnnnnnnnnnnnnnnnnnnnnnnnnnnnnnnnnnnnnnnnnnnnnnnnnnnnnnnnnnnnnnnnnnnnnnnnnnnnnnnnnnnnnnnnnnnnnnnnnnnnnnnnnnnnnnnnnnnnnnnnnnnnnnnnnnnnnnnnnnnnnnnnnnnnnnnnnnnnnnnnnnnnnnnnnnnnnnnnnnnnnnnnnnnnnnnnnnnnnnnnnnnnnnnnnnnnnnnnnnnnnnnnnnnnnnnnnnnnnnnnnnnnnnnnnnnnnnnnnnnnnnnnnnnnnnnnnnnnnnnnnnnnnnnnnnnnnnnnnnnnnnnnnnnnnnnnnnnnnnnnnnnnnnnnnnnnnnnnnnnnnnnnnnnnnnnnnnnnnnnnnnnnnnnnnnnnnnnnnnnnnnnnnnnnnnnnnnnnnnnnnnnnnnnnnnnnnnnnnnnnnnnnnnnnnnnnnnnnnnnnnnnnnnnnnnnnnnnnnnnnnnnnnnnnnnnnnnnnnnnnnnnnnnnnnnnnnnnnnnnnnnnnnnnnnnnnnnnnnnnnnnnnnnnnnnnnnnnnnnnnnnnnnnnnnnnnnnnnnnnnnnnnnnnnnnnnnnnnnnnnnnnnnnnnnnnnnnnnnnnnnnnnnnnnnnnnnnnnnnnnnnnnnnnnnnnnnnnnnnnnnnnnnnnnnnnnnnnnnnnnnnnnnnnnnnnnnnnnnnnnnnnnnnnnnnnnnnnnnnnnnnnnnnnnnnnnnnnnnnnnnnnnnnnnnnnnnnnnnnnnnnnnnnnnnnnnnnnnnnnnnnnnnnnnnnnnnnnnnnnnnnnnnnnnnnnnnnnnnnnnnnnnnnnnnnnnnnnnnnnnnnnnnnnnnnnnnnnnnnnnnnnnnnnnnnnnnnnnnnnnnnnnnnnnnnnnnnnnnnnnnnnnnnnnnnnnnnnnnnnnnnnnnnnnnnnnnnnnnnnnnnnnnnnnnnnnnnnnnnnnnnnnnnnnnnnnnnnnnnnnnnnnnnnnnnnnnnnnnnnnnnnnnnnnnnnnnnnnnnnnnnnnnnnnnnnnnnnnnnnnnnnnnnnnnnnnnnnnnnnnnnnnnnnnnnnnnnnnnnnnnnnnnnnnnnnnnnnnnnnnnnnnnnnnnnnnnnnnnnnnnnnnnnnnnnnnnnnnnnnnnnnnnnnnnnnnnnnnnnnnnnnnnnnnnnnnnnnnnnnnnnnnnnnnnnnnnnnnnnnnnnnnnnnnnnnnnnnnnnnnnnnnnnnnnnnnnnnnnnnnnnnnnnnnnnnnnnnnnnnnnnnnnnnnnnnnnnnnnnnnnnnnnnnnnnnnnnnnnnnnnnnnnnnnnnnnnnnnnnnnnnnnnnnnnnnnnnnnnnnnnnnnnnnnnnnnnnnnnnnnnnnnnnnnnnnnnnnnnnnnnnnnnnnnnnnnnnnnnnnnnnnnnnnnnnnnnnnnnnnnnnnnnnnnnnnnnnnnnnnnnnnnnnnnnnnnnnnnnnnnnnnnnnnnnnnnnnnnnnnnnnnnnnnnnnnnnnnnnnnnnnnnnnnnnnnnnnnnnnnnnnnnnnnnnnnnnnnnnnnnnnnnnnnnnnnnnnnnnnnnnnnnnnnnnnnnnnnnnnnnnnnnnnnnnnnnnnnnnnnnnnnnnnnnnnnnnnnnnnnnnnnnnnnnnnnnnnnnnnnnnnnnnnnnnnnnnnnnnnnnnnnnnnnnnnnnnnnnnnnnnnnnnnnnnnnnnnnnnnnnnnnnnnnnnnnnnnnnnnnnnnnnnnnnnnnnnnnnnnnnnnnnnnnnnnnnnnnnnnnnnnnnnnnnnnnnnnnnnnnnnnnnnnnnnnnnnnnnnnnnnnnnnnnnnnnnnnnnnnnnnnnnnnnnnnnnnnnnnnnnnnnnnnnnnnnnnnnnnnnnnnnnnnnnnnnnnnnnnnnnnnnnnnnnnnnnnnnnnnnnnnnnnnnnnnnnnnnnnnnnnnnnnnnnnnnnnnnnnnnnnnnnnnnnnnnnnnnnnnnnnnnnnnnnnnnnnnnnnnnnnnnnnnnnnnnnnnnnnnnnnnnnnnnnnnnnnnnnnnnnnnnnnnnnnnnnnnnnnnnnnnnnnnnnnnnnnnnnnnnnnnnnnnnnnnnnnnnnnnnnnnnnnnnnnnnnnnnnnnnnnnnnnnnnnnnnnnnnnnnnnnnnnnnnnnnnnnnnnnnnnnnnnnnnnnnnnnnnnnnnnnnnnnnnnnnnnnnnnnnnnnnnnnnnnnnnnnnnnnnnnnnnnnnnnnnnnnnnnnnnnnnnnnnnnnnnnnnnnnnnnnnnnnnnnnnnnnnnnnnnnnnnnnnnnnnnnnnnnnnnnnnnnnnnnnnnnnnnnnnnnnnnnnnnnnnnnnnnnnnnnnnnnnnnnnnnnnnnnnnnnnnnnnnnnnnnnnnnnnnnnnnnnnnnnnnnnnnnnnnnnnnnnnnnnnnnnnnnnnnnnnnnnnnnnnnnnnnnnnnnnnnnnnnnnnnnnnnnnnnnnnnnnnnnnnnnnnnnnnnnnnnnnnnnnnnnnnnnnnnnnnnnnnnnnnnnnnnnnnnnnnnnnnnnnnnnnnnnnnnnnnnnnnnnnnnnnnnnnnnnnnnnnnnnnnnnnnnnnnnnnnnnnnnnnnnnnnnnnnnnnnnnnnnnnnnnnnnnnnnnnnnnnnnnnnnnnnnnnnnnnnnnnnnnnnnnnnnnnnnnnnnnnnnnnnnnnnnnnnnnnnnnnnnnnnnnnnnnnnnnnnnnnnnnnnnnnnnnnnnnnnnnnnnnnnnnnnnnnnnnnnnnnnnnnnnnnnnnnnnnnnnnnnnnnnnnnnnnnnnnnnnnnnnnnnnnnnnnnnnnnnnnnnnnnnnnnnnnnnnnnnnnnnnnnnnnnnnnnnnnnnnnnnnnnnnnnnnnnnnnnnnnnnnnnnnnnnnnnnnnnnnnnnnnnnnnnnnnnnnnnnnnnnnnnnnnnnnnnnnnnnnnnnnnnnnnnnnnnnnnnnnnnnnnnnnnnnnnnnnnnnnnnnnnnnnnnnnnnnnnnnnnnnnnnnnnnnnnnnnnnnnnnnnnnnnnnnnnnnnnnnnnnnnnnnnnnnnnnnnnnnnnnnnnnnnnnnnnnnnnnnnnnnnnnnnnnnnnnnnnnnnnnnnnnnnnnnnnnnnnnnnnnnnnnnnnnnnnnnnnnnnnnnnnnnnnnnnnnnnnnnnnnnnnnnnnnnnnnnnnnnnnnnnnnnnnnnnnnnnnnnnnnnnnnnnnnnnnnnnnnnnnnnnnnnnnnnnnnnnnnnnnnnnnnnnnnnnnnnnnnnnnnnnnnnnnnnnnnnnnnnnnnnnnnnnnnnnnnnnnnnnnnnnnnnnnnnnnnnnnnnnnnnnnnnnnnnnnnnnnnnnnnnnnnnnnnnnnnnnnnnnnnnnnnnnnnnnnnnnnnnnnnnnnnnnnnnnnnnnnnnnnnnnnnnnnnnnnnnnnnnnnnnnnnnnnnnnnnnnnnnnnnnnnnnnnnnnnnnnnnnnnnnnnnnnnnnnnnnnnnnnnnnnnnnnnnnnnnnnnnnnnnnnnnnnnnnnnnnnnnnnnnnnnnnnnnnnnnnnnnnnnnnnnnnnnnnnnnnnnnnnnnnnnnnnnnnnnnnnnnnnnnnnnnnnnnnnnnnnnnnnnnnnnnnnnnnnnnnnnnnnnnnnnnnnnnnnnnnnnnnnnnnnnnnnnnnnnnnnnnnnnnnnnnnnnnnnnnnnnnnnnnnnnnnnnnnnnnnnnnnnnnnnnnnnnnnnnnnnnnnnnnnnnnnnnnnnnnnnnnnnnnnnnnnnnnnnnnnnnnnnnnnnnnnnnnnnnnnnnnnnnnnnnnnnnnnnnnnnnnnnnnnnnnnnnnnnnnnnnnnnnnnnnnnnnnnnnnnnnnnnnnnnnnnnnnnnnnnnnnnnnnnnnnnnnnnnnnnnnnnnnnnnnnnnnnnnnnnnnnnnnnnnnnnnnnnnnnnnnnnnnnnnnnnnnnnnnnnnnnnnnnnnnnnnnnnnnnnnnnnnnnnnnnnnnnnnnnnnnnnnnnnnnnnnnnnnnnnnnnnnnnnnnnnnnnnnnnnnnnnnnnnnnnnnnnnnnnnnnnnnnnnnnnnnnnnnnnnnnnnnnnnnnnnnnnnnnnnnnnnnnnnnnnnnnnnnnnnnnnnnnnnnnnnnnnnnnnnnnnnnnnnnnnnnnnnnnnnnnnnnnnnnnnnnnnnnnnnnnnnnnnnnnnnnnnnnnnnnnnnnnnnnnnnnnnnnnnnnnnnnnnnnnnnnnnnnnnnnnnnnnnnnnnnnnnnnnnnnnnnnnnnnnnnnnnnnnnnnnnnnnnnnnnnnnnnnnnnnnnnnnnnnnnnnnnnnnnnnnnnnnnnnnnnnnnnnnnnnnnnnnnnnnnnnnnnnnnnnnnnnnnnnnnnnnnnnnnnnnnnnnnnnnnnnnnnnnnnnnnnnnnnnnnnnnnnnnnnnnnnnnnnnnnnnnnnnnnnnnnnnnnnnnnnnnnnnnnnnnnnnnnnnnnnnnnnnnnnnnnnnnnnnnnnnnnnnnnnnnnnnnnnnnnnnnnnnnnnnnnnnnnnnnnnnnnnnnnnnnnnnnnnnnnnnnnnnnnnnnnnnnnnnnnnnnnnnnnnnnnnnnnnnnnnnnnnnnnnnnnnnnnnnnnnnnnnnnnnnnnnnnnnnnnnnnnnnnnnnnnnnnnnnnnnnnnnnnnnnnnnnnnnnnnnnnnnnnnnnnnnnnnnnnnnnnnnnnnnnnnnnnnnnnnnnnnnnnnnnnnnnnnnnnnnnnnnnnnnnnnnnnnnnnnnnnnnnnnnnnnnnnnnnnnnnnnnnnnnnnnnnnnnnnnnnnnnnnnnnnnnnnnnnnnnnnnnnnnnnnnnnnnnnnnnnnnnnnnnnnnnnnnnnnnnnnnnnnnnnnnnnnnnnnnnnnnnnnnnnnnnnnnnnnnnnnnnnnnnnnnnnnnnnnnnnnnnnnnnnnnnnnnnnnnnnnnnnnnnnnnnnnnnnnnnnnnnnnnnnnnnnnnnnnnnnnnnnnnnnnnnnnnnnnnnnnnnnnnnnnnnnnnnnnnnnnnnnnnnnnnnnnnnnnnnnnnnnnnnnnnnnnnnnnnnnnnnnnnnnnnnnnnnnnnnnnnnnnnnnnnnnnnnnnnnnnnnnnnnnnnnnnnnnnnnnnnnnnnnnnnnnnnnnnnnnnnnnnnnnnnnnnnnnnnnnnnnnnnnnnnnnnnnnnnnnnnnnnnnnnnnnnnnnnnnnnnnnnnnnnnnnnnnnnnnnnnnnnnnnnnnnnnnnnnnnnnnnnnnnnnnnnnnnnnnnnnnnnnnnnnnnnnnnnnnnnnnnnnnnnnnnnnnnnnnnnnnnnnnnnnnnnnnnnnnnnnnnnnnnnnnnnnnnnnnnnnnnnnnnnnnnnnnnnnnnnnnnnnnnnnnnnnnnnnnnnnnnnnnnnnnnnnnnnnnnnnnnnnnnnnnnnnnnnnnnnnnnnnnnnnnnnnnnnnnnnnnnnnnnnnnnnnnnnnnnnnnnnnnnnnnnnnnnnnnnnnnnnnnnnnnnnnnnnnnnnnnnnnnnnnnnnnnnnnnnnnnnnnnnnnnnnnnnnnnnnnnnnnnnnnnnnnnnnnnnnnnnnnnnnnnnnnnnnnnnnnnnnnnnnnnnnnnnnnnnnnnnnnnnnnnnnnnnnnnnnnnnnnnnnnnnnnnnnnnnnnnnnnnnnnnnnnnnnnnnnnnnnnnnnnnnnnnnnnnnnnnnnnnnnnnnnnnnnnnnnnnnnnnnnnnnnnnnnnnnnnnnnnnnnnnnnnnnnnnnnnnnnnnnnnnnnnnnnnnnnnnnnnnnnnnnnnnnnnnnnnnnnnnnnnnnnnnnnnnnnnnnnnnnnnnnnnnnnnnnnnnnnnnnnnnnnnnnnnnnnnnnnnnnnnnnnnnnnnnnnnnnnnnnnnnnnnnnnnnnnnnnnnnnnnnnnnnnnnnnnnnnnnnnnnnnnnnnnnnnnnnnnnnnnnnnnnnnnnnnnnnnnnnnnnnnnnnnnnnnnnnnnnnnnnnnnnnnnnnnnnnnnnnnnnnnnnnnnnnnnnnnnnnnnnnnnnnnnnnnnnnnnnnnnnnnnnnnnnnnnnnnnnnnnnnnnnnnnnnnnnnnnnnnnnnnnnnnnnnnnnnnnnnnnnnnnnnnnnnnnnnnnnnnnnnnnnnnnnnnnnnnnnnnnnnnnnnnnnnnnnnnnnnnnnnnnnnnnnnnnnnnnnnnnnnnnnnnnnnnnnnnnnnnnnnnnnnnnnnnnnnnnnnnnnnnnnnnnnnnnnnnnnnnnnnnnnnnnnnnnnnnnnnnnnnnnnnnnnnnnnnnnnnnnnnnnnnnnnnnnnnnnnnnnnnnnnnnnnnnnnnnnnnnnnnnnnnnnnnnnnnnnnnnnnnnnnnnnnnnnnnnnnnnnnnnnnnnnnnnnnnnnnnnnnnnnnnnnnnnnnnnnnnnnnnnnnnnnnnnnnnnnnnnnnnnnnnnnnnnnnnnnnnnnnnnnnnnnnnnnnnnnnnnnnnnnnnnnnnnnnnnnnnnnnnnnnnnnnnnnnnnnnnnnnnnnnnnnnnnnnnnnnnnnnnnnnnnnnnnnnnnnnnnnnnnnnnnnnnnnnnnnnnnnnnnnnnnnnnnnnnnnnnnnnnnnnnnnnnnnnnnnnnnnnnnnnnnnnnnnnnnnnnnnnnnnnnnnnnnnnnnnnnnnnnnnnnnnnnnnnnnnnnnnnnnnnnnnnnnnnnnnnnnnnnnnnnnnnnnnnnnnnnnnnnnnnnnnnnnnnnnnnnnnnnnnnnnnnnnnnnnnnnnnnnnnnnnnnnnnnnnnnnnnnnnnnnnnnnnnnnnnnnnnnnnnnnnnnnnnnnnnnnnnnnnnnnnnnnnnnnnnnnnnnnnnnnnnnnnnnnnnnnnnnnnnnnnnnnnnnnnnnnnnnnnnnnnnnnnnnnnnnnnnnnnnnnnnnnnnnnnnnnnnnnnnnnnnnnnnnnnnnnnnnnnnnnnnnnnnnnnnnnnnnnnnnnnnnnnnnnnnnnnnnnnnnnnnnnnnnnnnnnnnnnnnnnnnnnnnnnnnnnnnnnnnnnnnnnnnnnnnnnnnnnnnnnnnnnnnnnnnnnnnnnnnnnnnnnnnnnnnnnnnnnnnnnnnnnnnnnnnnnnnnnnnnnnnnnnnnnnnnnnnnnnnnnnnnnnnnnnnnnnnnnnnnnnnnnnnnnnnnnnnnnnnnnnnnnnnnnnnnnnnnnnnnnnnnnnnnnnnnnnnnnnnnnnnnnnnnnnnnnnnnnnnnnnnnnnnnnnnnnnnnnnnnnnnnnnnnnnnnnnnnnnnnnnnnnnnnnnnnnnnnnnnnnnnnnnnnnnnnnnnnnnnnnnnnnnnnnnnnnnnnnnnnnnnnnnnnnnnnnnnnnnnnnnnnnnnnnnnnnnnnnnnnnnnnnnnnnnnnnnnnnnnnnnnnnnnnnnnnnnnnnnnnnnnnnnnnnnnnnnnnnnnnnnnnnnnnnnnnnnnnnnnnnnnnnnnnnnnnnnnnnnnnnnnnnnnnnnnnnnnnnnnnnnnnnnnnnnnnnnnnnnnnnnnnnnnnnnnnnnnnnnnnnnnnnnnnnnnnnnnnnnnnnnnnnnnnnnnnnnnnnnnnnnnnnnnnnnnnnnnnnnnnnnnnnnnnnnnnnnnnnnnnnnnnnnnnnnnnnnnnnnnnnnnnnnnnnnnnnnnnnnnnnnnnnnnnnnnnnnnnnnnnnnnnnnnnnnnnnnnnnnnnnnnnnnnnnnnnnnnnnnnnnnnnnnnnnnnnnnnnnnnnnnnnnnnnnnnnnnnnnnnnnnnnnnnnnnnnnnnnnnnnnnnnnnnnnnnnnnnnnnnnnnnnnnnnnnnnnnnnnnnnnnnnnnnnnnnnnnnnnnnnnnnnnnnnnnnnnnnnnnnnnnnnnnnnnnnnnnnnnnnnnnnnnnnnnnnnnnnnnnnnnnnnnnnnnnnnnnnnnnnnnnnnnnnnnnnnnnnnnnnnnnnnnnnnnnnnnnnnnnnnnnnnnnnnnnnnnnnnnnnnnnnnnnnnnnnnnnnnnnnnnnnnnnnnnnnnnnnnnnnnnnnnnnnnnnnnnnnnnnnnnnnnnnnnnnnnnnnnnnnnnnnnnnnnnnnnnnnnnnnnnnnnnnnnnnnnnnnnnnnnnnnnnnnnnnnnnnnnnnnnnnnnnnnnnnnnnnnnnnnnnnnnnnnnnnnnnnnnnnnnnnnnnnnnnnnnnnnnnnnnnnnnnnnnnnnnnnnnnnnnnnnnnnnnnnnnnnnnnnnnnnnnnnnnnnnnnnnnnnnnnnnnnnnnnnnnnnnnnnnnnnnnnnnnnnnnnnnnnnnnnnnnnnnnnnnnnnnnnnnnnnnnnnnnnnnnnnnnnnnnnnnnnnnnnnnnnnnnnnnnnnnnnnnnnnnnnnnnnnnnnnnnnnnnnnnnnnnnnnnnnnnnnnnnnnnnnnnnnnnnnnnnnnnnnnnnnnnnnnnnnnnnnnnnnnnnnnnnnnnnnnnnnnnnnnnnnnnnnnnnnnnnnnnnnnnnnnnnnnnnnnnnnnnnnnnnnnnnnnnnnnnnnnnnnnnnnnnnnnnnnnnnnnnnnnnnnnnnnnnnnnnnnnnnnnnnnnnnnnnnnnnnnnnnnnnnnnnnnnnnnnnnnnnnnnnnnnnnnnnnnnnnnnnnnnnnnnnnnnnnnnnnnnnnnnnnnnnnnnnnnnnnnnnnnnnnnnnnnnnnnnnnnnnnnnnnnnnnnnnnnnnnnnnnnnnnnnnnnnnnnnnnnnnnnnnnnnnnnnnnnnnnnnnnnnnnnnnnnnnnnnnnnnnnnnnnnnnnnnnnnnnnnnnnnnnnnnnnnnnnnnnnnnnnnnnnnnnnnnnnnnnnnnnnnnnnnnnnnnnnnnnnnnnnnnnnnnnnnnnnnnnnnnnnnnnnnnnnnnnnnnnnnnnnnnnnnnnnnnnnnnnnnnnnnnnnnnnnnnnnnnnnnnnnnnnnnnnnnnnnnnnnnnnnnnnnnnnnnnnnnnnnnnnnnnnnnnnnnnnnnnnnnnnnnnnnnnnnnnnnnnnnnnnnnnnnnnnnnnnnnnnnnnnnnnnnnnnnnnnnnnnnnnnnnnnnnnnnnnnnnnnnnnnnnnnnnnnnnnnnnnnnnnnnnnnnnnnnnnnnnnnnnnnnnnnnnnnnnnnnnnnnnnnnnnnnnnnnnnnnnnnnnnnnnnnnnnnnnnnnnnnnnnnnnnnnnnnnnnnnnnnnnnnnnnnnnnnnnnnnnnnnnnnnnnnnnnnnnnnnnnnnnnnnnnnnnnnnnnnnnnnnnnnnnnnnnnnnnnnnnnnnnnnnnnnnnnnnnnnnnnnnnnnnnnnnnnnnnnnnnnnnnnnnnnnnnnnnnnnnnnnnnnnnnnnnnnnnnnnnnnnnnnnnnnnnnnnnnnnnnnnnnnnnnnnnnnnnnnnnnnnnnnnnnnnnnnnnnnnnnnnnnnnnnnnnnnnnnnnnnnnnnnnnnnnnnnnnnnnnnnnnnnnnnnnnnnnnnnnnnnnnnnnnnnnnnnnnnnnnnnnnnnnnnnnnnnnnnnnnnnnnnnnnnnnnnnnnnnnnnnnnnnnnnnnnnnnnnnnnnnnnnnnnnnnnnnnnnnnnnnnnnnnnnnnnnnnnnnnnnnnnnnnnnnnnnnnnnnnnnnnnnnnnnnnnnnnnnnnnnnnnnnnnnnnnnnnnnnnnnnnnnnnnnnnnnnnnnnnnnnnnnnnnnnnnnnnnnnnnnnnnnnnnnnnnnnnnnnnnnnnnnnnnnnnnnnnnnnnnnnnnnnnnnnnnnnnnnnnnnnnnnnnnnnnnnnnnnnnnnnnnnnnnnnnnnnnnnnnnnnnnnnnnnnnnnnnnnnnnnnnnnnnnnnnnnnnnnnnnnnnnnnnnnnnnnnnnnnnnnnnnnnnnnnnnnnnnnnnnnnnnnnnnnnnnnnnnnnnnnnnnnnnnnnnnnnnnnnnnnnnnnnnnnnnnnnnnnnnnnnnnnnnnnnnnnnnnnnnnnnnnnnnnnnnnnnnnnnnnnnnnnnnnnnnnnnnnnnnnnnnnnnnnnnnnnnnnnnnnnnnnnnnnnnnnnnnnnnnnnnnnnnnnnnnnnnnnnnnnnnnnnnnnnnnnnnnnnnnnnnnnnnnnnnnnnnnnnnnnnnnnnnnnnnnnnnnnnnnnnnnnnnnnnnnnnnnnnnnnnnnnnnnnnnnnnnnnnnnnnnnnnnnnnnnnnnnnnnnnnnnnnnnnnnnnnnnnnnnnnnnnnnnnnnnnnnnnnnnnnnnnnnnnnnnnnnnnnnnnnnnnnnnnnnnnnnnnnnnnnnnnnnnnnnnnnnnnnnnnnnnnnnnnnnnnnnnnnnnnnnnnnnnnnnnnnnnnnnnnnnnnnnnnnnnnnnnnnnnnnnnnnnnnnnnnnnnnnnnnnnnnnnnnnnnnnnnnnnnnnnnnnnnnnnnnnnnnnnnnnnnnnnnnnnnnnnnnnnnnnnnnnnnnnnnnnnnnnnnnnnnnnnnnnnnnnnnnnnnnnnnnnnnnnnnnnnnnnnnnnnnnnnnnnnnnnnnnnnnnnnnnnnnnnnnnnnnnnnnnnnnnnnnnnnnnnnnnnnnnnnnnnnnnnnnnnnnnnnnnnnnnnnnnnnnnnnnnnnnnnnnnnnnnnnnnnnnnnnnnnnnnnnnnnnnnnnnnnnnnnnnnnnnnnnnnnnnnnnnnnnnnnnnnnnnnnnnnnnnnnnnnnnnnnnnnnnnnnnnnnnnnnnnnnnnnnnnnnnnnnnnnnnnnnnnnnnnnnnnnnnnnnnnnnnnnnnnnnnnnnnnnnnnnnnnnnnnnnnnnnnnnnnnnnnnnnnnnnnnnnnnnnnnnnnnnnnnnnnnnnnnnnnnnnnnnnnnnnnnnnnnnnnnnnnnnnnnnnnnnnnnnnnnnnnnnnnnnnnnnnnnnnnnnnnnnnnnnnnnnnnnnnnnnnnnnnnnnnnnnnnnnnnnnnnnnnnnnnnnnnnnnnnnnnnnnnnnnnnnnnnnnnnnnnnnnnnnnnnnnnnnnnnnnnnnnnnnnnnnnnnnnnnnnnnnnnnnnnnnnnnnnnnnnnnnnnnnnnnnnnnnnnnnnnnnnnnnnnnnnnnnnnnnnnnnnnnnnnnnnnnnnnnnnnnnnnnnnnnnnnnnnnnnnnnnnnnnnnnnnnnnnnnnnnnnnnnnnnnnnnnnnnnnnnnnnnnnnnnnnnnnnnnnnnnnnnnnnnnnnnnnnnnnnnnnnnnnnnnnnnnnnnnnnnnnnnnnnnnnnnnnnnnnnnnnnnnnnnnnnnnnnnnnnnnnnnnnnnnnnnnnnnnnnnnnnnnnnnnnnnnnnnnnnnnnnnnnnnnnnnnnnnnnnnnnnnnnnnnnnnnnnnnnnnnnnnnnnnnnnnnnnnnnnnnnnnnnnnnnnnnnnnnnnnnnnnnnnnnnnnnnnnnnnnnnnnnnnnnnnnnnnnnnnnnnnnnnnnnnnnnnnnnnnnnnnnnnnnnnnnnnnnnnnnnnnnnnnnnnnnnnnnnnnnnnnnnnnnnnnnnnnnnnnnnnnnnnnnnnnnnnnnnnnnnnnnnnnnnnnnnnnnnnnnnnnnnnnnnnnnnnnnnnnnnnnnnnnnnnnnnnnnnnnnnnnnnnnnnnnnnnnnnnnnnnnnnnnnnnnnnnnnnnnnnnnnnnnnnnnnnnnnnnnnnnnnnnnnnnnnnnnnnnnnnnnnnnnnnnnnnnnnnnnnnnnnnnnnnnnnnnnnnnnnnnnnnnnnnnnnnnnnnnnnnnnnnnnnnnnnnnnnnnnnnnnnnnnnnnnnnnnnnnnnnnnnnnnnnnnnnnnnnnnnnnnnnnnnnnnnnnnnnnnnnnnnnnnnnnnnnnnnnnnnnnnnnnnnnnnnnnnnnnnnnnnnnnnnnnnnnnnnnnnnnnnnnnnnnnnnnnnnnnnnnnnnnnnnnnnnnnnnnnnnnnnnnnnnnnnnnnnnnnnnnnnnnnnnnnnnnnnnnnnnnnnnnnnnnnnnnnnnnnnnnnnnnnnnnnnnnnnnnnnnnnnnnnnnnnnnnnnnnnnnnnnnnnnnnnnnnnnnnnnnnnnnnnnnnnnnnnnnnnnnnnnnnnnnnnnnnnnnnnnnnnnnnnnnnnnnnnnnnnnnnnnnnnnnnnnnnnnnnnnnnnnnnnnnnnnnnnnnnnnnnnnnnnnnnnnnnnnnnnnnnnnnnnnnnnnnnnnnnnnnnnnnnnnnnnnnnnnnnnnnnnnnnnnnnnnnnnnnnnnnnnnnnnnnnnnnnnnnnnnnnnnnnnnnnnnnnnnnnnnnnnnnnnnnnnnnnnnnnnnnnnnnnnnnnnnnnnnnnnnnnnnnnnnnnnnnnnnnnnnnnnnnnnnnnnnnnnnnnnnnnnnnnnnnnnnnnnnnnnnnnnnnnnnnnnnnnnnnnnnnnnnnnnnnnnnnnnnnnnnnnnnnnnnnnnnnnnnnnnnnnnnnnnnnnnnnnnnnnnnnnnnnnnnnnnnnnnnnnnnnnnnnnnnnnnnnnnnnnnnnnnnnnnnnnnnnnnnnnnnnnnnnnnnnnnnnnnnnnnnnnnnnnnnnnnnnnnnnnnnnnnnnnnnnnnnnnnnnnnnnnnnnnnnnnnnnnnnnnnnnnnnnnnnnnnnnnnnnnnnnnnnnnnnnnnnnnnnnnnnnnnnnnnnnnnnnnnnnnnnnnnnnnnnnnnnnnnnnnnnnnnnnnnnnnnnnnnnnnnnnnnnnnnnnnnnnnnnnnnnnnnnnnnnnnnnnnnnnnnnnnnnnnnnnnnnnnnnnnnnnnnnnnnnnnnnnnnnnnnnnnnnnnnnnnnnnnnnnnnnnnnnnnnnnnnnnnnnnnnnnnnnnnnnnnnnnnnnnnnnnnnnnnnnnnnnnnnnnnnnnnnnnnnnnnnnnnnnnnnnnnnnnnnnnnnnnnnnnnnnnnnnnnnnnnnnnnnnnnnnnnnnnnnnnnnnnnnnnnnnnnnnnnnnnnnnnnnnnnnnnnnnnnnnnnnnnnnnnnnnnnnnnnnnnnnnnnnnnnnnnnnnnnnnnnnnnnnnnnnnnnnnnnnnnnnnnnnnnnnnnnnnnnnnnnnnnnnnnnnnnnnnnnnnnnnnnnnnnnnnnnnnnnnnnnnnnnnnnnnnnnnnnnnnnnnnnnnnnnnnnnnnnnnnnnnnnnnnnnnnnnnnnnnnnnnnnnnnnnnnnnnnnnnnnnnnnnnnnnnnnnnnnnnnnnnnnnnnnnnnnnnnnnnnnnnnnnnnnnnnnnnnnnnnnnnnnnnnnnnnnnnnnnnnnnnnnnnnnnnnnnnnnnnnnnnnnnnnnnnnnnnnnnnnnnnnnnnnnnnnnnnnnnnnnnnnnnnnnnnnnnnnnnnnnnnnnnnnnnnnnnnnnnnnnnnnnnnnnnnnnnnnnnnnnnnnnnnnnnnnnnnnnnnnnnnnnnnnnnnnnnnnnnnnnnnnnnnnnnnnnnnnnnnnnnnnnnnnnnnnnnnnnnnnnnnnnnnnnnnnnnnnnnnnnnnnnnnnnnnnnnnnnnnnnnnnnnnnnnnnnnnnnnnnnnnnnnnnnnnnnnnnnnnnnnnnnnnnnnnnnnnnnnnnnnnnnnnnnnnnnnnnnnnnnnnnnnnnnnnnnnnnnnnnnnnnnnnnnnnnnnnnnnnnnnnnnnnnnnnnnnnnnnnnnnnnnnnnnnnnnnnnnnnnnnnnnnnnnnnnnnnnnnnnnnnnnnnnnnnnnnnnnnnnnnnnnnnnnnnnnnnnnnnnnnnnnnnnnnnnnnnnnnnnnnnnnnnnnnnnnnnnnnnnnnnnnnnnnnnnnnnnnnnnnnnnnnnnnnnnnnnnnnnnnnnnnnnnnnnnnnnnnnnnnnnnnnnnnnnnnnnnnnnnnnnnnnnnnnnnnnnnnnnnnnnnnnnnnnnnnnnnnnnnnnnnnnnnnnnnnnnnnnnnnnnnnnnnnnnnnnnnnnnnnnnnnnnnnnnnnnnnnnnnnnnnnnnnnnnnnnnnnnnnnnnnnnnnnnnnnnnnnnnnnnnnnnnnnnnnnnnnnnnnnnnnnnnnnnnnnnnnnnnnnnnnnnnnnnnnnnnnnnnnnnnnnnnnnnnnnnnnnnnnnnnnnnnnnnnnnnnnnnnnnnnnnnnnnnnnnnnnnnnnnnnnnnnnnnnnnnnnnnnnnnnnnnnnnnnnnnnnnnnnnnnnnnnnnnnnnnnnnnnnnnnnnnnnnnnnnnnnnnnnnnnnnnnnnnnnnnnnnnnnnnnnnnnnnnnnnnnnnnnnnnnnnnnnnnnnnnnnnnnnnnnnnnnnnnnnnnnnnnnnnnnnnnnnnnnnnnnnnnnnnnnnnnnnnnnnnnnnnnnnnnnnnnnnnnnnnnnnnnnnnnnnnnnnnnnnnnnnnnnnnnnnnnnnnnnnnnnnnnnnnnnnnnnnnnnnnnnnnnnnnnnnnnnnnnnnnnnnnnnnnnnnnnnnnnnnnnnnnnnnnnnnnnnnnnnnnnnnnnnnnnnnnnnnnnnnnnnnnnnnnnnnnnnnnnnnnnnnnnnnnnnnnnnnnnnnnnnnnnnnnnnnnnnnnnnnnnnnnnnnnnnnnnnnnnnnnnnnnnnnnnnnnnnnnnnnnnnnnnnnnnnnnnnnnnnnnnnnnnnnnnnnnnnnnnnnnnnnnnnnnnnnnnnnnnnnnnnnnnnnnnnnnnnnnnnnnnnnnnnnnnnnnnnnnnnnnnnnnnnnnnnnnnnnnnnnnnnnnnnnnnnnnnnnnnnnnnnnnnnnnnnnnnnnnnnnnnnnnnnnnnnnnnnnnnnnnnnnnnnnnnnnnnnnnnnnnnnnnnnnnnnnnnnnnnnnnnnnnnnnnnnnnnnnnnnnnnnnnnnnnnnnnnnnnnnnnnnnnnnnnnnnnnnnnnnnnnnnnnnnnnnnnnnnnnnnnnnnnnnnnnnnnnnnnnnnnnnnnnnnnnnnnnnnnnnnnnnnnnnnnnnnnnnnnnnnnnnnnnnnnnnnnnnnnnnnnnnnnnnnnnnnnnnnnnnnnnnnnnnnnnnnnnnnnnnnnnnnnnnnnnnnnnnnnnnnnnnnnnnnnnnnnnnnnnnnnnnnnnnnnnnnnnnnnnnnnnnnnnnnnnnnnnnnnnnnnnnnnnnnnnnnnnnnnnnnnnnnnnnnnnnnnnnnnnnnnnnnnnnnnnnnnnnnnnnnnnnnnnnnnnnnnnnnnnnnnnnnnnnnnnnnnnnnnnnnnnnnnnnnnnnnnnnnnnnnnnnnnnnnnnnnnnnnnnnnnnnnnnnnnnnnnnnnnnnnnnnnnnnnnnnnnnnnnnnnnnnnnnnnnnnnnnnnnnnnnnnnnnnnnnnnnnnnnnnnnnnnnnnnnnnnnnnnnnnnnnnnnnnnnnnnnnnnnnnnnnnnnnnnnnnnnnnnnnnnnnnnnnnnnnnnnnnnnnnnnnnnnnnnnnnnnnnnnnnnnnnnnnnnnnnnnnnnnnnnnnnnnnnnnnnnnnnnnnnnnnnnnnnnnnnnnnnnnnnnnnnnnnnnnnnnnnnnnnnnnnnnnnnnnnnnnnnnnnnnnnnnnnnnnnnnnnnnnnnnnnnnnnnnnnnnnnnnnnnnnnnnnnnnnnnnnnnnnnnnnnnnnnnnnnnnnnnnnnnnnnnnnnnnnnnnnnnnnnnnnnnnnnnnnnnnnnnnnnnnnnnnnnnnnnnnnnnnnnnnnnnnnnnnnnnnnnnnnnnnnnnnnnnnnnnnnnnnnnnnnnnnnnnnnnnnnnnnnnnnnnnnnnnnnnnnnnnnnnnnnnnnnnnnnnnnnnnnnnnnnnnnnnnnnnnnnnnnnnnnnnnnnnnnnnnnnnnnnnnnnnnnnnnnnnnnnnnnnnnnnnnnnnnnnnnnnnnnnnnnnnnnnnnnnnnnnnnnnnnnnnnnnnnnnnnnnnnnnnnnnnnnnnnnnnnnnnnnnnnnnnnnnnnnnnnnnnnnnnnnnnnnnnnnnnnnnnnnnnnnnnnnnnnnnnnnnnnnnnnnnnnnnnnnnnnnnnnnnnnnnnnnnnnnnnnnnnnnnnnnnnnnnnnnnnnnnnnnnnnnnnnnnnnnnnnnnnnnnnnnnnnnnnnnnnnnnnnnnnnnnnnnnnnnnnnnnnnnnnnnnnnnnnnnnnnnnnnnnnnnnnnnnnnnnnnnnnnnnnnnnnnnnnnnnnnnnnnnnnnnnnnnnnnnnnnnnnnnnnnnnnnnnnnnnnnnnnnnnnnnnnnnnnnnnnnnnnnnnnnnnnnnnnnnnnnnnnnnnnnnnnnnnnnnnnnnnnnnnnnnnnnnnnnnnnnnnnnnnnnnnnnnnnnnnnnnnnnnnnnnnnnnnnnnnnnnnnnnnnnnnnnnnnnnnnnnnnnnnnnnnnnnnnnnnnnnnnnnnnnnnnnnnnnnnnnnnnnnnnnnnnnnnnnnnnnnnnnnnnnnnnnnnnnnnnnnnnnnnnnnnnnnnnnnnnnnnnnnnnnnnnnnnnnnnnnnnnnnnnnnnnnnnnnnnnnnnnnnnnnnnnnnnnnnnnnnnnnnnnnnnnnnnnnnnnnnnnnnnnnnnnnnnnnnnnnnnnnnnnnnnnnnnnnnnnnnnnnnnnnnnnnnnnnnnnnnnnnnnnnnnnnnnnnnnnnnnnnnnnnnnnnnnnnnnnnnnnnnnnnnnnnnnnnnnnnnnnnnnnnnnnnnnnnnnnnnnnnnnnnnnnnnnnnnnnnnnnnnnnnnnnnnnnnnnnnnnnnnnnnnnnnnnnnnnnnnnnnnnnnnnnnnnnnnnnnnnnnnnnnnnnnnnnnnnnnnnnnnnnnnnnnnnnnnnnnnnnnnnnnnnnnnnnnnnnnnnnnnnnnnnnnnnnnnnnnnnnnnnnnnnnnnnnnnnnnnnnnnnnnnnnnnnnnnnnnnnnnnnnnnnnnnnnnnnnnnnnnnnnnnnnnnnnnnnnnnnnnnnnnnnnnnnnnnnnnnnnnnnnnnnnnnnnnnnnnnnnnnnnnnnnnnnnnnnnnnnnnnnnnnnnnnnnnnnnnnnnnnnnnnnnnnnnnnnnnnnnnnnnnnnnnnnnnnnnnnnnnnnnnnnnnnnnnnnnnnnnnnnnnnnnnnnnnnnnnnnnnnnnnnnnnnnnnnnnnnnnnnnnnnnnnnnnnnnnnnnnnnnnnnnnnnnnnnnnnnnnnnnnnnnnnnnnnnnnnnnnnnnnnnnnnnnnnnnnnnnnnnnnnnnnnnnnnnnnnnnnnnnnnnnnnnnnnnnnnnnnnnnnnnnnnnnnnnnnnnnnnnnnnnnnnnnnnnnnnnnnnnnnnnnnnnnnnnnnnnnnnnnnnnnnnnnnnnnnnnnnnnnnnnnnnnnnnnnnnnnnnnnnnnnnnnnnnnnnnnnnnnnnnnnnnnnnnnnnnnnnnnnnnnnnnnnnnnnnnnnnnnnnnnnnnnnnnnnnnnnnnnnnnnnnnnnnnnnnnnnnnnnnnnnnnnnnnnnnnnnnnnnnnnnnnnnnnnnnnnnnnnnnnnnnnnnnnnnnnnnnnnnnnnnnnnnnnnnnnnnnnnnnnnnnnnnnnnnnnnnnnnnnnnnnnnnnnnnnnnnnnnnnnnnnnnnnnnnnnnnnnnnnnnnnnnnnnnnnnnnnnnnnnnnnnnnnnnnnnnnnnnnnnnnnnnnnnnnnnnnnnnnnnnnnnnnnnnnnnnnnnnnnnnnnnnnnnnnnnnnnnnnnnnnnnnnnnnnnnnnnnnnnnnnnnnnnnnnnnnnnnnnnnnnnnnnnnnnnnnnnnnnnnnnnnnnnnnnnnnnnnnnnnnnnnnnnnnnnnnnnnnnnnnnnnnnnnnnnnnnnnnnnnnnnnnnnnnnnnnnnnnnnnnnnnnnnnnnnnnnnnnnnnnnnnnnnnnnnnnnnnnnnnnnnnnnnnnnnnnnnnnnnnnnnnnnnnnnnnnnnnnnnnnnnnnnnnnnnnnnnnnnnnnnnnnnnnnnnnnnnnnnnnnnnnnnnnnnnnnnnnnnnnnnnnnnnnnnnnnnnnnnnnnnnnnnnnnnnnnnnnnnnnnnnnnnnnnnnnnnnnnnnnnnnnnnnnnnnnnnnnnnnnnnnnnnnnnnnnnnnnnnnnnnnnnnnnnnnnnnnnnnnnnnnnnnnnnnnnnnnnnnnnnnnnnnnnnnnnnnnnnnnnnnnnnnnnnnnnnnnnnnnnnnnnnnnnnnnnnnnnnnnnnnnnnnnnnnnnnnnnnnnnnnnnnnnnnnnnnnnnnnnnnnnnnnnnnnnnnnnnnnnnnnnnnnnnnnnnnnnnnnnnnnnnnnnnnnnnnnnnnnnnnnnnnnnnnnnnnnnnnnnnnnnnnnnnnnnnnnnnnnnnnnnnnnnnnnnnnnnnnnnnnnnnnnnnnnnnnnnnnnnnnnnnnnnnnnnnnnnnnnnnnnnnnnnnnnnnnnnnnnnnnnnnnnnnnnnnnnnnnnnnnnnnnnnnnnnnnnnnnnnnnnnnnnnnnnnnnnnnnnnnnnnnnnnnnnnnnnnnnnnnnnnnnnnnnnnnnnnnnnnnnnnnnnnnnnnnnnnnnnnnnnnnnnnnnnnnnnnnnnnnnnnnnnnnnnnnnnnnnnnnnnnnnnnnnnnnnnnnnnnnnnnnnnnnnnnnnnnnnnnnnnnnnnnnnnnnnnnnnnnnnnnnnnnnnnnnnnnnnnnnnnnnnnnnnnnnnnnnnnnnnnnnnnnnnnnnnnnnnnnnnnnnnnnnnnnnnnnnnnnnnnnnnnnnnnnnnnnnnnnnnnnnnnnnnnnnnnnnnnnnnnnnnnnnnnnnnnnnnnnnnnnnnnnnnnnnnnnnnnnnnnnnnnnnnnnnnnnnnnnnnnnnnnnnnnnnnnnnnnnnnnnnnnnnnnnnnnnnnnnnnnnnnnnnnnnnnnnnnnnnnnnnnnnnnnnnnnnnnnnnnnnnnnnnnnnnnnnnnnnnnnnnnnnnnnnnnnnnnnnnnnnnnnnnnnnnnnnnnnnnnnnnnnnnnnnnnnnnnnnnnnnnnnnnnnnnnnnnnnnnnnnnnnnnnnnnnnnnnnnnnnnnnnnnnnnnnnnnnnnnnnnnnnnnnnnnnnnnnnnnnnnnnnnnnnnnnnnnnnnnnnnnnnnnnnnnnnnnnnnnnnnnnnnnnnnnnnnnnnnnnnnnnnnnnnnnnnnnnnnnnnnnnnnnnnnnnnnnnnnnnnnnnnnnnnnnnnnnnnnnnnnnnnnnnnnnnnnnnnnnnnnnnnnnnnnnnnnnnnnnnnnnnnnnnnnnnnnnnnnnnnnnnnnnnnnnnnnnnnnnnnnnnnnnnnnnnnnnnnnnnnnnnnnnnnnnnnnnnnnnnnnnnnnnnnnnnnnnnnnnnnnnnnnnnnnnnnnnnnnnnnnnnnnnnnnnnnnnnnnnnnnnnnnnnnnnnnnnnnnnnnnnnnnnnnnnnnnnnnnnnnnnnnnnnnnnnnnnnnnnnnnnnnnnnnnnnnnnnnnnnnnnnnnnnnnnnnnnnnnnnnnnnnnnnnnnnnnnnnnnnnnnnnnnnnnnnnnnnnnnnnnnnnnnnnnnnnnnnnnnnnnnnnnnnnnnnnnnnnnnnnnnnnnnnnnnnnnnnnnnnnnnnnnnnnnnnnnnnnnnnnnnnnnnnnnnnnnnnnnnnnnnnnnnnnnnnnnnnnnnnnnnnnnnnnnnnnnnnnnnnnnnnnnnnnnnnnnnnnnnnnnnnnnnnnnnnnnnnnnnnnnnnnnnnnnnnnnnnnnnnnnnnnnnnnnnnnnnnnnnnnnnnnnnnnnnnnnnnnnnnnnnnnnnnnnnnnnnnnnnnnnnnnnnnnnnnnnnnnnnnnnnnnnnnnnnnnnnnnnnnnnnnnnnnnnnnnnnnnnnnnnnnnnnnnnnnnnnnnnnnnnnnnnnnnnnnnnnnnnnnnnnnnnnnnnnnnnnnnnnnnnnnnnnnnnnnnnnnnnnnnnnnnnnnnnnnnnnnnnnnnnnnnnnnnnnnnnnnnnnnnnnnnnnnnnnnnnnnnnnnnnnnnnnnnnnnnnnnnnnnnnnnnnnnnnnnnnnnnnnnnnnnnnnnnnnnnnnnnnnnnnnnnnnnnnnnnnnnnnnnnnnnnnnnnnnnnnnnnnnnnnnnnnnnnnnnnnnnnnnnnnnnnnnnnnnnnnnnnnnnnnnnnnnnnnnnnnnnnnnnnnnnnnnnnnnnnnnnnnnnnnnnnnnnnnnnnnnnnnnnnnnnnnnnnnnnnnnnnnnnnnnnnnnnnnnnnnnnnnnnnnnnnnnnnnnnnnnnnnnnnnnnnnnnnnnnnnnnnnnnnnnnnnnnnnnnnnnnnnnnnnnnnnnnnnnnnnnnnnnnnnnnnnnnnnnnnnnnnnnnnnnnnnnnnnnnnnnnnnnnnnnnnnnnnnnnnnnnnnnnnnnnnnnnnnnnnnnnnnnnnnnnnnnnnnnnnnnnnnnnnnnnnnnnnnnnnnnnnnnnnnnnnnnnnnnnnnnnnnnnnnnnnnnnnnnnnnnnnnnnnnnnnnnnnnnnnnnnnnnnnnnnnnnnnnnnnnnnnnnnnnnnnnnnnnnnnnnnnnnnnnnnnnnnnnnnnnnnnnnnnnnnnnnnnnnnnnnnnnnnnnnnnnnnnnnnnnnnnnnnnnnnnnnnnnnnnnnnnnnnnnnnnnnnnnnnnnnnnnnnnnnnnnnnnnnnnnnnnnnnnnnnnnnnnnnnnnnnnnnnnnnnnnnnnnnnnnnnnnnnnnnnnnnnnnnnnnnnnnnnnnnnnnnnnnnnnnnnnnnnnnnnnnnnnnnnnnnnnnnnnnnnnnnnnnnnnnnnnnnnnnnnnnnnnnnnnnnnnnnnnnnnnnnnnnnnnnnnnnnnnnnnnnnnnnnnnnnnnnnnnnnnnnnnnnnnnnnnnnnnnnnnnnnnnnnnnnnnnnnnnnnnnnnnnnnnnnnnnnnnnnnnnnnnnnnnnnnnnnnnnnnnnnnnnnnnnnnnnnnnnnnnnnnnnnnnnnnnnnnnnnnnnnnnnnnnnnnnnnnnnnnnnnnnnnnnnnnnnnnnnnnnnnnnnnnnnnnnnnnnnnnnnnnnnnnnnnnnnnnnnnnnnnnnnnnnnnnnnnnnnnnnnnnnnnnnnnnnnnnnnnnnnnnnnnnnnnnnnnnnnnnnnnnnnnnnnnnnnnnnnnnnnnnnnnnnnnnnnnnnnnnnnnnnnnnnnnnnnnnnnnnnnnnnnnnnnnnnnnnnnnnnnnnnnnnnnnnnnnnnnnnnnnnnnnnnnnnnnnnnnnnnnnnnnnnnnnnnnnnnnnnnnnnnnnnnnnnnnnnnnnnnnnnnnnnnnnnnnnnnnnnnnnnnnnnnnnnnnnnnnnnnnnnnnnnnnnnnnnnnnnnnnnnnnnnnnnnnnnnnnnnnnnnnnnnnnnnnnnnnnnnnnnnnnnnnnnnnnnnnnnnnnnnnnnnnnnnnnnnnnnnnnnnnnnnnnnnnnnnnnnnnnnnnnnnnnnnnnnnnnnnnnnnnnnnnnnnnnnnnnnnnnnnnnnnnnnnnnnnnnnnnnnnnnnnnnnnnnnnnnnnnnnnnnnnnnnnnnnnnnnnnnnnnnnnnnnnnnnnnnnnnnnnnnnnnnnnnnnnnnnnnnnnnnnnnnnnnnnnnnnnnnnnnnnnnnnnnnnnnnnnnnnnnnnnnnnnnnnnnnnnnnnnnnnnnnnnnnnnnnnnnnnnnnnnnnnnnnnnnnnnnnnnnnnnnnnnnnnnnnnnnnnnnnnnnnnnnnnnnnnnnnnnnnnnnnnnnnnnnnnnnnnnnnnnnnnnnnnnnnnnnnnnnnnnnnnnnnnnnnnnnnnnnnnnnnnnnnnnnnnnnnnnnnnnnnnnnnnnnnnnnnnnnnnnnnnnnnnnnnnnnnnnnnnnnnnnnnnnnnnnnnnnnnnnnnnnnnnnnnnnnnnnnnnnnnnnnnnnnnnnnnnnnnnnnnnnnnnnnnnnnnnnnnnnnnnnnnnnnnnnnnnnnnnnnnnnnnnnnnnnnnnnnnnnnnnnnnnnnnnnnnnnnnnnnnnnnnnnnnnnnnnnnnnnnnnnnnnnnnnnnnnnnnnnnnnnnnnnnnnnnnnnnnnnnnnnnnnnnnnnnnnnnnnnnnnnnnnnnnnnnnnnnnnnnnnnnnnnnnnnnnnnnnnnnnnnnnnnnnnnnnnnnnnnnnnnnnnnnnnnnnnnnnnnnnnnnnnnnnnnnnnnnnnnnnnnnnnnnnnnnnnnnnnnnnnnnnnnnnnnnnnnnnnnnnnnnnnnnnnnnnnnnnnnnnnnnnnnnnnnnnnnnnnnnnnnnnnnnnnnnnnnnnnnnnnnnnnnnnnnnnnnnnnnnnnnnnnnnnnnnnnnnnnnnnnnnnnnnnnnnnnnnnnnnnnnnnnnnnnnnnnnnnnnnnnnnnnnnnnnnnnnnnnnnnnnnnnnnnnnnnnnnnnnnnnnnnnnnnnnnnnnnnnnnnnnnnnnnnnnnnnnnnnnnnnnnnnnnnnnnnnnnnnnnnnnnnnnnnnnnnnnnnnnnnnnnnnnnnnnnnnnnnnnnnnnnnnnnnnnnnnnnnnnnnnnnnnnnnnnnnnnnnnnnnnnnnnnnnnnnnnnnnnnnnnnnnnnnnnnnnnnnnnnnnnnnnnnnnnnnnnnnnnnnnnnnnnnnnnnnnnnnnnnnnnnnnnnnnnnnnnnnnnnnnnnnnnnnnnnnnnnnnnnnnnnnnnnnnnnnnnnnnnnnnnnnnnnnnnnnnnnnnnnnnnnnnnnnnnnnnnnnnnnnnnnnnnnnnnnnnnnnnnnnnnnnnnnnnnnnnnnnnnnnnnnnnnnnnnnnnnnnnnnnnnnnnnnnnnnnnnnnnnnnnnnnnnnnnnnnnnnnnnnnnnnnnnnnnnnnnnnnnnnnnnnnnnnnnnnnnnnnnnnnnnnnnnnnnnnnnnnnnnnnnnnnnnnnnnnnnnnnnnnnnnnnnnnnnnnnnnnnnnnnnnnnnnnnnnnnnnnnnnnnnnnnnnnnnnnnnnnnnnnnnnnnnnnnnnnnnnnnnnnnnnnnnnnnnnnnnnnnnnnnnnnnnnnnnnnnnnnnnnnnnnnnnnnnnnnnnnnnnnnnnnnnnnnnnnnnnnnnnnnnnnnnnnnnnnnnnnnnnnnnnnnnnnnnnnnnnnnnnnnnnnnnnnnnnnnnnnnnnnnnnnnnnnnnnnnnnnnnnnnnnnnnnnnnnnnnnnnnnnnnnnnnnnnnnnnnnnnnnnnnnnnnnnnnnnnnnnnnnnnnnnnnnnnnnnnnnnnnnnnnnnnnnnnnnnnnnnnnnnnnnnnnnnnnnnnnnnnnnnnnnnnnnnnnnnnnnnnnnnnnnnnnnnnnnnnnnnnnnnnnnnnnnnnnnnnnnnnnnnnnnnnnnnnnnnnnnnnnnnnnnnnnnnnnnnnnnnnnnnnnnnnnnnnnnnnnnnnnnnnnnnnnnnnnnnnnnnnnnnnnnnnnnnnnnnnnnnnnnnnnnnnnnnnnnnnnnnnnnnnnnnnnnnnnnnnnnnnnnnnnnnnnnnnnnnnnnnnnnnnnnnnnnnnnnnnnnnnnnnnnnnnnnnnnnnnnnnnnnnnnnnnnnnnnnnnnnnnnnnnnnnnnnnnnnnnnnnnnnnnnnnnnnnnnnnnnnnnnnnnnnnnnnnnnnnnnnnnnnnnnnnnnnnnnnnnnnnnnnnnnnnnnnnnnnnnnnnnnnnnnnnnnnnnnnnnnnnnnnnnnnnnnnnnnnnnnnnnnnnnnnnnnnnnnnnnnnnnnnnnnnnnnnnnnnnnnnnnnnnnnnnnnnnnnnnnnnnnnnnnnnnnnnnnnnnnnnnnnnnnnnnnnnnnnnnnnnnnnnnnnnnnnnnnnnnnnnnnnnnnnnnnnnnnnnnnnnnnnnnnnnnnnnnnnnnnnnnnnnnnnnnnnnnnnnnnnnnnnnnnnnnnnnnnnnnnnnnnnnnnnnnnnnnnnnnnnnnnnnnnnnnnnnnnnnnnnnnnnnnnnnnnnnnnnnnnnnnnnnnnnnnnnnnnnnnnnnnnnnnnnnnnnnnnnnnnnnnnnnnnnnnnnnnnnnnnnnnnnnnnnnnnnnnnnnnnnnnnnnnnnnnnnnnnnnnnnnnnnnnnnnnnnnnnnnnnnnnnnnnnnnnnnnnnnnnnnnnnnnnnnnnnnnnnnnnnnnnnnnnnnnnnnnnnnnnnnnnnnnnnnnnnnnnnnnnnnnnnnnnnnnnnnnnnnnnnnnnnnnnnnnnnnnnnnnnnnnnnnnnnnnnnnnnnnnnnnnnnnnnnnnnnnnnnnnnnnnnnnnnnnnnnnnnnnnnnnnnnnnnnnnnnnnnnnnnnnnnnnnnnnnnnnnnnnnnnnnnnnnnnnnnnnnnnnnnnnnnnnnnnnnnnnnnnnnnnnnnnnnnnnnnnnnnnnnnnnnnnnnnnnnnnnnnnnnnnnnnnnnnnnnnnnnnnnnnnnnnnnnnnnnnnnnnnnnnnnnnnnnnnnnnnnnnnnnnnnnnnnnnnnnnnnnnnnnnnnnnnnnnnnnnnnnnnnnnnnnnnnnnnnnnnnnnnnnnnnnnnnnnnnnnnnnnnnnnnnnnnnnnnnnnnnnnnnnnnnnnnnnnnnnnnnnnnnnnnnnnnnnnnnnnnnnnnnnnnnnnnnnnnnnnnnnnnnnnnnnnnnnnnnnnnnnnnnnnnnnnnnnnnnnnnnnnnnnnnnnnnnnnnnnnnnnnnnnnnnnnnnnnnnnnnnnnnnnnnnnnnnnnnnnnnnnnnnnnnnnnnnnnnnnnnnnnnnnnnnnnnnnnnnnnnnnnnnnnnnnnnnnnnnnnnnnnnnnnnnnnnnnnnnnnnnnnnnnnnnnnnnnnnnnnnnnnnnnnnnnnnnnnnnnnnnnnnnnnnnnnnnnnnnnnnnnnnnnnnnnnnnnnnnnnnnnnnnnnnnnnnnnnnnnnnnnnnnnnnnnnnnnnnnnnnnnnnnnnnnnnnnnnnnnnnnnnnnnnnnnnnnnnnnnnnnnnnnnnnnnnnnnnnnnnnnnnnnnnnnnnnnnnnnnnnnnnnnnnnnnnnnnnnnnnnnnnnnnnnnnnnnnnnnnnnnnnnnnnnnnnnnnnnnnnnnnnnnnnnnnnnnnnnnnnnnnnnnnnnnnnnnnnnnnnnnnnnnnnnnnnnnnnnnnnnnnnnnnnnnnnnnnnnnnnnnnnnnnnnnnnnnnnnnnnnnnnnnnnnnnnnnnnnnnnnnnnnnnnnnnnnnnnnnnnnnnnnnnnnnnnnnnnnnnnnnnnnnnnnnnnnnnnnnnnnnnnnnnnnnnnnnnnnnnnnnnnnnnnnnnnnnnnnnnnnnnnnnnnnnnnnnnnnnnnnnnnnnnnnnnnnnnnnnnnnnnnnnnnnnnnnnnnnnnnnnnnnnnnnnnnnnnnnnnnnnnnnnnnnnnnnnnnnnnnnnnnnnnnnnnnnnnnnnnnnnnnnnnnnnnnnnnnnnnnnnnnnnnnnnnnnnnnnnnnnnnnnnnnnnnnnnnnnnnnnnnnnnnnnnnnnnnnnnnnnnnnnnnnnnnnnnnnnnnnnnnnnnnnnnnnnnnnnnnnnnnnnnnnnnnnnnnnnnnnnnnnnnnnnnnnnnnnnnnnnnnnnnnnnnnnnnnnnnnnnnnnnnnnnnnnnnnnnnnnnnnnnnnnnnnnnnnnnnnnnnnnnnnnnnnnnnnnnnnnnnnnnnnnnnnnnnnnnnnnnnnnnnnnnnnnnnnnnnnnnnnnnnnnnnnnnnnnnnnnnnnnnnnnnnnnnnnnnnnnnnnnnnnnnnnnnnnnnnnnnnnnnnnnnnnnnnnnnnnnnnnnnnnnnnnnnnnnnnnnnnnnnnnnnnnnnnnnnnnnnnnnnnnnnnnnnnnnnnnnnnnnnnnnnnnnnnnnnnnnnnnnnnnnnnnnnnnnnnnnnnnnnnnnnnnnnnnnnnnnnnnnnnnnnnnnnnnnnnnnnnnnnnnnnnnnnnnnnnnnnnnnnnnnnnnnnnnnnnnnnnnnnnnnnnnnnnnnnnnnnnnnnnnnnnnnnnnnnnnnnnnnnnnnnnnnnnnnnnnnnnnnnnnnnnnnnnnnnnnnnnnnnnnnnnnnnnnnnnnnnnnnnnnnnnnnnnnnnnnnnnnnnnnnnnnnnnnnnnnnnnnnnnnnnnnnnnnnnnnnnnnnnnnnnnnnnnnnnnnnnnnnnnnnnnnnnnnnnnnnnnnnnnnnnnnnnnnnnnnnnnnnnnnnnnnnnnnnnnnnnnnnnnnnnnnnnnnnnnnnnnnnnnnnnnnnnnnnnnnnnnnnnnnnnnnnnnnnnnnnnnnnnnnnnnnnnnnnnnnnnnnnnnnnnnnnnnnnnnnnnnnnnnnnnnnnnnnnnnnnnnnnnnnnnnnnnnnnnnnnnnnnnnnnnnnnnnnnnnnnnnnnnnnnnnnnnnnnnnnnnnnnnnnnnnnnnnnnnnnnnnnnnnnnnnnnnnnnnnnnnnnnnnnnnnnnnnnnnnnnnnnnnnnnnnnnnnnnnnnnnnnnnnnnnnnnnnnnnnnnnnnnnnnnnnnnnnnnnnnnnnnnnnnnnnnnnnnnnnnnnnnnnnnnnnnnnnnnnnnnnnnnnnnnnnnnnnnnnnnnnnnnnnnnnnnnnnnnnnnnnnnnnnnnnnnnnnnnnnnnnnnnnnnnnnnnnnnnnnnnnnnnnnnnnnnnnnnnnnnnnnnnnnnnnnnnnnnnnnnnnnnnnnnnnnnnnnnnnnnnnnnnnnnnnnnnnnnnnnnnnnnnnnnnnnnnnnnnnnnnnnnnnnnnnnnnnnnnnnnnnnnnnnnnnnnnnnnnnnnnnnnnnnnnnnnnnnnnnnnnnnnnnnnnnnnnnnnnnnnnnnnnnnnnnnnnnnnnnnnnnnnnnnnnnnnnnnnnnnnnnnnnnnnnnnnnnnnnnnnnnnnnnnnnnnnnnnnnnnnnnnnnnnnnnnnnnnnnnnnnnnnnnnnnnnnnnnnnnnnnnnnnnnnnnnnnnnnnnnnnnnnnnnnnnnnnnnnnnnnnnnnnnnnnnnnnnnnnnnnnnnnnnnnnnnnnnnnnnnnnnnnnnnnnnnnnnnnnnnnnnnnnnnnnnnnnnnnnnnnnnnnnnnnnnnnnnnnnnnnnnnnnnnnnnnnnnnnnnnnnnnnnnnnnnnnnnnnnnnnnnnnnnnnnnnnnnnnnnnnnnnnnnnnnnnnnnnnnnnnnnnnnnnnnnnnnnnnnnnnnnnnnnnnnnnnnnnnnnnnnnnnnnnnnnnnnnnnnnnnnnnnnnnnnnnnnnnnnnnnnnnnnnnnnnnnnnnnnnnnnnnnnnnnnnnnnnnnnnnnnnnnnnnnnnnnnnnnnnnnnnnnnnnnnnnnnnnnnnnnnnnnnnnnnnnnnnnnnnnnnnnnnnnnnnnnnnnnnnnnnnnnnnnnnnnnnnnnnnnnnnnnnnnnnnnnnnnnnnnnnnnnnnnnnnnnnnnnnnnnnnnnnnnnnnnnnnnnnnnnnnnnnnnnnnnnnnnnnnnnnnnnnnnnnnnnnnnnnnnnnnnnnnnnnnnnnnnnnnnnnnnnnnnnnnnnnnnnnnnnnnnnnnnnnnnnnnnnnnnnnnnnnnnnnnnnnnnnnnnnnnnnnnnnnnnnnnnnnnnnnnnnnnnnnnnnnnnnnnnnnnnnnnnnnnnnnnnnnnnnnnnnnnnnnnnnnnnnnnnnnnnnnnnnnnnnnnnnnnnnnnnnnnnnnnnnnnnnnnnnnnnnnnnnnnnnnnnnnnnnnnnnnnnnnnnnnnnnnnnnnnnnnnnnnnnnnnnnnnnnnnnnnnnnnnnnnnnnnnnnnnnnnnnnnnnnnnnnnnnnnnnnnnnnnnnnnnnnnnnnnnnnnnnnnnnnnnnnnnnnnnnnnnnnnnnnnnnnnnnnnnnnnnnnnnnnnnnnnnnnnnnnnnnnnnnnnnnnnnnnnnnnnnnnnnnnnnnnnnnnnnnnnnnnnnnnnnnnnnnnnnnnnnnnnnnnnnnnnnnnnnnnnnnnnnnnnnnnnnnnnnnnnnnnnnnnnnnnnnnnnnnnnnnnnnnnnnnnnnnnnnnnnnnnnnnnnnnnnnnnnnnnnnnnnnnnnnnnnnnnnnnnnnnnnnnnnnnnnnnnnnnnnnnnnnnnnnnnnnnnnnnnnnnnnnnnnnnnnnnnnnnnnnnnnnnnnnnnnnnnnnnnnnnnnnnnnnnnnnnnnnnnnnnnnnnnnnnnnnnnnnnnnnnnnnnnnnnnnnnnnnnnnnnnnnnnnnnnnnnnnnnnnnnnnnnnnnnnnnnnnnnnnnnnnnnnnnnnnnnnnnnnnnnnnnnnnnnnnnnnnnnnnnnnnnnnnnnnnnnnnnnnnnnnnnnnnnnnnnnnnnnnnnnnnnnnnnnnnnnnnnnnnnnnnnnnnnnnnnnnnnnnnnnnnnnnnnnnnnnnnnnnnnnnnnnnnnnnnnnnnnnnnnnnnnnnnnnnnnnnnnnnnnnnnnnnnnnnnnnnnnnnnnnnnnnnnnnnnnnnnnnnnnnnnnnnnnnnnnnnnnnnnnnnnnnnnnnnnnnnnnnnnnnnnnnnnnnnnnnnnnnnnnnnnnnnnnnnnnnnnnnnnnnnnnnnnnnnnnnnnnnnnnnnnnnnnnnnnnnnnnnnnnnnnnnnnnnnnnnnnnnnnnnnnnnnnnnnnnnnnnnnnnnnnnnnnnnnnnnnnnnnnnnnnnnnnnnnnnnnnnnnnnnnnnnnnnnnnnnnnnnnnnnnnnnnnnnnnnnnnnnnnnnnnnnnnnnnnnnnnnnnnnnnnnnnnnnnnnnnnnnnnnnnnnnnnnnnnnnnnnnnnnnnnnnnnnnnnnnnnnnnnnnnnnnnnnnnnnnnnnnnnnnnnnnnnnnnnnnnnnnnnnnnnnnnnnnnnnnnnnnnnnnnnnnnnnnnnnnnnnnnnnnnnnnnnnnnnnnnnnnnnnnnnnnnnnnnnnnnnnnnnnnnnnnnnnnnnnnnnnnnnnnnnnnnnnnnnnnnnnnnnnnnnnnnnnnnnnnnnnnnnnnnnnnnnnnnnnnnnnnnnnnnnnnnnnnnnnnnnnnnnnnnnnnnnnnnnnnnnnnnnnnnnnnnnnnnnnnnnnnnnnnnnnnnnnnnnnnnnnnnnnnnnnnnnnnnnnnnnnnnnnnnnnnnnnnnnnnnnnnnnnnnnnnnnnnnnnnnnnnnnnnnnnnnnnnnnnnnnnnnnnnnnnnnnnnnnnnnnnnnnnnnnnnnnnnnnnnnnnnnnnnnnnnnnnnnnnnnnnnnnnnnnnnnnnnnnnnnnnnnnnnnnnnnnnnnnnnnnnnnnnnnnnnnnnnnnnnnnnnnnnnnnnnnnnnnnnnnnnnnnnnnnnnnnnnnnnnnnnnnnnnnnnnnnnnnnnnnnnnnnnnnnnnnnnnnnnnnnnnnnnnnnnnnnnnnnnnnnnnnnnnnnnnnnnnnnnnnnnnnnnnnnnnnnnnnnnnnnnnnnnnnnnnnnnnnnnnnnnnnnnnnnnnnnnnnnnnnnnnnnnnnnnnnnnnnnnnnnnnnnnnnnnnnnnnnnnnnnnnnnnnnnnnnnnnnnnnnnnnnnnnnnnnnnnnnnnnnnnnnnnnnnnnnnnnnnnnnnnnnnnnnnnnnnnnnnnnnnnnnnnnnnnnnnnnnnnnnnnnnnnnnnnnnnnnnnnnnnnnnnnnnnnnnnnnnnnnnnnnnnnnnnnnnnnnnnnnnnnnnnnnnnnnnnnnnnnnnnnnnnnnnnnnnnnnnnnnnnnnnnnnnnnnnnnnnnnnnnnnnnnnnnnnnnnnnnnnnnnnnnnnnnnnnnnnnnnnnnnnnnnnnnnnnnnnnnnnnnnnnnnnnnnnnnnnnnnnnnnnnnnnnnnnnnnnnnnnnnnnnnnnnnnnnnnnnnnnnnnnnnnnnnnnnnnnnnnnnnnnnnnnnnnnnnnnnnnnnnnnnnnnnnnnnnnnnnnnnnnnnnnnnnnnnnnnnnnnnnnnnnnnnnnnnnnnnnnnnnnnnnnnnnnnnnnnnnnnnnnnnnnnnnnnnnnnnnnnnnnnnnnnnnnnnnnnnnnnnnnnnnnnnnnnnnnnnnnnnnnnnnnnnnnnnnnnnnnnnnnnnnnnnnnnnnnnnnnnnnnnnnnnnnnnnnnnnnnnnnnnnnnnnnnnnnnnnnnnnnnnnnnnnnnnnnnnnnnnnnnnnnnnnnnnnnnnnnnnnnnnnnnnnnnnnnnnnnnnnnnnnnnnnnnnnnnnnnnnnnnnnnnnnnnnnnnnnnnnnnnnnnnnnnnnnnnnnnnnnnnnnnnnnnnnnnnnnnnnnnnnnnnnnnnnnnnnnnnnnnnnnnnnnnnnnnnnnnnnnnnnnnnnnnnnnnnnnnnnnnnnnnnnnnnnnnnnnnnnnnnnnnnnnnnnnnnnnnnnnnnnnnnnnnnnnnnnnnnnnnnnnnnnnnnnnnnnnnnnnnnnnnnnnnnnnnnnnnnnnnnnnnnnnnnnnnnnnnnnnnnnnnnnnnnnnnnnnnnnnnnnnnnnnnnnnnnnnnnnnnnnnnnnnnnnnnnnnnnnnnnnnnnnnnnnnnnnnnnnnnnnnnnnnnnnnnnnnnnnnnnnnnnnnnnnnnnnnnnnnnnnnnnnnnnnnnnnnnnnnnnnnnnnnnnnnnnnnnnnnnnnnnnnnnnnnnnnnnnnnnnnnnnnnnnnnnnnnnnnnnnnnnnnnnnnnnnnnnnnnnnnnnnnnnnnnnnnnnnnnnnnnnnnnnnnnnnnnnnnnnnnnnnnnnnnnnnnnnnnnnnnnnnnnnnnnnnnnnnnnnnnnnnnnnnnnnnnnnnnnnnnnnnnnnnnnnnnnnnnnnnnnnnnnnnnnnnnnnnnnnnnnnnnnnnnnnnnnnnnnnnnnnnnnnnnnnnnnnnnnnnnnnnnnnnnnnnnnnnnnnnnnnnnnnnnnnnnnnnnnnnnnnnnnnnnnnnnnnnnnnnnnnnnnnnnnnnnnnnnnnnnnnnnnnnnnnnnnnnnnnnnnnnnnnnnnnnnnnnnnnnnnnnnnnnnnnnnnnnnnnnnnnnnnnnnnnnnnnnnnnnnnnnnnnnnnnnnnnnnnnnnnnnnnnnnnnnnnnnnnnnnnnnnnnnnnnnnnnnnnnnnnnnnnnnnnnnnnnnnnnnnnnnnnnnnnnnnnnnnnnnnnnnnnnnnnnnnnnnnnnnnnnnnnnnnnnnnnnnnnnnnnnnnnnnnnnnnnnnnnnnnnnnnnnnnnnnnnnnnnnnnnnnnnnnnnnnnnnnnnnnnnnnnnnnnnnnnnnnnnnnnnnnnnnnnnnnnnnnnnnnnnnnnnnnnnnnnnnnnnnnnnnnnnnnnnnnnnnnnnnnnnnnnnnnnnnnnnnnnnnnnnnnnnnnnnnnnnnnnnnnnnnnnnnnnnnnnnnnnnnnnnnnnnnnnnnnnnnnnnnnnnnnnnnnnnnnnnnnnnnnnnnnnnnnnnnnnnnnnnnnnnnnnnnnnnnnnnnnnnnnnnnnnnnnnnnnnnnnnnnnnnnnnnnnnnnnnnnnnnnnnnnnnnnnnnnnnnnnnnnnnnnnnnnnnnnnnnnnnnnnnnnnnnnnnnnnnnnnnnnnnnnnnnnnnnnnnnnnnnnnnnnnnnnnnnnnnnnnnnnnnnnnnnnnnnnnnnnnnnnnnnnnnnnnnnnnnnnnnnnnnnnnnnnnnnnnnnnnnnnnnnnnnnnnnnnnnnnnnnnnnnnnnnnnnnnnnnnnnnnnnnnnnnnnnnnnnnnnnnnnnnnnnnnnnnnnnnnnnnnnnnnnnnnnnnnnnnnnnnnnnnnnnnnnnnnnnnnnnnnnnnnnnnnnnnnnnnnnnnnnnnnnnnnnnnnnnnnnnnnnnnnnnnnnnnnnnnnnnnnnnnnnnnnnnnnnnnnnnnnnnnnnnnnnnnnnnnnnnnnnnnnnnnnnnnnnnnnnnnnnnnnnnnnnnnnnnnnnnnnnnnnnnnnnnnnnnnnnnnnnnnnnnnnnnnnnnnnnnnnnnnnnnnnnnnnnnnnnnnnnnnnnnnnnnnnnnnnnnnnnnnnnnnnnnnnnnnnnnnnnnnnnnnnnnnnnnnnnnnnnnnnnnnnnnnnnnnnnnnnnnnnnnnnnnnnnnnnnnnnnnnnnnnnnnnnnnnnnnnnnnnnnnnnnnnnnnnnnnnnnnnnnnnnnnnnnnnnnnnnnnnnnnnnnnnnnnnnnnnnnnnnnnnnnnnnnnnnnnnnnnnnnnnnnnnnnnnnnnnnnnnnnnnnnnnnnnnnnnnnnnnnnnnnnnnnnnnnnnnnnnnnnnnnnnnnnnnnnnnnnnnnnnnnnnnnnnnnnnnnnnnnnnnnnnnnnnnnnnnnnnnnnnnnnnnnnnnnnnnnnnnnnnnnnnnnnnnnnnnnnnnnnnnnnnnnnnnnnnnnnnnnnnnnnnnnnnnnnnnnnnnnnnnnnnnnnnnnnnnnnnnnnnnnnnnnnnnnnnnnnnnnnnnnnnnnnnnnnnnnnnnnnnnnnnnnnnnnnnnnnnnnnnnnnnnnnnnnnnnnnnnnnnnnnnnnnnnnnnnnnnnnnnnnnnnnnnnnnnnnnnnnnnnnnnnnnnnnnnnnnnnnnnnnnnnnnnnnnnnnnnnnnnnnnnnnnnnnnnnnnnnnnnnnnnnnnnnnnnnnnnnnnnnnnnnnnnnnnnnnnnnnnnnnnnnnnnnnnnnnnnnnnnnnnnnnnnnnnnnnnnnnnnnnnnnnnnnnnnnnnnnnnnnnnnnnnnnnnnnnnnnnnnnnnnnnnnnnnnnnnnnnnnnnnnnnnnnnnnnnnnnnnnnnnnnnnnnnnnnnnnnnnnnnnnnnnnnnnnnnnnnnnnnnnnnnnnnnnnnnnnnnnnnnnnnnnnnnnnnnnnnnnnnnnnnnnnnnnnnnnnnnnnnnnnnnnnnnnnnnnnnnnnnnnnnnnnnnnnnnnnnnnnnnnnnnnnnnnnnnnnnnnnnnnnnnnnnnnnnnnnnnnnnnnnnnnnnnnnnnnnnnnnnnnnnnnnnnnnnnnnnnnnnnnnnnnnnnnnnnnnnnnnnnnnnnnnnnnnnnnnnnnnnnnnnnnnnnnnnnnnnnnnnnnnnnnnnnnnnnnnnnnnnnnnnnnnnnnnnnnnnnnnnnnnnnnnnnnnnnnnnnnnnnnnnnnnnnnnnnnnnnnnnnnnnnnnnnnnnnnnnnnnnnnnnnnnnnnnnnnnnnnnnnnnnnnnnnnnnnnnnnnnnnnnnnnnnnnnnnnnnnnnnnnnnnnnnnnnnnnnnnnnnnnnnnnnnnnnnnnnnnnnnnnnnnnnnnnnnnnnnnnnnnnnnnnnnnnnnnnnnnnnnnnnnnnnnnnnnnnnnnnnnnnnnnnnnnnnnnnnnnnnnnnnnnnnnnnnnnnnnnnnnnnnnnnnnnnnnnnnnnnnnnnnnnnnnnnnnnnnnnnnnnnnnnnnnnnnnnnnnnnnnnnnnnnnnnnnnnnnnnnnnnnnnnnnnnnnnnnnnnnnnnnnnnnnnnnnnnnnnnnnnnnnnnnnnnnnnnnnnnnnnnnnnnnnnnnnnnnnnnnnnnnnnnnnnnnnnnnnnnnnnnnnnnnnnnnnnnnnnnnnnnnnnnnnnnnnnnnnnnnnnnnnnnnnnnnnnnnnnnnnnnnnnnnnnnnnnnnnnnnnnnnnnnnnnnnnnnnnnnnnnnnnnnnnnnnnnnnnnnnnnnnnnnnnnnnnnnnnnnnnnnnnnnnnnnnnnnnnnnnnnnnnnnnnnnnnnnnnnnnnnnnnnnnnnnnnnnnnnnnnnnnnnnnnnnnnnnnnnnnnnnnnnnnnnnnnnnnnnnnnnnnnnnnnnnnnnnnnnnnnnnnnnnnnnnnnnnnnnnnnnnnnnnnnnnnnnnnnnnnnnnnnnnnnnnnnnnnnnnnnnnnnnnnnnnnnnnnnnnnnnnnnnnnnnnnnnnnnnnnnnnnnnnnnnnnnnnnnnnnnnnnnnnnnnnnnnnnnnnnnnnnnnnnnnnnnnnnnnnnnnnnnnnnnnnnnnnnnnnnnnnnnnnnnnnnnnnnnnnnnnnnnnnnnnnnnnnnnnnnnnnnnnnnnnnnnnnnnnnnnnnnnnnnnnnnnnnnnnnnnnnnnnnnnnnnnnnnnnnnnnnnnnnnnnnnnnnnnnnnnnnnnnnnnnnnnnnnnnnnnnnnnnnnnnnnnnnnnnnnnnnnnnnnnnnnnnnnnnnnnnnnnnnnnnnnnnnnnnnnnnnnnnnnnnnnnnnnnnnnnnnnnnnnnnnnnnnnnnnnnnnnnnnnnnnnnnnnnnnnnnnnnnnnnnnnnnnnnnnnnnnnnnnnnnnnnnnnnnnnnnnnnnnnnnnnnnnnnnnnnnnnnnnnnnnnnnnnnnnnnnnnnnnnnnnnnnnnnnnnnnnnnnnnnnnnnnnnnnnnnnnnnnnnnnnnnnnnnnnnnnnnnnnnnnnnnnnnnnnnnnnnnnnnnnnnnnnnnnnnnnnnnnnnnnnnnnnnnnnnnnnnnnnnnnnnnnnnnnnnnnnnnnnnnnnnnnnnnnnnnnnnnnnnnnnnnnnnnnnnnnnnnnnnnnnnnnnnnnnnnnnnnnnnnnnnnnnnnnnnnnnnnnnnnnnnnnnnnnnnnnnnnnnnnnnnnnnnnnnnnnnnnnnnnnnnnnnnnnnnnnnnnnnnnnnnnnnnnnnnnnnnnnnnnnnnnnnnnnnnnnnnnnnnnnnnnnnnnnnnnnnnnnnnnnnnnnnnnnnnnnnnnnnnnnnnnnnnnnnnnnnnnnnnnnnnnnnnnnnnnnnnnnnnnnnnnnnnnnnnnnnnnnnnnnnnnnnnnnnnnnnnnnnnnnnnnnnnnnnnnnnnnnnnnnnnnnnnnnnnnnnnnnnnnnnnnnnnnnnnnnnnnnnnnnnnnnnnnnnnnnnnnnnnnnnnnnnnnnnnnnnnnnnnnnnnnnnnnnnnnnnnnnnnnnnnnnnnnnnnnnnnnnnnnnnnnnnnnnnnnnnnnnnnnnnnnnnnnnnnnnnnnnnnnnnnnnnnnnnnnnnnnnnnnnnnnnnnnnnnnnnnnnnnnnnnnnnnnnnnnnnnnnnnnnnnnnnnnnnnnnnnnnnnnnnnnnnnnnnnnnnnnnnnnnnnnnnnnnnnnnnnnnnnnnnnnnnnnnnnnnnnnnnnnnnnnnnnnnnnnnnnnnnnnnnnnnnnnnnnnnnnnnnnnnnnnnnnnnnnnnnnnnnnnnnnnnnnnnnnnnnnnnnnnnnnnnnnnnnnnnnnnnnnnnnnnnnnnnnnnnnnnnnnnnnnnnnnnnnnnnnnnnnnnnnnnnnnnnnnnnnnnnnnnnnnnnnnnnnnnnnnnnnnnnnnnnnnnnnnnnnnnnnnnnnnnnnnnnnnnnnnnnnnnnnnnnnnnnnnnnnnnnnnnnnnnnnnnnnnnnnnnnnnnnnnnnnnnnnnnnnnnnnnnnnnnnnnnnnnnnnnnnnnnnnnnnnnnnnnnnnnnnnnnnnnnnnnnnnnnnnnnnnnnnnnnnnnnnnnnnnnnnnnnnnnnnnnnnnnnnnnnnnnnnnnnnnnnnnnnnnnnnnnnnnnnnnnnnnnnnnnnnnnnnnnnnnnnnnnnnnnnnnnnnnnnnnnnnnnnnnnnnnnnnnnnnnnnnnnnnnnnnnnnnnnnnnnnnnnnnnnnnnnnnnnnnnnnnnnnnnnnnnnnnnnnnnnnnnnnnnnnnnnnnnnnnnnnnnnnnnnnnnnnnnnnnnnnnnnnnnnnnnnnnnnnnnnnnnnnnnnnnnnnnnnnnnnnnnnnnnnnnnnnnnnnnnnnnnnnnnnnnnnnnnnnnnnnnnnnnnnnnnnnnnnnnnnnnnnnnnnnnnnnnnnnnnnnnnnnnnnnnnnnnnnnnnnnnnnnnnnnnnnnnnnnnnnnnnnnnnnnnnnnnnnnnnnnnnnnnnnnnnnnnnnnnnnnnnnnnnnnnnnnnnnnnnnnnnnnnnnnnnnnnnnnnnnnnnnnnnnnnnnnnnnnnnnnnnnnnnnnnnnnnnnnnnnnnnnnnnnnnnnnnnnnnnnnnnnnnnnnnnnnnnnnnnnnnnnnnnnnnnnnnnnnnnnnnnnnnnnnnnnnnnnnnnnnnnnnnnnnnnnnnnnnnnnnnnnnnnnnnnnnnnnnnnnnnnnnnnnnnnnnnnnnnnnnnnnnnnnnnnnnnnnnnnnnnnnnnnnnnnnnnnnnnnnnnnnnnnnnnnnnnnnnnnnnnnnnnnnnnnnnnnnnnnnnnnnnnnnnnnnnnnnnnnnnnnnnnnnnnnnnnnnnnnnnnnnnnnnnnnnnnnnnnnnnnnnnnnnnnnnnnnnnnnnnnnnnnnnnnnnnnnnnnnnnnnnnnnnnnnnnnnnnnnnnnnnnnnnnnnnnnnnnnnnnnnnnnnnnnnnnnnnnnnnnnnnnnnnnnnnnnnnnnnnnnnnnnnnnnnnnnnnnnnnnnnnnnnnnnnnnnnnnnnnnnnnnnnnnnnnnnnnnnnnnnnnnnnnnnnnnnnnnnnnnnnnnnnnnnnnnnnnnnnnnnnnnnnnnnnnnnnnnnnnnnnnnnnnnnnnnnnnnnnnnnnnnnnnnnnnnnnnnnnnnnnnnnnnnnnnnnnnnnnnnnnnnnnnnnnnnnnnnnnnnnnnnnnnnnnnnnnnnnnnnnnnnnnnnnnnnnnnnnnnnnnnnnnnnnnnnnnnnnnnnnnnnnnnnnnnnnnnnnnnnnnnnnnnnnnnnnnnnnnnnnnnnnnnnnnnnnnnnnnnnnnnnnnnnnnnnnnnnnnnnnnnnnnnnnnnnnnnnnnnnnnnnnnnnnnnnnnnnnnnnnnnnnnnnnnnnnnnnnnnnnnnnnnnnnnnnnnnnnnnnnnnnnnnnnnnnnnnnnnnnnnnnnnnnnnnnnnnnnnnnnnnnnnnnnnnnnnnnnnnnnnnnnnnnnnnnnnnnnnnnnnnnnnnnnnnnnnnnnnnnnnnnnnnnnnnnnnnnnnnnnnnnnnnnnnnnnnnnnnnnnnnnnnnnnnnnnnnnnnnnnnnnnnnnnnnnnnnnnnnnnnnnnnnnnnnnnnnnnnnnnnnnnnnnnnnnnnnnnnnnnnnnnnnnnnnnnnnnnnnnnnnnnnnnnnnnnnnnnnnnnnnnnnnnnnnnnnnnnnnnnnnnnnnnnnnnnnnnnnnnnnnnnnnnnnnnnnnnnnnnnnnnnnnnnnnnnnnnnnnnnnnnnnnnnnnnnnnnnnnnnnnnnnnnnnnnnnnnnnnnnnnnnnnnnnnnnnnnnnnnnnnnnnnnnnnnnnnnnnnnnnnnnnnnnnnnnnnnnnnnnnnnnnnnnnnnnnnnnnnnnnnnnnnnnnnnnnnnnnnnnnnnnnnnnnnnnnnnnnnnnnnnnnnnnnnnnnnnnnnnnnnnnnnnnnnnnnnnnnnnnnnnnnnnnnnnnnnnnnnnnnnnnnnnnnnnnnnnnnnnnnnnnnnnnnnnnnnnnnnnnnnnnnnnnnnnnnnnnnnnnnnnnnnnnnnnnnnnnnnnnnnnnnnnnnnnnnnnnnnnnnnnnnnnnnnnnnnnnnnnnnnnnnnnnnnnnnnnnnnnnnnnnnnnnnnnnnnnnnnnnnnnnnnnnnnnnnnnnnnnnnnnnnnnnnnnnnnnnnnnnnnnnnnnnnnnnnnnnnnnnnnnnnnnnnnnnnnnnnnnnnnnnnnnnnnnnnnnnnnnnnnnnnnnnnnnnnnnnnnnnnnnnnnnnnnnnnnnnnnnnnnnnnnnnnnnnnnnnnnnnnnnnnnnnnnnnnnnnnnnnnnnnnnnnnnnnnnnnnnnnnnnnnnnnnnnnnnnnnnnnnnnnnnnnnnnnnnnnnnnnnnnnnnnnnnnnnnnnnnnnnnnnnnnnnnnnnnnnnnnnnnnnnnnnnnnnnnnnnnnnnnnnnnnnnnnnnnnnnnnnnnnnnnnnnnnnnnnnnnnnnnnnnnnnnnnnnnnnnnnnnnnnnnnnnnnnnnnnnnnnnnnnnnnnnnnnnnnnnnnnnnnnnnnnnnnnnnnnnnnnnnnnnnnnnnnnnnnnnnnnnnnnnnnnnnnnnnnnnnnnnnnnnnnnnnnnnnnnnnnnnnnnnnnnnnnnnnnnnnnnnnnnnnnnnnnnnnnnnnnnnnnnnnnnnnnnnnnnnnnnnnnnnnnnnnnnnnnnnnnnnnnnnnnnnnnnnnnnnnnnnnnnnnnnnnnnnnnnnnnnnnnnnnnnnnnnnnnnnnnnnnnnnnnnnnnnnnnnnnnnnnnnnnnnnnnnnnnnnnnnnnnnnnnnnnnnnnnnnnnnnnnnnnnnnnnnnnnnnnnnnnnnnnnnnnnnnnnnnnnnnnnnnnnnnnnnnnnnnnnnnnnnnnnnnnnnnnnnnnnnnnnnnnnnnnnnnnnnnnnnnnnnnnnnnnnnnnnnnnnnnnnnnnnnnnnnnnnnnnnnnnnnnnnnnnnnnnnnnnnnnnnnnnnnnnnnnnnnnnnnnnnnnnnnnnnnnnnnnnnnnnnnnnnnnnnnnnnnnnnnnnnnnnnnnnnnnnnnnnnnnnnnnnnnnnnnnnnnnnnnnnnnnnnnnnnnnnnnnnnnnnnnnnnnnnnnnnnnnnnnnnnnnnnnnnnnnnnnnnnnnnnnnnnnnnnnnnnnnnnnnnnnnnnnnnnnnnnnnnnnnnnnnnnnnnnnnnnnnnnnnnnnnnnnnnnnnnnnnnnnnnnnnnnnnnnnnnnnnnnnnnnnnnnnnnnnnnnnnnnnnnnnnnnnnnnnnnnnnnnnnnnnnnnnnnnnnnnnnnnnnnnnnnnnnnnnnnnnnnnnnnnnnnnnnnnnnnnnnnnnnnnnnnnnnnnnnnnnnnnnnnnnnnnnnnnnnnnnnnnnnnnnnnnnnnnnnnnnnnnnnnnnnnnnnnnnnnnnnnnnnnnnnnnnnnnnnnnnnnnnnnnnnnnnnnnnnnnnnnnnnnnnnnnnnnnnnnnnnnnnnnnnnnnnnnnnnnnnnnnnnnnnnnnnnnnnnnnnnnnnnnnnnnnnnnnnnnnnnnnnnnnnnnnnnnnnnnnnnnnnnnnnnnnnnnnnnnnnnnnnnnnnnnnnnnnnnnnnnnnnnnnnnnnnnnnnnnnnnnnnnnnnnnnnnnnnnnnnnnnnnnnnnnnnnnnnnnnnnnnnnnnnnnnnnnnnnnnnnnnnnnnnnnnnnnnnnnnnnnnnnnnnnnnnnnnnnnnnnnnnnnnnnnnnnnnnnnnnnnnnnnnnnnnnnnnnnnnnnnnnnnnnnnnnnnnnnnnnnnnnnnnnnnnnnnnnnnnnnnnnnnnnnnnnnnnnnnnnnnnnnnnnnnnnnnnnnnnnnnnnnnnnnnnnnnnnnnnnnnnnnnnnnnnnnnnnnnnnnnnnnnnnnnnnnnnnnnnnnnnnnnnnnnnnnnnnnnnnnnnnnnnnnnnnnnnnnnnnnnnnnnnnnnnnnnnnnnnnnnnnnnnnnnnnnnnnnnnnnnnnnnnnnnnnnnnnnnnnnnnnnnnnnnnnnnnnnnnnnnnnnnnnnnnnnnnnnnnnnnnnnnnnnnnnnnnnnnnnnnnnnnnnnnnnnnnnnnnnnnnnnnnnnnnnnnnnnnnnnnnnnnnnnnnnnnnnnnnnnnnnnnnnnnnnnnnnnnnnnnnnnnnnnnnnnnnnnnnnnnnnnnnnnnnnnnnnnnnnnnnnnnnnnnnnnnnnnnnnnnnnnnnnnnnnnnnnnnnnnnnnnnnnnnnnnnnnnnnnnnnnnnnnnnnnnnnnnnnnnnnnnnnnnnnnnnnnnnnnnnnnnnnnnnnnnnnnnnnnnnnnnnnnnnnnnnnnnnnnnnnnnnnnnnnnnnnnnnnnnnnnnnnnnnnnnnnnnnnnnnnnnnnnnnnnnnnnnnnnnnnnnnnnnnnnnnnnnnnnnnnnnnnnnnnnnnnnnnnnnnnnnnnnnnnnnnnnnnnnnnnnnnnnnnnnnnnnnnnnnnnnnnnnnnnnnnnnnnnnnnnnnnnnnnnnnnnnnnnnnnnnnnnnnnnnnnnnnnnnnnnnnnnnnnnnnnnnnnnnnnnnnnnnnnnnnnnnnnnnnnnnnnnnnnnnnnnnnnnnnnnnnnnnnnnnnnnnnnnnnnnnnnnnnnnnnnnnnnnnnnnnnnnnnnnnnnnnnnnnnnnnnnnnnnnnnnnnnnnnnnnnnnnnnnnnnnnnnnnnnnnnnnnnnnnnnnnnnnnnnnnnnnnnnnnnnnnnnnnnnnnnnnnnnnnnnnnnnnnnnnnnnnnnnnnnnnnnnnnnnnnnnnnnnnnnnnnnnnnnnnnnnnnnnnnnnnnnnnnnnnnnnnnnnnnnnnnnnnnnnnnnnnnnnnnnnnnnnnnnnnnnnnnnnnnnnnnnnnnnnnnnnnnnnnnnnnnnnnnnnnnnnnnnnnnnnnnnnnnnnnnnnnnnnnnnnnnnnnnnnnnnnnnnnnnnnnnnnnnnnnnnnnnnnnnnnnnnnnnnnnnnnnnnnnnnnnnnnnnnnnnnnnnnnnnnnnnnnnnnnnnnnnnnnnnnnnnnnnnnnnnnnnnnnnnnnnnnnnnnnnnnnnnnnnnnnnnnnnnnnnnnnnnnnnnnnnnnnnnnnnnnnnnnnnnnnnnnnnnnnnnnnnnnnnnnnnnnnnnnnnnnnnnnnnnnnnnnnnnnnnnnnnnnnnnnnnnnnnnnnnnnnnnnnnnnnnnnnnnnnnnnnnnnnnnnnnnnnnnnnnnnnnnnnnnnnnnnnnnnnnnnnnnnnnnnnnnnnnnnnnnnnnnnnnnnnnnnnnnnnnnnnnnnnnnnnnnnnnnnnnnnnnnnnnnnnnnnnnnnnnnnnnnnnnnnnnnnnnnnnnnnnnnnnnnnnnnnnnnnnnnnnnnnnnnnnnnnnnnnnnnnnnnnnnnnnnnnnnnnnnnnnnnnnnnnnnnnnnnnnnnnnnnnnnnnnnnnnnnnnnnnnnnnnnnnnnnnnnnnnnnnnnnnnnnnnnnnnnnnnnnnnnnnnnnnnnnnnnnnnnnnnnnnnnnnnnnnnnnnnnnnnnnnnnnnnnnnnnnnnnnnnnnnnnnnnnnnnnnnnnnnnnnnnnnnnnnnnnnnnnnnnnnnnnnnnnnnnnnnnnnnnnnnnnnnnnnnnnnnnnnnnnnnnnnnnnnnnnnnnnnnnnnnnnnnnnnnnnnnnnnnnnnnnnnnnnnnnnnnnnnnnnnnnnnnnnnnnnnnnnnnnnnnnnnnnnnnnnnnnnnnnnnnnnnnnnnnnnnnnnnnnnnnnnnnnnnnnnnnnnnnnnnnnnnnnnnnnnnnnnnnnnnnnnnnnnnnnnnnnnnnnnnnnnnnnnnnnnnnnnnnnnnnnnnnnnnnnnnnnnnnnnnnnnnnnnnnnnnnnnnnnnnnnnnnnnnnnnnnnnnnnnnnnnnnnnnnnnnnnnnnnnnnnnnnnnnnnnnnnnnnnnnnnnnnnnnnnnnnnnnnnnnnnnnnnnnnnnnnnnnnnnnnnnnnnnnnnnnnnnnnnnnnnnnnnnnnnnnnnnnnnnnnnnnnnnnnnnnnnnnnnnnnnnnnnnnnnnnnnnnnnnnnnnnnnnnnnnnnnnnnnnnnnnnnnnnnnnnnnnnnnnnnnnnnnnnnnnnnnnnnnnnnnnnnnnnnnnnnnnnnnnnnnnnnnnnnnnnnnnnnnnnnnnnnnnnnnnnnnnnnnnnnnnnnnnnnnnnnnnnnnnnnnnnnnnnnnnnnnnnnnnnnnnnnnnnnnnnnnnnnnnnnnnnnnnnnnnnnnnnnnnnnnnnnnnnnnnnnnnnnnnnnnnnnnnnnnnnnnnnnnnnnnnnnnnnnnnnnnnnnnnnnnnnnnnnnnnnnnnnnnnnnnnnnnnnnnnnnnnnnnnnnnnnnnnnnnnnnnnnnnnnnnnnnnnnnnnnnnnnnnnnnnnnnnnnnnnnnnnnnnnnnnnnnnnnnnnnnnnnnnnnnnnnnnnnnnnnnnnnnnnnnnnnnnnnnnnnnnnnnnnnnnnnnnnnnnnnnnnnnnnnnnnnnnnnnnnnnnnnnnnnnnnnnnnnnnnnnnnnnnnnnnnnnnnnnnnnnnnnnnnnnnnnnnnnnnnnnnnnnnnnnnnnnnnnnnnnnnnnnnnnnnnnnnnnnnnnnnnnnnnnnnnnnnnnnnnnnnnnnnnnnnnnnnnnnnnnnnnnnnnnnnnnnnnnnnnnnnnnnnnnnnnnnnnnnnnnnnnnnnnnnnnnnnnnnnnnnnnnnnnnnnnnnnnnnnnnnnnnnnnnnnnnnnnnnnnnnnnnnnnnnnnnnnnnnnnnnnnnnnnnnnnnnnnnnnnnnnnnnnnnnnnnnnnnnnnnnnnnnnnnnnnnnnnnnnnnnnnnnnnnnnnnnnnnnnnnnnnnnnnnnnnnnnnnnnnnnnnnnnnnnnnnnnnnnnnnnnnnnnnnnnnnnnnnnnnnnnnnnnnnnnnnnnnnnnnnnnnnnnnnnnnnnnnnnnnnnnnnnnnnnnnnnnnnnnnnnnnnnnnnnnnnnnnnnnnnnnnnnnnnnnnnnnnnnnnnnnnnnnnnnnnnnnnnnnnnnnnnnnnnnnnnnnnnnnnnnnnnnnnnnnnnnnnnnnnnnnnnnnnnnnnnnnnnnnnnnnnnnnnnnnnnnnnnnnnnnnnnnnnnnnnnnnnnnnnnnnnnnnnnnnnnnnnnnnnnnnnnnnnnnnnnnnnnnnnnnnnnnnnnnnnnnnnnnnnnnnnnnnnnnnnnnnnnnnnnnnnnnnnnnnnnnnnnnnnnnnnnnnnnnnnnnnnnnnnnnnnnnnnnnnnnnnnnnnnnnnnnnnnnnnnnnnnnnnnnnnnnnnnnnnnnnnnnnnnnnnnnnnnnnnnnnnnnnnnnnnnnnnnnnnnnnnnnnnnnnnnnnnnnnnnnnnnnnnnnnnnnnnnnnnnnnnnnnnnnnnnnnnnnnnnnnnnnnnnnnnnnnnnnnnnnnnnnnnnnnnnnnnnnnnnnnnnnnnnnnnnnnnnnnnnnnnnnnnnnnnnnnnnnnnnnnnnnnnnnnnnnnnnnnnnnnnnnnnnnnnnnnnnnnnnnnnnnnnnnnnnnnnnnnnnnnnnnnnnnnnnnnnnnnnnnnnnnnnnnnnnnnnnnnnnnnnnnnnnnnnnnnnnnnnnnnnnnnnnnnnnnnnnnnnnnnnnnnnnnnnnnnnnnnnnnnnnnnnnnnnnnnnnnnnnnnnnnnnnnnnnnnnnnnnnnnnnnnnnnnnnnnnnnnnnnnnnnnnnnnnnnnnnnnnnnnnnnnnnnnnnnnnnnnnnnnnnnnnnnnnnnnnnnnnnnnnnnnnnnnnnnnnnnnnnnnnnnnnnnnnnnnnnnnnnnnnnnnnnnnnnnnnnnnnnnnnnnnnnnnnnnnnnnnnnnnnnnnnnnnnnnnnnnnnnnnnnnnnnnnnnnnnnnnnnnnnnnnnnnnnnnnnnnnnnnnnnnnnnnnnnnnnnnnnnnnnnnnnnnnnnnnnnnnnnnnnnnnnnnnnnnnnnnnnnnnnnnnnnnnnnnnnnnnnnnnnnnnnnnnnnnnnnnnnnnnnnnnnnnnnnnnnnnnnnnnnnnnnnnnnnnnnnnnnnnnnnnnnnnnnnnnnnnnnnnnnnnnnnnnnnnnnnnnnnnnnnnnnnnnnnnnnnnnnnnnnnnnnnnnnnnnnnnnnnnnnnnnnnnnnnnnnnnnnnnnnnnnnnnnnnnnnnnnnnnnnnnnnnnnnnnnnnnnnnnnnnnnnnnnnnnnnnnnnnnnnnnnnnnnnnnnnnnnnnnnnnnnnnnnnnnnnnnnnnnnnnnnnnnnnnnnnnnnnnnnnnnnnnnnnnnnnnnnnnnnnnnnnnnnnnnnnnnnnnnnnnnnnnnnnnnnnnnnnnnnnnnnnnnnnnnnnnnnnnnnnnnnnnnnnnnnnnnnnnnnnnnnnnnnnnnnnnnnnnnnnnnnnnnnnnnnnnnnnnnnnnnnnnnnnnnnnnnnnnnnnnnnnnnnnnnnnnnnnnnnnnnnnnnnnnnnnnnnnnnnnnnnnnnnnnnnnnnnnnnnnnnnnnnnnnnnnnnnnnnnnnnnnnnnnnnnnnnnnnnnnnnnnnnnnnnnnnnnnnnnnnnnnnnnnnnnnnnnnnnnnnnnnnnnnnnnnnnnnnnnnnnnnnnnnnnnnnnnnnnnnnnnnnnnnnnnnnnnnnnnnnnnnnnnnnnnnnnnnnnnnnnnnnnnnnnnnnnnnnnnnnnnnnnnnnnnnnnnnnnnnnnnnnnnnnnnnnnnnnnnnnnnnnnnnnnnnnnnnnnnnnnnnnnnnnnnnnnnnnnnnnnnnnnnnnnnnnnnnnnnnnnnnnnnnnnnnnnnnnnnnnnnnnnnnnnnnnnnnnnnnnnnnnnnnnnnnnnnnnnnnnnnnnnnnnnnnnnnnnnnnnnnnnnnnnnnnnnnnnnnnnnnnnnnnnnnnnnnnnnnnnnnnnnnnnnnnnnnnnnnnnnnnnnnnnnnnnnnnnnnnnnnnnnnnnnnnnnnnnnnnnnnnnnnnnnnnnnnnnnnnnnnnnnnnnnnnnnnnnnnnnnnnnnnnnnnnnnnnnnnnnnnnnnnnnnnnnnnnnnnnnnnnnnnnnnnnnnnnnnnnnnnnnnnnnnnnnnnnnnnnnnnnnnnnnnnnnnnnnnnnnnnnnnnnnnnnnnnnnnnnnnnnnnnnnnnnnnnnnnnnnnnnnnnnnnnnnnnnnnnnnnnnnnnnnnnnnnnnnnnnnnnnnnnnnnnnnnnnnnnnnnnnnnnnnnnnnnnnnnnnnnnnnnnnnnnnnnnnnnnnnnnnnnnnnnnnnnnnnnnnnnnnnnnnnnnnnnnnnnnnnnnnnnnnnnnnnnnnnnnnnnnnnnnnnnnnnnnnnnnnnnnnnnnnnnnnnnnnnnnnnnnnnnnnnnnnnnnnnnnnnnnnnnnnnnnnnnnnnnnnnnnnnnnnnnnnnnnnnnnnnnnnnnnnnnnnnnnnnnnnnnnnnnnnnnnnnnnnnnnnnnnnnnnnnnnnnnnnnnnnnnnnnnnnnnnnnnnnnnnnnnnnnnnnnnnnnnnnnnnnnnnnnnnnnnnnnnnnnnnnnnnnnnnnnnnnnnnnnnnnnnnnnnnnnnnnnnnnnnnnnnnnnnnnnnnnnnnnnnnnnnnnnnnnnnnnnnnnnnnnnnnnnnnnnnnnnnnnnnnnnnnnnnnnnnnnnnnnnnnnnnnnnnnnnnnnnnnnnnnnnnnnnnnnnnnnnnnnnnnnnnnnnnnnnnnnnnnnnnnnnnnnnnnnnnnnnnnnnnnnnnnnnnnnnnnnnnnnnnnnnnnnnnnnnnnnnnnnnnnnnnnnnnnnnnnnnnnnnnnnnnnnnnnnnnnnnnnnnnnnnnnnnnnnnnnnnnnnnnnnnnnnnnnnnnnnnnnnnnnnnnnnnnnnnnnnnnnnnnnnnnnnnnnnnnnnnnnnnnnnnnnnnnnnnnnnnnnnnnnnnnnnnnnnnnnnnnnnnnnnnnnnnnnnnnnnnnnnnnnnnnnnnnnnnnnnnnnnnnnnnnnnnnnnnnnnnnnnnnnnnnnnnnnnnnnnnnnnnnnnnnnnnnnnnnnnnnnnnnnnnnnnnnnnnnnnnnnnnnnnnnnnnnnnnnnnnnnnnnnnnnnnnnnnnnnnnnnnnnnnnnnnnnnnnnnnnnnnnnnnnnnnnnnnnnnnnnnnnnnnnnnnnnnnnnnnnnnnnnnnnnnnnnnnnnnnnnnnnnnnnnnnnnnnnnnnnnnnnnnnnnnnnnnnnnnnnnnnnnnnnnnnnnnnnnnnnnnnnnnnnnnnnnnnnnnnnnnnnnnnnnnnnnnnnnnnnnnnnnnnnnnnnnnnnnnnnnnnnnnnnnnnnnnnnnnnnnnnnnnnnnnnnnnnnnnnnnnnnnnnnnnnnnnnnnnnnnnnnnnnnnnnnnnnnnnnnnnnnnnnnnnnnnnnnnnnnnnnnnnnnnnnnnnnnnnnnnnnnnnnnnnnnnnnnnnnnnnnnnnnnnnnnnnnnnnnnnnnnnnnnnnnnnnnnnnnnnnnnnnnnnnnnnnnnnnnnnnnnnnnnnnnnnnnnnnnnnnnnnnnnnnnnnnnnnnnnnnnnnnnnnnnnnnnnnnnnnnnnnnnnnnnnnnnnnnnnnnnnnnnnnnnnnnnnnnnnnnnnnnnnnnnnnnnnnnnnnnnnnnnnnnnnnnnnnnnnnnnnnnnnnnnnnnnnnnnnnnnnnnnnnnnnnnnnnnnnnnnnnnnnnnnnnnnnnnnnnnnnnnnnnnnnnnnnnnnnnnnnnnnnnnnnnnnnnnnnnnnnnnnnnnnnnnnnnnnnnnnnnnnnnnnnnnnnnnnnnnnnnnnnnnnnnnnnnnnnnnnnnnnnnnnnnnnnnnnnnnnnnnnnnnnnnnnnnnnnnnnnnnnnnnnnnnnnnnnnnnnnnnnnnnnnnnnnnnnnnnnnnnnnnnnnnnnnnnnnnnnnnnnnnnnnnnnnnnnnnnnnnnnnnnnnnnnnnnnnnnnnnnnnnnnnnnnnnnnnnnnnnnnnnnnnnnnnnnnnnnnnnnnnnnnnnnnnnnnnnnnnnnnnnnnnnnnnnnnnnnnnnnnnnnnnnnnnnnnnnnnnnnnnnnnnnnnnnnnnnnnnnnnnnnnnnnnnnnnnnnnnnnnnnnnnnnnnnnnnnnnnnnnnnnnnnnnnnnnnnnnnnnnnnnnnnnnnnnnnnnnnnnnnnnnnnnnnnnnnnnnnnnnnnnnnnnnnnnnnnnnnnnnnnnnnnnnnnnnnnnnnnnnnnnnnnnnnnnnnnnnnnnnnnnnnnnnnnnnnnnnnnnnnnnnnnnnnnnnnnnnnnnnnnnnnnnnnnnnnnnnnnnnnnnnnnnnnnnnnnnnnnnnnnnnnnnnnnnnnnnnnnnnnnnnnnnnnnnnnnnnnnnnnnnnnnnnnnnnnnnnnnnnnnnnnnnnnnnnnnnnnnnnnnnnnnnnnnnnnnnnnnnnnnnnnnnnnnnnnnnnnnnnnnnnnnnnnnnnnnnnnnnnnnnnnnnnnnnnnnnnnnnnnnnnnnnnnnnnnnnnnnnnnnnnnnnnnnnnnnnnnnnnnnnnnnnnnnnnnnnnnnnnnnnnnnnnnnnnnnnnnnnnnnnnnnnnnnnnnnnnnnnnnnnnnnnnnnnnnnnnnnnnnnnnnnnnnnnnnnnnnnnnnnnnnnnnnnnnnnnnnnnnnnnnnnnnnnnnnnnnnnnnnnnnnnnnnnnnnnnnnnnnnnnnnnnnnnnnnnnnnnnnnnnnnnnnnnnnnnnnnnnnnnnnnnnnnnnnnnnnnnnnnnnnnnnnnnnnnnnnnnnnnnnnnnnnnnnnnnnnnnnnnnnnnnnnnnnnnnnnnnnnnnnnnnnnnnnnnnnnnnnnnnnnnnnnnnnnnnnnnnnnnnnnnnnnnnnnnnnnnnnnnnnnnnnnnnnnnnnnnnnnnnnnnnnnnnnnnnnnnnnnnnnnnnnnnnnnnnnnnnnnnnnnnnnnnnnnnnnnnnnnnnnnnnnnnnnnnnnnnnnnnnnnnnnnnnnnnnnnnnnnnnnnnnnnnnnnnnnnnnnnnnnnnnnnnnnnnnnnnnnnnnnnnnnnnnnnnnnnnnnnnnnnnnnnnnnnnnnnnnnnnnnnnnnnnnnnnnnnnnnnnnnnnnnnnnnnnnnnnnnnnnnnnnnnnnnnnnnnnnnnnnnnnnnnnnnnnnnnnnnnnnnnnnnnnnnnnnnnnnnnnnnnnnnnnnnnnnnnnnnnnnnnnnnnnnnnnnnnnnnnnnnnnnnnnnnnnnnnnnnnnnnnnnnnnnnnnnnnnnnnnnnnnnnnnnnnnnnnnnnnnnnnnnnnnnnnnnnnnnnnnnnnnnnnnnnnnnnnnnnnnnnnnnnnnnnnnnnnnnnnnnnnnnnnnnnnnnnnnnnnnnnnnnnnnnnnnnnnnnnnnnnnnnnnnnnnnnnnnnnnnnnnnnnnnnnnnnnnnnnnnnnnnnnnnnnnnnnnnnnnnnnnnnnnnnnnnnnnnnnnnnnnnnnnnnnnnnnnnnnnnnnnnnnnnnnnnnnnnnnnnnnnnnnnnnnnnnnnnnnnnnnnnnnnnnnnnnnnnnnnnnnnnnnnnnnnnnnnnnnnnnnnnnnnnnnnnnnnnnnnnnnnnnnnnnnnnnnnnnnnnnnnnnnnnnnnnnnnnnnnnnnnnnnnnnnnnnnnnnnnnnnnnnnnnnnnnnnnnnnnnnnnnnnnnnnnnnnnnnnnnnnnnnnnnnnnnnnnnnnnnnnnnnnnnnnnnnnnnnnnnnnnnnnnnnnnnnnnnnnnnnnnnnnnnnnnnnnnnnnnnnnnnnnnnnnnnnnnnnnnnnnnnnnnnnnnnnnnnnnnnnnnnnnnnnnnnnnnnnnnnnnnnnnnnnnnnnnnnnnnnnnnnnnnnnnnnnnnnnnnnnnnnnnnnnnnnnnnnnnnnnnnnnnnnnnnnnnnnnnnnnnnnnnnnnnnnnnnnnnnnnnnnnnnnnnnnnnnnnnnnnnnnnnnnnnnnnnnnnnnnnnnnnnnnnnnnnnnnnnnnnnnnnnnnnnnnnnnnnnnnnnnnnnnnnnnnnnnnnnnnnnnnnnnnnnnnnnnnnnnnnnnnnnnnnnnnnnnnnnnnnnnnnnnnnnnnnnnnnnnnnnnnnnnnnnnnnnnnnnnnnnnnnnnnnnnnnnnnnnnnnnnnnnnnnnnnnnnnnnnnnnnnnnnnnnnnnnnnnnnnnnnnnnnnnnnnnnnnnnnnnnnnnnnnnnnnnnnnnnnnnnnnnnnnnnnnnnnnnnnnnnnnnnnnnnnnnnnnnnnnnnnnnnnnnnnnnnnnnnnnnnnnnnnnnnnnnnnnnnnnnnnnnnnnnnnnnnnnnnnnnnnnnnnnnnnnnnnnnnnnnnnnnnnnnnnnnnnnnnnnnnnnnnnnnnnnnnnnnnnnnnnnnnnnnnnnnnnnnnnnnnnnnnnnnnnnnnnnnnnnnnnnnnnnnnnnnnnnnnnnnnnnnnnnnnnnnnnnnnnnnnnnnnnnnnnnnnnnnnnnnnnnnnnnnnnnnnnnnnnnnnnnnnnnnnnnnnnnnnnnnnnnnnnnnnnnnnnnnnnnnnnnnnnnnnnnnnnnnnnnnnnnnnnnnnnnnnnnnnnnnnnnnnnnnnnnnnnnnnnnnnnnnnnnnnnnnnnnnnnnnnnnnnnnnnnnnnnnnnnnnnnnnnnnnnnnnnnnnnnnnnnnnnnnnnnnnnnnnnnnnnnnnnnnnnnnnnnnnnnnnnnnnnnnnnnnnnnnnnnnnnnnnnnnnnnnnnnnnnnnnnnnnnnnnnnnnnnnnnnnnnnnnnnnnnnnnnnnnnnnnnnnnnnnnnnnnnnnnnnnnnnnnnnnnnnnnnnnnnnnnnnnnnnnnnnnnnnnnnnnnnnnnnnnnnnnnnnnnnnnnnnnnnnnnnnnnnnnnnnnnnnnnnnnnnnnnnnnnnnnnnnnnnnnnnnnnnnnnnnnnnnnnnnnnnnnnnnnnnnnnnnnnnnnnnnnnnnnnnnnnnnnnnnnnnnnnnnnnnnnnnnnnnnnnnnnnnnnnnnnnnnnnnnnnnnnnnnnnnnnnnnnnnnnnnnnnnnnnnnnnnnnnnnnnnnnnnnnnnnnnnnnnnnnnnnnnnnnnnnnnnnnnnnnnnnnnnnnnnnnnnnnnnnnnnnnnnnnnnnnnnnnnnnnnnnnnnnnnnnnnnnnnnnnnnnnnnnnnnnnnnnnnnnnnnnnnnnnnnnnnnnnnnnnnnnnnnnnnnnnnnnnnnnnnnnnnnnnnnnnnnnnnnnnnnnnnnnnnnnnnnnnnnnnnnnnnnnnnnnnnnnnnnnnnnnnnnnnnnnnnnnnnnnnnnnnnnnnnnnnnnnnnnnnnnnnnnnnnnnnnnnnnnnnnnnnnnnnnnnnnnnnnnnnnnnnnnnnnnnnnnnnnnnnnnnnnnnnnnnnnnnnnnnnnnnnnnnnnnnnnnnnnnnnnnnnnnnnnnnnnnnnnnnnnnnnnnnnnnnnnnnnnnnnnnnnnnnnnnnnnnnnnnnnnnnnnnnnnnnnnnnnnnnnnnnnnnnnnnnnnnnnnnnnnnnnnnnnnnnnnnnnnnnnnnnnnnnnnnnnnnnnnnnnnnnnnnnnnnnnnnnnnnnnnnnnnnnnnnnnnnnnnnnnnnnnnnnnnnnnnnnnnnnnnnnnnnnnnnnnnnnnnnnnnnnnnnnnnnnnnnnnnnnnnnnnnnnnnnnnnnnnnnnnnnnnnnnnnnnnnnnnnnnnnnnnnnnnnnnnnnnnnnnnnnnnnnnnnnnnnnnnnnnnnnnnnnnnnnnnnnnnnnnnnnnnnnnnnnnnnnnnnnnnnnnnnnnnnnnnnnnnnnnnnnnnnnnnnnnnnnnnnnnnnnnnnnnnnnnnnnnnnnnnnnnnnnnnnnnnnnnnnnnnnnnnnnnnnnnnnnnnnnnnnnnnnnnnnnnnnnnnnnnnnnnnnnnnnnnnnnnnnnnnnnnnnnnnnnnnnnnnnnnnnnnnnnnnnnnnnnnnnnnnnnnnnnnnnnnnnnnnnnnnnnnnnnnnnnnnnnnnnnnnnnnnnnnnnnnnnnnnnnnnnnnnnnnnnnnnnnnnnnnnnnnnnnnnnnnnnnnnnnnnnnnnnnnnnnnnnnnnnnnnnnnnnnnnnnnnnnnnnnnnnnnnnnnnnnnnnnnnnnnnnnnnnnnnnnnnnnnnnnnnnnnnnnnnnnnnnnnnnnnnnnnnnnnnnnnnnnnnnnnnnnnnnnnnnnnnnnnnnnnnnnnnnnnnnnnnnnnnnnnnnnnnnnnnnnnnnnnnnnnnnnnnnnnnnnnnnnnnnnnnnnnnnnnnnnnnnnnnnnnnnnnnnnnnnnnnnnnnnnnnnnnnnnnnnnnnnnnnnnnnnnnnnnnnnnnnnnnnnnnnnnnnnnnnnnnnnnnnnnnnnnnnnnnnnnnnnnnnnnnnnnnnnnnnnnnnnnnnnnnnnnnnnnnnnnnnnnnnnnnnnnnnnnnnnnnnnnnnnnnnnnnnnnnnnnnnnnnnnnnnnnnnnnnnnnnnnnnnnnnnnnnnnnnnnnnnnnnnnnnnnnnnnnnnnnnnnnnnnnnnnnnnnnnnnnnnnnnnnnnnnnnnnnnnnnnnnnnnnnnnnnnnnnnnnnnnnnnnnnnnnnnnnnnnnnnnnnnnnnnnnnnnnnnnnnnnnnnnnnnnnnnnnnnnnnnnnnnnnnnnnnnnnnnnnnnnnnnnnnnnnnnnnnnnnnnnnnnnnnnnnnnnnnnnnnnnnnnnnnnnnnnnnnnnnnnnnnnnnnnnnnnnnnnnnnnnnnnnnnnnnnnnnnnnnnnnnnnnnnnnnnnnnnnnnnnnnnnnnnnnnnnnnnnnnnnnnnnnnnnnnnnnnnnnnnnnnnnnnnnnnnnnnnnnnnnnnnnnnnnnnnnnnnnnnnnnnnnnnnnnnnnnnnnnnnnnnnnnnnnnnnnnnnnnnnnnnnnnnnnnnnnnnnnnnnnnnnnnnnnnnnnnnnnnnnnnnnnnnnnnnnnnnnnnnnnnnnnnnnnnnnnnnnnnnnnnnnnnnnnnnnnnnnnnnnnnnnnnnnnnnnnnnnnnnnnnnnnnnnnnnnnnnnnnnnnnnnnnnnnnnnnnnnnnnnnnnnnnnnnnnnnnnnnnnnnnnnnnnnnnnnnnnnnnnnnnnnnnnnnnnnnnnnnnnnnnnnnnnnnnnnnnnnnnnnnnnnnnnnnnnnnnnnnnnnnnnnnnnnnnnnnnnnnnnnnnnnnnnnnnnnnnnnnnnnnnnnnnnnnnnnnnnnnnnnnnnnnnnnnnnnnnnnnnnnnnnnnnnnnnnnnnnnnnnnnnnnnnnnnnnnnnnnnnnnnnnnnnnnnnnnnnnnnnnnnnnnnnnnnnnnnnnnnnnnnnnnnnnnnnnnnnnnnnnnnnnnnnnnnnnnnnnnnnnnnnnnnnnnnnnnnnnnnnnnnnnnnnnnnnnnnnnnnnnnnnnnnnnnnnnnnnnnnnnnnnnnnnnnnnnnnnnnnnnnnnnnnnnnnnnnnnnnnnnnnnnnnnnnnnnnnnnnnnnnnnnnnnnnnnnnnnnnnnnnnnnnnnnnnnnnnnnnnnnnnnnnnnnnnnnnnnnnnnnnnnnnnnnnnnnnnnnnnnnnnnnnnnnnnnnnnnnnnnnnnnnnnnnnnnnnnnnnnnnnnnnnnnnnnnnnnnnnnnnnnnnnnnnnnnnnnnnnnnnnnnnnnnnnnnnnnnnnnnnnnnnnnnnnnnnnnnnnnnnnnnnnnnnnnnnnnnnnnnnnnnnnnnnnnnnnnnnnnnnnnnnnnnnnnnnnnnnnnnnnnnnnnnnnnnnnnnnnnnnnnnnnnnnnnnnnnnnnnnnnnnnnnnnnnnnnnnnnnnnnnnnnnnnnnnnnnnnnnnnnnnnnnnnnnnnnnnnnnnnnnnnnnnnnnnnnnnnnnnnnnnnnnnnnnnnnnnnnnnnnnnnnnnnnnnnnnnnnnnnnnnnnnnnnnnnnnnnnnnnnnnnnnnnnnnnnnnnnnnnnnnnnnnnnnnnnnnnnnnnnnnnnnnnnnnnnnnnnnnnnnnnnnnnnnnnnnnnnnnnnnnnnnnnnnnnnnnnnnnnnnnnnnnnnnnnnnnnnnnnnnnnnnnnnnnnnnnnnnnnnnnnnnnnnnnnnnnnnnnnnnnnnnnnnnnnnnnnnnnnnnnnnnnnnnnnnnnnnnnnnnnnnnnnnnnnnnnnnnnnnnnnnnnnnnnnnnnnnnnnnnnnnnnnnnnnnnnnnnnnnnnnnnnnnnnnnnnnnnnnnnnnnnnnnnnnnnnnnnnnnnnnnnnnnnnnnnnnnnnnnnnnnnnnnnnnnnnnnnnnnnnnnnnnnnnnnnnnnnnnnnnnnnnnnnnnnnnnnnnnnnnnnnnnnnnnnnnnnnnnnnnnnnnnnnnnnnnnnnnnnnnnnnnnnnnnnnnnnnnnnnnnnnnnnnnnnnnnnnnnnnnnnnnnnnnnnnnnnnnnnnnnnnnnnnnnnnnnnnnnnnnnnnnnnnnnnnnnnnnnnnnnnnnnnnnnnnnnnnnnnnnnnnnnnnnnnnnnnnnnnnnnnnnnnnnnnnnnnnnnnnnnnnnnnnnnnnnnnnnnnnnnnnnnnnnnnnnnnnnnnnnnnnnnnnnnnnnnnnnnnnnnnnnnnnnnnnnnnnnnnnnnnnnnnnnnnnnnnnnnnnnnnnnnnnnnnnnnnnnnnnnnnnnnnnnnnnnnnnnnnnnnnnnnnnnnnnnnnnnnnnnnnnnnnnnnnnnnnnnnnnnnnnnnnnnnnnnnnnnnnnnnnnnnnnnnnnnnnnnnnnnnnnnnnnnnnnnnnnnnnnnnnnnnnnnnnnnnnnnnnnnnnnnnnnnnnnnnnnnnnnnnnnnnnnnnnnnnnnnnnnnnnnnnnnnnnnnnnnnnnnnnnnnnnnnnnnnnnnnnnnnnnnnnnnnnnnnnnnnnnnnnnnnnnnnnnnnnnnnnnnnnnnnnnnnnnnnnnnnnnnnnnnnnnnnnnnnnnnnnnnnnnnnnnnnnnnnnnnnnnnnnnnnnnnnnnnnnnnnnnnnnnnnnnnnnnnnnnnnnnnnnnnnnnnnnnnnnnnnnnnnnnnnnnnnnnnnnnnnnnnnnnnnnnnnnnnnnnnnnnnnnnnnnnnnnnnnnnnnnnnnnnnnnnnnnnnnnnnnnnnnnnnnnnnnnnnnnnnnnnnnnnnnnnnnnnnnnnnnnnnnnnnnnnnnnnnnnnnnnnnnnnnnnnnnnnnnnnnnnnnnnnnnnnnnnnnnnnnnnnnnnnnnnnnnnnnnnnnnnnnnnnnnnnnnnnnnnnnnnnnnnnnnnnnnnnnnnnnnnnnnnnnnnnnnnnnnnnnnnnnnnnnnnnnnnnnnnnnnnnnnnnnnnnnnnnnnnnnnnnnnnnnnnnnnnnnnnnnnnnnnnnnnnnnnnnnnnnnnnnnnnnnnnnnnnnnnnnnnnnnnnnnnnnnnnnnnnnnnnnnnnnnnnnnnnnnnnnnnnnnnnnnnnnnnnnnnnnnnnnnnnnnnnnnnnnnnnnnnnnnnnnnnnnnnnnnnnnnnnnnnnnnnnnnnnnnnnnnnnnnnnnnnnnnnnnnnnnnnnnnnnnnnnnnnnnnnnnnnnnnnnnnnnnnnnnnnnnnnnnnnnnnnnnnnnnnnnnnnnnnnnnnnnnnnnnnnnnnnnnnnnnnnnnnnnnnnnnnnnnnnnnnnnnnnnnnnnnnnnnnnnnnnnnnnnnnnnnnnnnnnnnnnnnnnnnnnnnnnnnnnnnnnnnnnnnnnnnnnnnnnnnnnnnnnnnnnnnnnnnnnnnnnnnnnnnnnnnnnnnnnnnnnnnnnnnnnnnnnnnnnnnnnnnnnnnnnnnnnnnnnnnnnnnnnnnnnnnnnnnnnnnnnnnnnnnnnnnnnnnnnnnnnnnnnnnnnnnnnnnnnnnnnnnnnnnnnnnnnnnnnnnnnnnnnnnnnnnnnnnnnnnnnnnnnnnnnnnnnnnnnnnnnnnnnnnnnnnnnnnnnnnnnnnnnnnnnnnnnnnnnnnnnnnnnnnnnnnnnnnnnnnnnnnnnnnnnnnnnnnnnnnnnnnnnnnnnnnnnnnnnnnnnnnnnnnnnnnnnnnnnnnnnnnnnnnnnnnnnnnnnnnnnnnnnnnnnnnnnnnnnnnnnnnnnnnnnnnnnnnnnnnnnnnnnnnnnnnnnnnnnnnnnnnnnnnnnnnnnnnnnnnnnnnnnnnnnnnnnnnnnnnnnnnnnnnnnnnnnnnnnnnnnnnnnnnnnnnnnnnnnnnnnnnnnnnnnnnnnnnnnnnnnnnnnnnnnnnnnnnnnnnnnnnnnnnnnnnnnnnnnnnnnnnnnnnnnnnnnnnnnnnnnnnnnnnnnnnnnnnnnnnnnnnnnnnnnnnnnnnnnnnnnnnnnnnnnnnnnnnnnnnnnnnnnnnnnnnnnnnnnnnnnnnnnnnnnnnnnnnnnnnnnnnnnnnnnnnnnnnnnnnnnnnnnnnnnnnnnnnnnnnnnnnnnnnnnnnnnnnnnnnnnnnnnnnnnnnnnnnnnnnnnnnnnnnnnnnnnnnnnnnnnnnnnnnnnnnnnnnnnnnnnnnnnnnnnnnnnnnnnnnnnnnnnnnnnnnnnnnnnnnnnnnnnnnnnnnnnnnnnnnnnnnnnnnnnnnnnnnnnnnnnnnnnnnnnnnnnnnnnnnnnnnnnnnnnnnnnnnnnnnnnnnnnnnnnnnnnnnnnnnnnnnnnnnnnnnnnnnnnnnnnnnnnnnnnnnnnnnnnnnnnnnnnnnnnnnnnnnnnnnnnnnnnnnnnnnnnnnnnnnnnnnnnnnnnnnnnnnnnnnnnnnnnnnnnnnnnnnnnnnnnnnnnnnnnnnnnnnnnnnnnnnnnnnnnnnnnnnnnnnnnnnnnnnnnnnnnnnnnnnnnnnnnnnnnnnnnnnnnnnnnnnnnnnnnnnnnnnnnnnnnnnnnnnnnnnnnnnnnnnnnnnnnnnnnnnnnnnnnnnnnnnnnnnnnnnnnnnnnnnnnnnnnnnnnnnnnnnnnnnnnnnnnnnnnnnnnnnnnnnnnnnnnnnnnnnnnnnnnnnnnnnnnnnnnnnnnnnnnnnnnnnnnnnnnnnnnnnnnnnnnnnnnnnnnnnnnnnnnnnnnnnnnnnnnnnnnnnnnnnnnnnnnnnnnnnnnnnnnnnnnnnnnnnnnnnnnnnnnnnnnnnnnnnnnnnnnnnnnnnnnnnnnnnnnnnnnnnnnnnnnnnnnnnnnnnnnnnnnnnnnnnnnnnnnnnnnnnnnnnnnnnnnnnnnnnnnnnnnnnnnnnnnnnnnnnnnnnnnnnnnnnnnnnnnnnnnnnnnnnnnnnnnnnnnnnnnnnnnnnnnnnnnnnnnnnnnnnnnnnnnnnnnnnnnnnnnnnnnnnnnnnnnnnnnnnnnnnnnnnnnnnnnnnnnnnnnnnnnnnnnnnnnnnnnnnnnnnnnnnnnnnnnnnnnnnnnnnnnnnnnnnnnnnnnnnnnnnnnnnnnnnnnnnnnnnnnnnnnnnnnnnnnnnnnnnnnnnnnnnnnnnnnnnnnnnnnnnnnnnnnnnnnnnnnnnnnnnnnnnnnnnnnnnnnnnnnnnnnnnnnnnnnnnnnnnnnnnnnnnnnnnnnnnnnnnnnnnnnnnnnnnnnnnnnnnnnnnnnnnnnnnnnnnnnnnnnnnnnnnnnnnnnnnnnnnnnnnnnnnnnnnnnnnnnnnnnnnnnnnnnnnnnnnnnnnnnnnnnnnnnnnnnnnnnnnnnnnnnnnnnnnnnnnnnnnnnnnnnnnnnnnnnnnnnnnnnnnnnnnnnnnnnnnnnnnnnnnnnnnnnnnnnnnnnnnnnnnnnnnnnnnnnnnnnnnnnnnnnnnnnnnnnnnnnnnnnnnnnnnnnnnnnnnnnnnnnnnnnnnnnnnnnnnnnnnnnnnnnnnnnnnnnnnnnnnnnnnnnnnnnnnnnnnnnnnnnnnnnnnnnnnnnnnnnnnnnnnnnnnnnnnnnnnnnnnnnnnnnnnnnnnnnnnnnnnnnnnnnnnnnnnnnnnnnnnnnnnnnnnnnnnnnnnnnnnnnnnnnnnnnnnnnnnnnnnnnnnnnnnnnnnnnnnnnnnnnnnnnnnnnnnnnnnnnnnnnnnnnnnnnnnnnnnnnnnnnnnnnnnnnnnnnnnnnnnnnnnnnnnnnnnnnnnnnnnnnnnnnnnnnnnnnnnnnnnnnnnnnnnnnnnnnnnnnnnnnnnnnnnnnnnnnnnnnnnnnnnnnnnnnnnnnnnnnnnnnnnnnnnnnnnnnnnnnnnnnnnnnnnnnnnnnnnnnnnnnnnnnnnnnnnnnnnnnnnnnnnnnnnnnnnnnnnnnnnnnnnnnnnnnnnnnnnnnnnnnnnnnnnnnnnnnnnnnnnnnnnnnnnnnnnnnnnnnnnnnnnnnnnnnnnnnnnnnnnnnnnnnnnnnnnnnnnnnnnnnnnnnnnnnnnnnnnnnnnnnnnnnnnnnnnnnnnnnnnnnnnnnnnnnnnnnnnnnnnnnnnnnnnnnnnnnnnnnnnnnnnnnnnnnnnnnnnnnnnnnnnnnnnnnnnnnnnnnnnnnnnnnnnnnnnnnnnnnnnnnnnnnnnnnnnnnnnnnnnnnnnnnnnnnnnnnnnnnnnnnnnnnnnnnnnnnnnnnnnnnnnnnnnnnnnnnnnnnnnnnnnnnnnnnnnnnnnnnnnnnnnnnnnnnnnnnnnnnnnnnnnnnnnnnnnnnnnnnnnnnnnnnnnnnnnnnnnnnnnnnnnnnnnnnnnnnnnnnnnnnnnnnnnnnnnnnnnnnnnnnnnnnnnnnnnnnnnnnnnnnnnnnnnnnnnnnnnnnnnnnnnnnnnnnnnnnnnnnnnnnnnnnnnnnnnnnnnnnnnnnnnnnnnnnnnnnnnnnnnnnnnnnnnnnnnnnnnnnnnnnnnnnnnnnnnnnnnnnnnnnnnnnnnnnnnnnnnnnnnnnnnnnnnnnnnnnnnnnnnnnnnnnnnnnnnnnnnnnnnnnnnnnnnnnnnnnnnnnnnnnnnnnnnnnnnnnnnnnnnnnnnnnnnnnnnnnnnnnnnnnnnnnnnnnnnnnnnnnnnnnnnnnnnnnnnnnnnnnnnnnnnnnnnnnnnnnnnnnnnnnnnnnnnnnnnnnnnnnnnnnnnnnnnnnnnnnnnnnnnnnnnnnnnnnnnnnnnnnnnnnnnnnnnnnnnnnnnnnnnnnnnnnnnnnnnnnnnnnnnnnnnnnnnnnnnnnnnnnnnnnnnnnnnnnnnnnnnnnnnnnnnnnnnnnnnnnnnnnnnnnnnnnnnnnnnnnnnnnnnnnnnnnnnnnnnnnnnnnnnnnnnnnnnnnnnnnnnnnnnnnnnnnnnnnnnnnnnnnnnnnnnnnnnnnnnnnnnnnnnnnnnnnnnnnnnnnnnnnnnnnnnnnnnnnnnnnnnnnnnnnnnnnnnnnnnnnnnnnnnnnnnnnnnnnnnnnnnnnnnnnnnnnnnnnnnnnnnnnnnnnnnnnnnnnnnnnnnnnnnnnnnnnnnnnnnnnnnnnnnnnnnnnnnnnnnnnnnnnnnnnnnnnnnnnnnnnnnnnnnnnnnnnnnnnnnnnnnnnnnnnnnnnnnnnnnnnnnnnnnnnnnnnnnnnnnnnnnnnnnnnnnnnnnnnnnnnnnnnnnnnnnnnnnnnnnnnnnnnnnnnnnnnnnnnnnnnnnnnnnnnnnnnnnnnnnnnnnnnnnnnnnnnnnnnnnnnnnnnnnnnnnnnnnnnnnnnnnnnnnnnnnnnnnnnnnnnnnnnnnnnnnnnnnnnnnnnnnnnnnnnnnnnnnnnnnnnnnnnnnnnnnnnnnnnnnnnnnnnnnnnnnnnnnnnnnnnnnnnnnnnnnnnnnnnnnnnnnnnnnnnnnnnnnnnnnnnnnnnnnnnnnnnnnnnnnnnnnnnnnnnnnnnnnnnnnnnnnnnnnnnnnnnnnnnnnnnnnnnnnnnnnnnnnnnnnnnnnnnnnnnnnnnnnnnnnnnnnnnnnnnnnnnnnnnnnnnnnnnnnnnnnnnnnnnnnnnnnnnnnnnnncacccaccagccccatgtcatggtacatgggcagccagaacacgctgctgtcctcgtactgtatgccgaaagcctgatggatggtgtggatgttggccatgaggttggcgtgaccgagcatgacgcccttgggccggctggtcgagccggaggtgtactggagcagggcaagcgtgtcgggggcgatggccggttcttgccagcgcttggccaaggcgtcgggaatctcgtcggtggcgagccacgagagctgggaggaagtggccgcttgaccgcttttttccgcttccattctggcctggaactgagccgcgcccaaggtgttgctcagagcgatgcgggccccggcatcggcggcgacggcctggaagcgttcgagtatgcggtggcgatgaggcgggtaggtcggcaccgctacgcaaccggcgtacaggcaaccgaagaaggccgtaatgaagtcgaggccgggcggatagaccagcagcacgcactggccggcaacgcccatgtcctgcaaacgagccgcgatggctcgggctcgccgatcgagctgggcgtaggtcagactggcgtgatcaccctggccttcgagcagatggacgaaggccggttgtcgcgggcgttcatcggcgtggcggcgcagcgcgtggatcaggtggcctggaagctgatgcagactaacgtggttttgagcgtgaacggacataataccgggtttcctggataacttcggcccacgaccggcgcgggtccaatcgtttataactccggccgagttcgttttcaaggattttgtccgcgcccggtcatggccgtgacgggaaaatccgggttgagagtagtcagagtcgccgtaaaatggggataattctggaggcacactgatgctcaaacgaccgcgtggtcatagtcccacttgaaccagccctcaagcgcaaaatatggccccgattatagcgaacaatccgtcaatgccagaactattctaattgcccatatacttcatgattctgccccggtaataagcgagcgcaaggaaaaacgacctcgccgtagtgcccgattccacgtattatggactccctgtgaccgaacccaaaaaggtcaaactcggtttcttcctcatcggcagcttcgttgttgccgccgcagccctgttatcattcggctggctggcggaagaggtgctccaatcagagacgcaggcattcgatgatgccgtgcgggcagcaatccaccgactcgcgtcgccgggaatgaccagcgcgatgcaagttttttcatttctcggttcgggaacactcctggcggcgctgagtctcctcacgattgtaatatttttatacatccatcgccctcgatcggctcatttgatgggcattaccatggcaggtgcggtcgctcttgatctgttgttgaagcacgcattccaccgtgggcgtcccgtcccctttttcgggacggccccaagctcgtatagttttccgagcggccatgctttcggatcgctttgtttctatggggcgttggcaggaattctttccgcgcacgcttcaacaccgagggcacgattctttatctggacatgcgctacactgcttgtcgggcttatcggattttcacgcatctatctgggagtacattacccgagcgatgtcttaggcggctattgcgctgcccttgtttgggtgggagcgattagtattctgaaccgtgttcttaacaaccgtgccaggtgaggtatcgaagccccggcgaacggcgctactcactcctgcgtttggacggatctggcaggtcgcccgttcccgtaatttcgaattaacctgtaccgcctttgtatgcccaggtgatttgctcgttagttcaatagtgctctgacatgtggtcgaaattgctcagacagaggggaagcctcggtttaaagtcatattggtcgtgagccctacacactttttaagagcgggaattccgatttgccgatcaagttgtattcgaatgcgttttctgcaccagacccggaccccgtgcaacaactatgatggtccgatgagcgcagatccgcgccatgagacgctcctccgggcttggacctggcgcctcgttcggtttgtattgtcggcaatgctgctttgccaggcgcactcctatgcgcaattaggaccgcagccgccatgcggtaaggaagccgttccgccctatcctggtctggatgattcggccatcgtgaagtcatggagcaagtctgatttcggccgcgactggagaccgcccgcatgcaccggttgggctgcggtgggctttacaacgttggtgaccacagtcgcgcggtttcgtcatacctcggaaactgagggcttgcttcgccacatcggggcaatttcagaactcgcgggcatgcgctactggtcgaccactcacaagcagtggcaaacactaattgtggacgcctacgctatgaccagcttgcagcctagtcaacgccgcgaagactttacgcccgatgagatgaaggaaggcacggtactctactttgaacaggtcgataacctttctggcaaagccatctaccgaatgcatattgctgaggcttcggcggaccgtctcgtcttcgatgtcgagaacgtcagcacgatgcgctatctctttataaccatcttccaaccgggtgagatgcaatcgatctactttctggatcgcgaatcggaaaacgtctggcgatgctacggcatggtgcgcacaggaaagaacgcgaaccgcctggtcctgggaaatgagtcttccacggtcaatcgggccttcgcgttctatcgcaacttggttggaattcccaccgaccaggagccgccggcggcgcgatgaaggcaggagtttgtagctcccccagctttcgcgcgtctcggtgcttcgccggactgacgagacaatggaaaaatcaaccactgcgggttgttcggtttctcaggctgttgcttcttttctgggtcactgctgtcgctatggggagaggcagctttcttgactcctttgccgactttcttgcccccttgcctacaccctcacccaaatccttgcctgccgcgatgggttcaccttgcttcatctcgtggccgattccctcgccgccccttcccacatctttgccggcggctttgaagtcgcctcgggccgactccggccccgctcccagtttgcctgccgtttgggcatcaacgtgtcccgtggccggcaggttctccgacttctgataggtcagatggggagaagggcaaatttccttggagtttacgcatggctgctgcgttggcggtggttgccgtcgtaaaaccaagctacatgagggtcccgcgggaagaaaccttctaaaccctccccctcggttccccctcaggtggcaaacgcactgaggtggatgacgcgcccacgcgctgccaaagcagcacccgtcaggccgatattggaaaggcggatatcctccccctctccgacggccgggtactgtttcgcttcgcctcctgatattctttggaggaaagcgtccacgtcatcacgtcccgcatcaggggttggattcctccccttctctccagccgagcccgcccgatccagcgcatcgagtccgtaactgcgcatgagtttcggccagagctttctcagcgtgtcagggctgtcaaagagctcgaaaccgctcacctcgccctcgatcgtgaagactgccccaacctgcccctcctctggcggcaaggaacgaacgtattcctccagccccgccgagtgttgctcgaatatatccgccatggccgacgtgcgggaagtggcattcagccggtggaatttctcgtcgatgtcctgccagaccgctctctggttcgagtatctggtccccgtggactgcagcgatgcagaaacctgcgccatcttcctagcccgaccttcggcatattgagcacgcggtgccgcagagaaatccacggaacggcgtgcccagcggccgcgctccacacaggaaaccggaattgtgacggctttcttagccgaaatgagaatactcaaattcagcgtgcggttttgcttggcgccgatcagttcttcgccctccatcaaaaaaaccgggtggtcgctgtcgttgatgaatttcaggtccggaacactgccgccttcggacacctcggcaaccttggcagacttgttggtcagagcttcgtccaaggttatgtagtcgggcgcgatgcccttgccgaatacaggaaagatcgtgagatttcgaaatgtcttgggtttgccaagcctggtactggaaatagtatcggtaatcagttgcataatgcctcctctgggtggtggcattcggttgacccgtagtgggctgagccagccatccaagaatttgtcagccctggtttctaataatgccctttcatgctgcttgcagaacttccagcagccgcaccattgccagcgtgtcctgcctgcagtaagccaggagggcctctttaagccgccttctctcttcggttcccgcctcagcatgaaccatcttttcccaggcaaggccggcgtcgttgccttcggccacttccatcccgtcgtaggacatgtcgggcacaagggcaggcaagacgctcttcaatgaaagcggctggtggacgactttacctcgattagccgccatttgttccggtgcagtctttccaggatgtcaactctggccagaatgttgtcgtgtgtgaaagtcgcctcgaagatggcgggatgttgcctgtccgctaccgcctgctcggtttgccggagggccttgtccatctcctcgcgccccgcctcgatgagcgctccgccgggaaacatcctctgggcccatcggcccacctcgtgaccctgctcgaagaccgccatggattgttcgtcaggctccgctgccagttccggctgatgaacctccaggtacaggcgcttgaggcactgccagccggcgatgaatcttgattttgagagccccatggatcctccggtttagcaagaccacgactgcctaccagaccgcaactgtacgcgggggccgcctgccaagagcatacacccaaactgtgtcagggatggtcaccgcgatggctggtgatggatacctgggcatctctaaaagcgagttatcagcagggggccgcaatactcaaccaaagatcaaaacggggccacacacttccgtttccgttactcgctcagggcacacgccggagctttcagcgggcctgcgtcattcgagtggagccgcggcttccgttcgccgctcctggcagtcctggggaatttgccgcaaccggattccgtgaaacgcgttgctgttgacccatcgcatgttgtcgcaacctgtctgaagccgacggatgacccgtcctttggaggcaccattttgcgggtttgggaagtcggcgggaagtctgggccagtggctcttagcgttcgaggttttcggagagcaattcaaaccgacctactggaacgaaacctcagggacctccgcatggaggatggggagttcaaactcgatgtgcctggctatgggtttgccgccgtccggctgctggattaacatctgaggccaggccagcgtggacctggcacgaatgcgccttcgctaagagcgggatctgagcaatcggtaggacctcgcttggccattcgctgtgcctcgcttcactccaaacaacgccactcccaagcagcccgaatcgccccttagccaaagagtccacgggatgagtccccagccgcgagctatattccgaaatgggtcctcgcacagttgtgaacagggtactcggtactttggtgcttttgacgctttgagatggggcagcgaaactagcagtgtgaacaatcccccccagaggatgggggatcgaacaatagagtgcccaccgtgctgaccgcctaaggggtggtgctcgggggcagctcagcaggatggcagaggatcggccgtatccggttgtgccgcatatgcgaaggcagtcacgactctaacttggcgggaagaaacaatgattcggatcggggtcatcggctacggctactggggtccaaatatagtcagaaacctgcactccctcgattcgacccgggttgctgccgtttgcgacagtgacccaaaaggtcaaagccgggcaaaacaagcatatccggatgtgcaggttacctccgacgcatctgaaatcttgcattcaccatccgttgatgcagtggccatcgtcactcccgtctggacgcatttcgagctggcaatggctgccctggaaaacggcaagcacgttttccttgaaaagccccttacttcgaatgcgatccaggctgagaggctgatcgaattggcagagaagagaaacctcaagattatggtggaccacacgtttctgtttaccggagcggtgaagaagatccgccaactgatcgatcaaggtgaactgggcaacatctactatttcgactccacgagggtccaactgggccttttccaacacgaccttgacgtgatttgggatctcgcgcctcatgatttgtccataatggaccacctcatccgaaaggaacccgaggctgtcgtcgcgaccggccaggctcacttgaacgtccatgccgacgtggcatttatcactgtgtatttcccgtccaacactattgctcacatcaacgttaactggttatctcccgtgaagatccgaaccacgctggtcgggggagagaaaaagatgctggtgtggaacgacttggaagccgtcgagaaaattaaggtctacgacaggggcgtgcaaatggccagcagggaaggagtctatgaattgcttgtcagctaccgctcgggagacatgtgggcgcccaagatcgagcagacagaagcactgaaggtcgaactggagtacttcttggagtgtatcgaaaccaaccaaacgccccttaacgacggtttggctggattgcgtgttgtcaaattgctggaagcggcaacagaatcactaaagctgagaggggcgtccgtttcggtatgaacatctaccacctcctcagcagtcacgattgtcttgccacaagcggggcactttagctcttcctcttcgcccacttcgatgatcgcgggaccgctcgtttgaatcgttgaggtaatacgagatcagaagaccggtgtccgcgtagaggatcatgcgggcttagtagctctcctcgtcccgcgccagcagaactaaattgggcagaattttgtcgccacaaattcgacgccgccgagcggcagcgtcgggccagcgaatcgggcgtccccgtctagccgccggccccacttccggcgccgtttccagttcgtgaacgccttcaaagaatttccggcgctcccgaggcggcaaggccttcacgtactccaatacttcattcgcgcccatcatcgaaaaatatcacgcacggggcgcgcagcgcaagttcggcgggctgccgcagggcgagcacagctctacgattcaccgtctcgccaaaacgcagagttgcactctgcgccagccagccttttttcttcgcggcacaaaggggcgctacagttctgctcccggacttgcctttcatccctcccaggtgtataccttcgtcatgtttatcctgtggtagccacctggcgggcggccgggtcgcgatcacccaacggccccaccacccgcctcttgccccgtgaaggaggaagcagtgaagtataacctgctcgaagaaaagtggattcccgttctatacaaggacgggatcagcacacgtgtgaatgtcattgaggcgtttacggaagccggccgcatccgcgaaatcgcggccagcaaccctatggaccgcttggccatcctgcgtttcctgctcgcgcttctctattggtgcaaggggaatcctccagacgaaaccgactcgatctcttcgtttccctcggattggttcaagaggctcgatgacaataaggactgtttcaacctgctgggcgatgggaggcgtttttaccaacagaagcctaagcgtcttgagaagaaactctcggccgactatctcatgcaggaggtgcccaccggcacaaacttctggcacttccggcatgggacagatttgagagacggcttatgtccggcgtgctgtgcaatgggcctgttgcgcctgccgctctttgctacctcggccgggcgcggcaagcccccgggcgtcaatcaaaaaccgccgacctacatcgtgccgatgggcgactcgctttccgaaaccctgcgtctctcgtggcggaaaagaccggagccgaacctgggcacgcccacatgggaaaagccggacataaccctccctcaacacggcaatgttcccctattaacgggattaacgtgggtgccgcgccgcgtgtggttggacgctcccgaggaaccccagtccaactgcatcgcctgcgggcgcagagaggctctgatccgtcgatgtgtctttgcgggtatcggcagcacaagaacagacgaagggagtccggcacgagtgtggaacgacccgcacaccatcagggaaggcgacgagattgtgaagcctttcagcgcgcttggcccggccgatgctgcggctgggaagtggacgaaagtcgtggctggaatcctgtgcggggaaaagccgaaggaaaaacaaaggttgtgggtcgtcagctttgcgacagtgcagaatgacaaatacctggaagcaaccgagtgggagattccgttcctgaccgcgcttgacgacatgaaggttcaggagagtatagaaagcatcggggcgtggcagagggaaggctggaagctccctggcaaaaccaaaccgcgagagatttcccaaacaaggggacaccttgaaattctctccgccgtcgccgcggttcgtccccaagccgaaagaacggtttccggaagaattgaccaattgatcgcccaaggcggcgacgcatggcaagaagccgcccaggagtatcgtccgctgatggccgcagtcgccaaatcgctttcacccggttacacaagcgcgtctctccgaagtcggcaagaaattgccgcagtaaagccggacatgcggccgaagaaaaaccacaaaaacgaagggagggacaagtgactgcaacggagcagtacgtcgaagttctgagtcggctgaaacccggtgagctcgggctcttgcgcaaccatgccggacaagggctcgacgaatcggtggagggctttgaccttttcgcaggactctggtggccactgcgggcgcaaacccagcgggcgcctcgccgtgaggtggcgtggcttgtcgccaaactctacgccttccggcccctcgagcattcacccggggagacgctcgctcgccaactcgcgcgctcccggcccggcgacaaaacagagcgaaagcgtttcgagcaacgcttcgataggatgctgacgctgccgcttgctgaaatcgaacccgccctacaatgggcaatcgacctcatcgctgccaagcaccccaaactcgactgggtacggctgacgaacgatctttccatctgggaacgcgaatccacccggctcaaatgggccacggaattcttgagctgttcaataggaggagaatcatgttgatccagattcacgccattcaaaatcacagcccggccaacctgaaccgggatgacctgggcgcgcccaagacttgcttttttggcggagtcttgcgctcccgtatttccagccagtgtctcaagcgcagcatccgcatgagtgaggagttcagccaattgcgcggcggagtgcgcacccgccagttagcgaaagagattgccgaaaaggtgacgggcaaagacgtcaggaagcgcgccgagaacattctcaaggcctgcggcctggagcctaaaaaggcaaaaaagcaggaaggagagggtgaacaagaaagtgccgagaggagcaagatgttggtttacaccacgcaaggggcgattgtacggatggccgaactcctccagaaggaagacggaaaaacggacgaggccttagcagcggagttcgggaagctgatcagtgaatccgtcgccgtgccggacatggccctgtgcggcaggatgcttgaaacgggagtactcgaaaacaccactgtcgaggcatcgcttcaggtggcccatgcgatttccacccatgaggcccgcccggaggtggactactatgtggccgctgatgatgtccccggcgaggacgcgggcgcagcttacgtggatgaagccatgtttggctcagcatgtttttacaagtatttctccattcattgggaaacgctggtcaggaacctcgagcccttcggcgcggatcacgaaaagttggcggcccataccgtcggcgagttcattcgcgcagcggcgttggtcaaccccacgggaaaacaaaacagttttgccgcgcacaatcctcctgacggaatgttggtggaagtcagaaacactccaatcagctacgccaacgccttcgccaaaccggcggctcctcagggcgaacgggacatcatctcgcagagcgtggcggagcttgcccattatgtgaacgacatggatacgggatacggcaagcccacgaagcggttctggttctctcccaatctccgctatccgttgacggctaccaccacggaaagcgaaaacggaaaacagaaacagcgtgaggtcccgcttgccgacaaagatgtcaagtctcttgacgaactgatagcggccgtactcaaccaaatcggccacgactggcaggaggtcgagaaagtggtcctgaatccggaggtgccccgtgagcccaaacacgctgttcattcggcttgaagggcctcttcaggcttggggcgatcagcaatcgaagtttgtcatccggcggacggctgaggccccgaccaaatcgggcgtaatcggcatgctgtgcgcggccttgggcgcctcccggtcagaggccgctgaggagtggcttccaaggctaagccggctgctcatgggcgtacgcatcgacgcgcccggagtccgctggtgggattatcacaccgtgggcgccggcatgccgatgcgcactgccgagggtggaagcaagcccggggccatgctcacccgccgcgagtacctttgcgatgcgtcgttcttggttgcactccagggtgaaccgggcctgatcgctgaaattgacgccgcggtcaagtcgccccgatggactctgtacctcggcagaaagtgctgcccgccctcgcgccctttgctggagcatccgccaggggaattttccgatttgctctccgccctcgaatcggtaccttggcgcaaacggctggagggagacccacagccccaaacgctggaatgtctgctcgactggcacccaaccgcagaccagccggacgctcccgatgattcgctcgtttggtacgacgtgcctcggagtctcgacccgccctcgcacgaagctcgattcgtcattcgcaagcaattacgcgtcggggctgaaggcggcgtgaccgttgcacctctgcccgcacagagcgccacgccggcgcctccccgcccaagggcggattacaccaataccgagtacaaaaaccggcgcaaagagcggctcgacgatgaccatcacttatgcgttttttgcaagtctcccgccaccaccgtgcagcacatcacctaccgtcgcgcgggtggcggcgagttgaaggacgatttgcgctccctctgccgcctctgccacgacgccgtgaccatgcttgaatacggcctgggcatgggactcgaccgcatcaatcccgaggacccgcaatggcgtgaccggattatcgacaagcgggacgagatcgtcaggttccgctcggaggaaacccgcaggcgattgctcgccgaggaggtggaataggatgtacatttcctgtctcctaatcaacgtcggtgacaaccccgaccgtccccgccccgggcggctctggctgcgcaacctttatcacgttcatcagcgcctctgcatggcctttccctcccatccccaaaaagatccccacttcctcgcgcccttcaagcccgcggactttgacgggaagcaagtccatgtggagcgcggtgcggattccggctttctctttcgcatcgacccgcaactgggcggccgggccatgattgtggtgcagtccgccaccaaacccgattgggactatgcctttcaaaatgcgggccatcttctggtgaattccttcgccgctccccctcaggtaaaagaactcgatccctgtttcagcgccggtcagcagcttcgctttcgaatccgcgtcaacctgagcaaaaagataaagaccagcacagcgggcatcgatcttaccaggccgcgagtggggacggatccccagggccgaccgaaggcccaaagcaaacgcgtggcgctcacctgggataaggaccaggacccgcaggacgccatacgggagtggttcgctaaaaaggcccagaacggcggcttcaagctgggagccttgcgcgctctgcacatcggctggggcgctggaaatgacccggactccacgcctgccgtccaggacagccgctcgggggacaggcgcatgaaattccgctccgccttgctcgaaggaacgctcacggttgaggaccctgctaaatttcgtgaagccgtcgttcacggcatcgggcccggcaaggccttcggtttcggcctgctttcagtagcccccgaagcccgctcagcgggcggcgacgtgtagcccacggcgcaagccagacccgtggtggtgacatgcgaactcaagatctgcatattctaccgaagttcagcgacggatggagttacctgtacgtcgagcgctgcaaggtggatcaggaagaccgggccattgccctgcacaatgaagcggggaagacgcccgtgccttgcgcaaatctggccttgctcatgctgggaccgggcgtctccatcactcacgccgccatttccgtgctggcggaccatgggtgcctagtggcgtggtgcggagaagagggggtccgcttctacgccacgggcatgggcgagacgcgcaacgccgccaattttctccatcaggcgcgcctgtgggcgcacgagggttttcgcatgcaggtggtgcgccgcctctatcagttgcgttttgccgagaagttcgaccccgccttgaccctgcaacagatacgtggcatggagggcgtacgggttcgagacgcctacgcgaaggccgccaaggaggccggcatcgcctgggaaggccgaaactatcagcgccaggagtggagccaggcggaccccgctaaccgggccttgtccgccgccaattcctgcctttacggtatctgccatgcggccgtcgtctcggctgggttttcccccgccctcgggtttatccatacgggcaagatgctctcctttgtgtacgatgtggccgacttgtacaaaactgaaatcaccgttccgatggcctttcgcgccgccgccgaagcgcaagatcaactcgagcggcgggtgcgcatcacctgccgcgacaggtttgtatccacacggcttttggaaaggatcatcccggatatccaatctgccctgatgctgtcaaaagcggcggcgcccgactctgaatttgaccttgatgccgccgcccccggctccctctgggacgatttgcagggcgccgtggaaggcggccacttgcacgccgtagaagaggaagaaacggagcccaaccatggtggttctgattcttgagcgcgtcccgccagcattgcgaggcgagctcactcggtggtttctcgaacctcaggcaggggtgtttgtgggacgcgtctccgctctggttcgcgatcggttatgggaaaaggcttgcgcccaagccaaaggaggcggatgcctgattctccactcaagcgataatgagcagggattccgtgtccgaacatggggcagaacagcgcgctgcatcgatgacttcgagggcctttttctcgtgcgtatgccgcagaatcaatagcttgggaagtgttgtccccacgcgcgtgggggtgaaccggatgagtttccagggccgctcattgcagacgagttgtccccacgcgcgtgggggtgaaccgtgggatgcgtcctggctcgaggtgggtggcccgttgtccccacgcgcgtgggggtgaaccggctcaaggcgcttgccgccgagggcaagaccggttgtccccacgcgcgtgggggtgaaccggtgggatacacatcggccgggctgatcgcgatgttgtccccacgcgcgtgggggtgaaccgccctgctgaaacgacacgatctggcctaccaggttgtccccacgcgcgtgggggtgaaccggaggacccctacattcaggagcagatcaagatgttgtccccacgcgcgtgggggtgaaccgctttcaagcttgcgaccgcgttttcggccaacgttgtccccacgcgcgtg

SEQ ID NO: 1005 - DNA, 110570 bp, Artificial Sequence
  Synthetic Oligonucleotide
  misc_feature (1)..(96189): n is a, c, g, or t
nnnnnnnnnnnnnnnnnnnnnnnnnnnnnnnnnnnnnnnnnnnnnnnnnnnnnnnnnnnnnnnnnnnnnnnnnnnnnnnnnnnnnnnnnnnnnnnnnnnnnnnnnnnnnnnnnnnnnnnnnnnnnnnnnnnnnnnnnnnnnnnnnnnnnnnnnnnnnnnnnnnnnnnnnnnnnnnnnnnnnnnnnnnnnnnnnnnnnnnnnnnnnnnnnnnnnnnnnnnnnnnnnnnnnnnnnnnnnnnnnnnnnnnnnnnnnnnnnnnnnnnnnnnnnnnnnnnnnnnnnnnnnnnnnnnnnnnnnnnnnnnnnnnnnnnnnnnnnnnnnnnnnnnnnnnnnnnnnnnnnnnnnnnnnnnnnnnnnnnnnnnnnnnnnnnnnnnnnnnnnnnnnnnnnnnnnnnnnnnnnnnnnnnnnnnnnnnnnnnnnnnnnnnnnnnnnnnnnnnnnnnnnnnnnnnnnnnnnnnnnnnnnnnnnnnnnnnnnnnnnnnnnnnnnnnnnnnnnnnnnnnnnnnnnnnnnnnnnnnnnnnnnnnnnnnnnnnnnnnnnnnnnnnnnnnnnnnnnnnnnnnnnnnnnnnnnnnnnnnnnnnnnnnnnnnnnnnnnnnnnnnnnnnnnnnnnnnnnnnnnnnnnnnnnnnnnnnnnnnnnnnnnnnnnnnnnnnnnnnnnnnnnnnnnnnnnnnnnnnnnnnnnnnnnnnnnnnnnnnnnnnnnnnnnnnnnnnnnnnnnnnnnnnnnnnnnnnnnnnnnnnnnnnnnnnnnnnnnnnnnnnnnnnnnnnnnnnnnnnnnnnnnnnnnnnnnnnnnnnnnnnnnnnnnnnnnnnnnnnnnnnnnnnnnnnnnnnnnnnnnnnnnnnnnnnnnnnnnnnnnnnnnnnnnnnnnnnnnnnnnnnnnnnnnnnnnnnnnnnnnnnnnnnnnnnnnnnnnnnnnnnnnnnnnnnnnnnnnnnnnnnnnnnnnnnnnnnnnnnnnnnnnnnnnnnnnnnnnnnnnnnnnnnnnnnnnnnnnnnnnnnnnnnnnnnnnnnnnnnnnnnnnnnnnnnnnnnnnnnnnnnnnnnnnnnnnnnnnnnnnnnnnnnnnnnnnnnnnnnnnnnnnnnnnnnnnnnnnnnnnnnnnnnnnnnnnnnnnnnnnnnnnnnnnnnnnnnnnnnnnnnnnnnnnnnnnnnnnnnnnnnnnnnnnnnnnnnnnnnnnnnnnnnnnnnnnnnnnnnnnnnnnnnnnnnnnnnnnnnnnnnnnnnnnnnnnnnnnnnnnnnnnnnnnnnnnnnnnnnnnnnnnnnnnnnnnnnnnnnnnnnnnnnnnnnnnnnnnnnnnnnnnnnnnnnnnnnnnnnnnnnnnnnnnnnnnnnnnnnnnnnnnnnnnnnnnnnnnnnnnnnnnnnnnnnnnnnnnnnnnnnnnnnnnnnnnnnnnnnnnnnnnnnnnnnnnnnnnnnnnnnnnnnnnnnnnnnnnnnnnnnnnnnnnnnnnnnnnnnnnnnnnnnnnnnnnnnnnnnnnnnnnnnnnnnnnnnnnnnnnnnnnnnnnnnnnnnnnnnnnnnnnnnnnnnnnnnnnnnnnnnnnnnnnnnnnnnnnnnnnnnnnnnnnnnnnnnnnnnnnnnnnnnnnnnnnnnnnnnnnnnnnnnnnnnnnnnnnnnnnnnnnnnnnnnnnnnnnnnnnnnnnnnnnnnnnnnnnnnnnnnnnnnnnnnnnnnnnnnnnnnnnnnnnnnnnnnnnnnnnnnnnnnnnnnnnnnnnnnnnnnnnnnnnnnnnnnnnnnnnnnnnnnnnnnnnnnnnnnnnnnnnnnnnnnnnnnnnnnnnnnnnnnnnnnnnnnnnnnnnnnnnnnnnnnnnnnnnnnnnnnnnnnnnnnnnnnnnnnnnnnnnnnnnnnnnnnnnnnnnnnnnnnnnnnnnnnnnnnnnnnnnnnnnnnnnnnnnnnnnnnnnnnnnnnnnnnnnnnnnnnnnnnnnnnnnnnnnnnnnnnnnnnnnnnnnnnnnnnnnnnnnnnnnnnnnnnnnnnnnnnnnnnnnnnnnnnnnnnnnnnnnnnnnnnnnnnnnnnnnnnnnnnnnnnnnnnnnnnnnnnnnnnnnnnnnnnnnnnnnnnnnnnnnnnnnnnnnnnnnnnnnnnnnnnnnnnnnnnnnnnnnnnnnnnnnnnnnnnnnnnnnnnnnnnnnnnnnnnnnnnnnnnnnnnnnnnnnnnnnnnnnnnnnnnnnnnnnnnnnnnnnnnnnnnnnnnnnnnnnnnnnnnnnnnnnnnnnnnnnnnnnnnnnnnnnnnnnnnnnnnnnnnnnnnnnnnnnnnnnnnnnnnnnnnnnnnnnnnnnnnnnnnnnnnnnnnnnnnnnnnnnnnnnnnnnnnnnnnnnnnnnnnnnnnnnnnnnnnnnnnnnnnnnnnnnnnnnnnnnnnnnnnnnnnnnnnnnnnnnnnnnnnnnnnnnnnnnnnnnnnnnnnnnnnnnnnnnnnnnnnnnnnnnnnnnnnnnnnnnnnnnnnnnnnnnnnnnnnnnnnnnnnnnnnnnnnnnnnnnnnnnnnnnnnnnnnnnnnnnnnnnnnnnnnnnnnnnnnnnnnnnnnnnnnnnnnnnnnnnnnnnnnnnnnnnnnnnnnnnnnnnnnnnnnnnnnnnnnnnnnnnnnnnnnnnnnnnnnnnnnnnnnnnnnnnnnnnnnnnnnnnnnnnnnnnnnnnnnnnnnnnnnnnnnnnnnnnnnnnnnnnnnnnnnnnnnnnnnnnnnnnnnnnnnnnnnnnnnnnnnnnnnnnnnnnnnnnnnnnnnnnnnnnnnnnnnnnnnnnnnnnnnnnnnnnnnnnnnnnnnnnnnnnnnnnnnnnnnnnnnnnnnnnnnnnnnnnnnnnnnnnnnnnnnnnnnnnnnnnnnnnnnnnnnnnnnnnnnnnnnnnnnnnnnnnnnnnnnnnnnnnnnnnnnnnnnnnnnnnnnnnnnnnnnnnnnnnnnnnnnnnnnnnnnnnnnnnnnnnnnnnnnnnnnnnnnnnnnnnnnnnnnnnnnnnnnnnnnnnnnnnnnnnnnnnnnnnnnnnnnnnnnnnnnnnnnnnnnnnnnnnnnnnnnnnnnnnnnnnnnnnnnnnnnnnnnnnnnnnnnnnnnnnnnnnnnnnnnnnnnnnnnnnnnnnnnnnnnnnnnnnnnnnnnnnnnnnnnnnnnnnnnnnnnnnnnnnnnnnnnnnnnnnnnnnnnnnnnnnnnnnnnnnnnnnnnnnnnnnnnnnnnnnnnnnnnnnnnnnnnnnnnnnnnnnnnnnnnnnnnnnnnnnnnnnnnnnnnnnnnnnnnnnnnnnnnnnnnnnnnnnnnnnnnnnnnnnnnnnnnnnnnnnnnnnnnnnnnnnnnnnnnnnnnnnnnnnnnnnnnnnnnnnnnnnnnnnnnnnnnnnnnnnnnnnnnnnnnnnnnnnnnnnnnnnnnnnnnnnnnnnnnnnnnnnnnnnnnnnnnnnnnnnnnnnnnnnnnnnnnnnnnnnnnnnnnnnnnnnnnnnnnnnnnnnnnnnnnnnnnnnnnnnnnnnnnnnnnnnnnnnnnnnnnnnnnnnnnnnnnnnnnnnnnnnnnnnnnnnnnnnnnnnnnnnnnnnnnnnnnnnnnnnnnnnnnnnnnnnnnnnnnnnnnnnnnnnnnnnnnnnnnnnnnnnnnnnnnnnnnnnnnnnnnnnnnnnnnnnnnnnnnnnnnnnnnnnnnnnnnnnnnnnnnnnnnnnnnnnnnnnnnnnnnnnnnnnnnnnnnnnnnnnnnnnnnnnnnnnnnnnnnnnnnnnnnnnnnnnnnnnnnnnnnnnnnnnnnnnnnnnnnnnnnnnnnnnnnnnnnnnnnnnnnnnnnnnnnnnnnnnnnnnnnnnnnnnnnnnnnnnnnnnnnnnnnnnnnnnnnnnnnnnnnnnnnnnnnnnnnnnnnnnnnnnnnnnnnnnnnnnnnnnnnnnnnnnnnnnnnnnnnnnnnnnnnnnnnnnnnnnnnnnnnnnnnnnnnnnnnnnnnnnnnnnnnnnnnnnnnnnnnnnnnnnnnnnnnnnnnnnnnnnnnnnnnnnnnnnnnnnnnnnnnnnnnnnnnnnnnnnnnnnnnnnnnnnnnnnnnnnnnnnnnnnnnnnnnnnnnnnnnnnnnnnnnnnnnnnnnnnnnnnnnnnnnnnnnnnnnnnnnnnnnnnnnnnnnnnnnnnnnnnnnnnnnnnnnnnnnnnnnnnnnnnnnnnnnnnnnnnnnnnnnnnnnnnnnnnnnnnnnnnnnnnnnnnnnnnnnnnnnnnnnnnnnnnnnnnnnnnnnnnnnnnnnnnnnnnnnnnnnnnnnnnnnnnnnnnnnnnnnnnnnnnnnnnnnnnnnnnnnnnnnnnnnnnnnnnnnnnnnnnnnnnnnnnnnnnnnnnnnnnnnnnnnnnnnnnnnnnnnnnnnnnnnnnnnnnnnnnnnnnnnnnnnnnnnnnnnnnnnnnnnnnnnnnnnnnnnnnnnnnnnnnnnnnnnnnnnnnnnnnnnnnnnnnnnnnnnnnnnnnnnnnnnnnnnnnnnnnnnnnnnnnnnnnnnnnnnnnnnnnnnnnnnnnnnnnnnnnnnnnnnnnnnnnnnnnnnnnnnnnnnnnnnnnnnnnnnnnnnnnnnnnnnnnnnnnnnnnnnnnnnnnnnnnnnnnnnnnnnnnnnnnnnnnnnnnnnnnnnnnnnnnnnnnnnnnnnnnnnnnnnnnnnnnnnnnnnnnnnnnnnnnnnnnnnnnnnnnnnnnnnnnnnnnnnnnnnnnnnnnnnnnnnnnnnnnnnnnnnnnnnnnnnnnnnnnnnnnnnnnnnnnnnnnnnnnnnnnnnnnnnnnnnnnnnnnnnnnnnnnnnnnnnnnnnnnnnnnnnnnnnnnnnnnnnnnnnnnnnnnnnnnnnnnnnnnnnnnnnnnnnnnnnnnnnnnnnnnnnnnnnnnnnnnnnnnnnnnnnnnnnnnnnnnnnnnnnnnnnnnnnnnnnnnnnnnnnnnnnnnnnnnnnnnnnnnnnnnnnnnnnnnnnnnnnnnnnnnnnnnnnnnnnnnnnnnnnnnnnnnnnnnnnnnnnnnnnnnnnnnnnnnnnnnnnnnnnnnnnnnnnnnnnnnnnnnnnnnnnnnnnnnnnnnnnnnnnnnnnnnnnnnnnnnnnnnnnnnnnnnnnnnnnnnnnnnnnnnnnnnnnnnnnnnnnnnnnnnnnnnnnnnnnnnnnnnnnnnnnnnnnnnnnnnnnnnnnnnnnnnnnnnnnnnnnnnnnnnnnnnnnnnnnnnnnnnnnnnnnnnnnnnnnnnnnnnnnnnnnnnnnnnnnnnnnnnnnnnnnnnnnnnnnnnnnnnnnnnnnnnnnnnnnnnnnnnnnnnnnnnnnnnnnnnnnnnnnnnnnnnnnnnnnnnnnnnnnnnnnnnnnnnnnnnnnnnnnnnnnnnnnnnnnnnnnnnnnnnnnnnnnnnnnnnnnnnnnnnnnnnnnnnnnnnnnnnnnnnnnnnnnnnnnnnnnnnnnnnnnnnnnnnnnnnnnnnnnnnnnnnnnnnnnnnnnnnnnnnnnnnnnnnnnnnnnnnnnnnnnnnnnnnnnnnnnnnnnnnnnnnnnnnnnnnnnnnnnnnnnnnnnnnnnnnnnnnnnnnnnnnnnnnnnnnnnnnnnnnnnnnnnnnnnnnnnnnnnnnnnnnnnnnnnnnnnnnnnnnnnnnnnnnnnnnnnnnnnnnnnnnnnnnnnnnnnnnnnnnnnnnnnnnnnnnnnnnnnnnnnnnnnnnnnnnnnnnnnnnnnnnnnnnnnnnnnnnnnnnnnnnnnnnnnnnnnnnnnnnnnnnnnnnnnnnnnnnnnnnnnnnnnnnnnnnnnnnnnnnnnnnnnnnnnnnnnnnnnnnnnnnnnnnnnnnnnnnnnnnnnnnnnnnnnnnnnnnnnnnnnnnnnnnnnnnnnnnnnnnnnnnnnnnnnnnnnnnnnnnnnnnnnnnnnnnnnnnnnnnnnnnnnnnnnnnnnnnnnnnnnnnnnnnnnnnnnnnnnnnnnnnnnnnnnnnnnnnnnnnnnnnnnnnnnnnnnnnnnnnnnnnnnnnnnnnnnnnnnnnnnnnnnnnnnnnnnnnnnnnnnnnnnnnnnnnnnnnnnnnnnnnnnnnnnnnnnnnnnnnnnnnnnnnnnnnnnnnnnnnnnnnnnnnnnnnnnnnnnnnnnnnnnnnnnnnnnnnnnnnnnnnnnnnnnnnnnnnnnnnnnnnnnnnnnnnnnnnnnnnnnnnnnnnnnnnnnnnnnnnnnnnnnnnnnnnnnnnnnnnnnnnnnnnnnnnnnnnnnnnnnnnnnnnnnnnnnnnnnnnnnnnnnnnnnnnnnnnnnnnnnnnnnnnnnnnnnnnnnnnnnnnnnnnnnnnnnnnnnnnnnnnnnnnnnnnnnnnnnnnnnnnnnnnnnnnnnnnnnnnnnnnnnnnnnnnnnnnnnnnnnnnnnnnnnnnnnnnnnnnnnnnnnnnnnnnnnnnnnnnnnnnnnnnnnnnnnnnnnnnnnnnnnnnnnnnnnnnnnnnnnnnnnnnnnnnnnnnnnnnnnnnnnnnnnnnnnnnnnnnnnnnnnnnnnnnnnnnnnnnnnnnnnnnnnnnnnnnnnnnnnnnnnnnnnnnnnnnnnnnnnnnnnnnnnnnnnnnnnnnnnnnnnnnnnnnnnnnnnnnnnnnnnnnnnnnnnnnnnnnnnnnnnnnnnnnnnnnnnnnnnnnnnnnnnnnnnnnnnnnnnnnnnnnnnnnnnnnnnnnnnnnnnnnnnnnnnnnnnnnnnnnnnnnnnnnnnnnnnnnnnnnnnnnnnnnnnnnnnnnnnnnnnnnnnnnnnnnnnnnnnnnnnnnnnnnnnnnnnnnnnnnnnnnnnnnnnnnnnnnnnnnnnnnnnnnnnnnnnnnnnnnnnnnnnnnnnnnnnnnnnnnnnnnnnnnnnnnnnnnnnnnnnnnnnnnnnnnnnnnnnnnnnnnnnnnnnnnnnnnnnnnnnnnnnnnnnnnnnnnnnnnnnnnnnnnnnnnnnnnnnnnnnnnnnnnnnnnnnnnnnnnnnnnnnnnnnnnnnnnnnnnnnnnnnnnnnnnnnnnnnnnnnnnnnnnnnnnnnnnnnnnnnnnnnnnnnnnnnnnnnnnnnnnnnnnnnnnnnnnnnnnnnnnnnnnnnnnnnnnnnnnnnnnnnnnnnnnnnnnnnnnnnnnnnnnnnnnnnnnnnnnnnnnnnnnnnnnnnnnnnnnnnnnnnnnnnnnnnnnnnnnnnnnnnnnnnnnnnnnnnnnnnnnnnnnnnnnnnnnnnnnnnnnnnnnnnnnnnnnnnnnnnnnnnnnnnnnnnnnnnnnnnnnnnnnnnnnnnnnnnnnnnnnnnnnnnnnnnnnnnnnnnnnnnnnnnnnnnnnnnnnnnnnnnnnnnnnnnnnnnnnnnnnnnnnnnnnnnnnnnnnnnnnnnnnnnnnnnnnnnnnnnnnnnnnnnnnnnnnnnnnnnnnnnnnnnnnnnnnnnnnnnnnnnnnnnnnnnnnnnnnnnnnnnnnnnnnnnnnnnnnnnnnnnnnnnnnnnnnnnnnnnnnnnnnnnnnnnnnnnnnnnnnnnnnnnnnnnnnnnnnnnnnnnnnnnnnnnnnnnnnnnnnnnnnnnnnnnnnnnnnnnnnnnnnnnnnnnnnnnnnnnnnnnnnnnnnnnnnnnnnnnnnnnnnnnnnnnnnnnnnnnnnnnnnnnnnnnnnnnnnnnnnnnnnnnnnnnnnnnnnnnnnnnnnnnnnnnnnnnnnnnnnnnnnnnnnnnnnnnnnnnnnnnnnnnnnnnnnnnnnnnnnnnnnnnnnnnnnnnnnnnnnnnnnnnnnnnnnnnnnnnnnnnnnnnnnnnnnnnnnnnnnnnnnnnnnnnnnnnnnnnnnnnnnnnnnnnnnnnnnnnnnnnnnnnnnnnnnnnnnnnnnnnnnnnnnnnnnnnnnnnnnnnnnnnnnnnnnnnnnnnnnnnnnnnnnnnnnnnnnnnnnnnnnnnnnnnnnnnnnnnnnnnnnnnnnnnnnnnnnnnnnnnnnnnnnnnnnnnnnnnnnnnnnnnnnnnnnnnnnnnnnnnnnnnnnnnnnnnnnnnnnnnnnnnnnnnnnnnnnnnnnnnnnnnnnnnnnnnnnnnnnnnnnnnnnnnnnnnnnnnnnnnnnnnnnnnnnnnnnnnnnnnnnnnnnnnnnnnnnnnnnnnnnnnnnnnnnnnnnnnnnnnnnnnnnnnnnnnnnnnnnnnnnnnnnnnnnnnnnnnnnnnnnnnnnnnnnnnnnnnnnnnnnnnnnnnnnnnnnnnnnnnnnnnnnnnnnnnnnnnnnnnnnnnnnnnnnnnnnnnnnnnnnnnnnnnnnnnnnnnnnnnnnnnnnnnnnnnnnnnnnnnnnnnnnnnnnnnnnnnnnnnnnnnnnnnnnnnnnnnnnnnnnnnnnnnnnnnnnnnnnnnnnnnnnnnnnnnnnnnnnnnnnnnnnnnnnnnnnnnnnnnnnnnnnnnnnnnnnnnnnnnnnnnnnnnnnnnnnnnnnnnnnnnnnnnnnnnnnnnnnnnnnnnnnnnnnnnnnnnnnnnnnnnnnnnnnnnnnnnnnnnnnnnnnnnnnnnnnnnnnnnnnnnnnnnnnnnnnnnnnnnnnnnnnnnnnnnnnnnnnnnnnnnnnnnnnnnnnnnnnnnnnnnnnnnnnnnnnnnnnnnnnnnnnnnnnnnnnnnnnnnnnnnnnnnnnnnnnnnnnnnnnnnnnnnnnnnnnnnnnnnnnnnnnnnnnnnnnnnnnnnnnnnnnnnnnnnnnnnnnnnnnnnnnnnnnnnnnnnnnnnnnnnnnnnnnnnnnnnnnnnnnnnnnnnnnnnnnnnnnnnnnnnnnnnnnnnnnnnnnnnnnnnnnnnnnnnnnnnnnnnnnnnnnnnnnnnnnnnnnnnnnnnnnnnnnnnnnnnnnnnnnnnnnnnnnnnnnnnnnnnnnnnnnnnnnnnnnnnnnnnnnnnnnnnnnnnnnnnnnnnnnnnnnnnnnnnnnnnnnnnnnnnnnnnnnnnnnnnnnnnnnnnnnnnnnnnnnnnnnnnnnnnnnnnnnnnnnnnnnnnnnnnnnnnnnnnnnnnnnnnnnnnnnnnnnnnnnnnnnnnnnnnnnnnnnnnnnnnnnnnnnnnnnnnnnnnnnnnnnnnnnnnnnnnnnnnnnnnnnnnnnnnnnnnnnnnnnnnnnnnnnnnnnnnnnnnnnnnnnnnnnnnnnnnnnnnnnnnnnnnnnnnnnnnnnnnnnnnnnnnnnnnnnnnnnnnnnnnnnnnnnnnnnnnnnnnnnnnnnnnnnnnnnnnnnnnnnnnnnnnnnnnnnnnnnnnnnnnnnnnnnnnnnnnnnnnnnnnnnnnnnnnnnnnnnnnnnnnnnnnnnnnnnnnnnnnnnnnnnnnnnnnnnnnnnnnnnnnnnnnnnnnnnnnnnnnnnnnnnnnnnnnnnnnnnnnnnnnnnnnnnnnnnnnnnnnnnnnnnnnnnnnnnnnnnnnnnnnnnnnnnnnnnnnnnnnnnnnnnnnnnnnnnnnnnnnnnnnnnnnnnnnnnnnnnnnnnnnnnnnnnnnnnnnnnnnnnnnnnnnnnnnnnnnnnnnnnnnnnnnnnnnnnnnnnnnnnnnnnnnnnnnnnnnnnnnnnnnnnnnnnnnnnnnnnnnnnnnnnnnnnnnnnnnnnnnnnnnnnnnnnnnnnnnnnnnnnnnnnnnnnnnnnnnnnnnnnnnnnnnnnnnnnnnnnnnnnnnnnnnnnnnnnnnnnnnnnnnnnnnnnnnnnnnnnnnnnnnnnnnnnnnnnnnnnnnnnnnnnnnnnnnnnnnnnnnnnnnnnnnnnnnnnnnnnnnnnnnnnnnnnnnnnnnnnnnnnnnnnnnnnnnnnnnnnnnnnnnnnnnnnnnnnnnnnnnnnnnnnnnnnnnnnnnnnnnnnnnnnnnnnnnnnnnnnnnnnnnnnnnnnnnnnnnnnnnnnnnnnnnnnnnnnnnnnnnnnnnnnnnnnnnnnnnnnnnnnnnnnnnnnnnnnnnnnnnnnnnnnnnnnnnnnnnnnnnnnnnnnnnnnnnnnnnnnnnnnnnnnnnnnnnnnnnnnnnnnnnnnnnnnnnnnnnnnnnnnnnnnnnnnnnnnnnnnnnnnnnnnnnnnnnnnnnnnnnnnnnnnnnnnnnnnnnnnnnnnnnnnnnnnnnnnnnnnnnnnnnnnnnnnnnnnnnnnnnnnnnnnnnnnnnnnnnnnnnnnnnnnnnnnnnnnnnnnnnnnnnnnnnnnnnnnnnnnnnnnnnnnnnnnnnnnnnnnnnnnnnnnnnnnnnnnnnnnnnnnnnnnnnnnnnnnnnnnnnnnnnnnnnnnnnnnnnnnnnnnnnnnnnnnnnnnnnnnnnnnnnnnnnnnnnnnnnnnnnnnnnnnnnnnnnnnnnnnnnnnnnnnnnnnnnnnnnnnnnnnnnnnnnnnnnnnnnnnnnnnnnnnnnnnnnnnnnnnnnnnnnnnnnnnnnnnnnnnnnnnnnnnnnnnnnnnnnnnnnnnnnnnnnnnnnnnnnnnnnnnnnnnnnnnnnnnnnnnnnnnnnnnnnnnnnnnnnnnnnnnnnnnnnnnnnnnnnnnnnnnnnnnnnnnnnnnnnnnnnnnnnnnnnnnnnnnnnnnnnnnnnnnnnnnnnnnnnnnnnnnnnnnnnnnnnnnnnnnnnnnnnnnnnnnnnnnnnnnnnnnnnnnnnnnnnnnnnnnnnnnnnnnnnnnnnnnnnnnnnnnnnnnnnnnnnnnnnnnnnnnnnnnnnnnnnnnnnnnnnnnnnnnnnnnnnnnnnnnnnnnnnnnnnnnnnnnnnnnnnnnnnnnnnnnnnnnnnnnnnnnnnnnnnnnnnnnnnnnnnnnnnnnnnnnnnnnnnnnnnnnnnnnnnnnnnnnnnnnnnnnnnnnnnnnnnnnnnnnnnnnnnnnnnnnnnnnnnnnnnnnnnnnnnnnnnnnnnnnnnnnnnnnnnnnnnnnnnnnnnnnnnnnnnnnnnnnnnnnnnnnnnnnnnnnnnnnnnnnnnnnnnnnnnnnnnnnnnnnnnnnnnnnnnnnnnnnnnnnnnnnnnnnnnnnnnnnnnnnnnnnnnnnnnnnnnnnnnnnnnnnnnnnnnnnnnnnnnnnnnnnnnnnnnnnnnnnnnnnnnnnnnnnnnnnnnnnnnnnnnnnnnnnnnnnnnnnnnnnnnnnnnnnnnnnnnnnnnnnnnnnnnnnnnnnnnnnnnnnnnnnnnnnnnnnnnnnnnnnnnnnnnnnnnnnnnnnnnnnnnnnnnnnnnnnnnnnnnnnnnnnnnnnnnnnnnnnnnnnnnnnnnnnnnnnnnnnnnnnnnnnnnnnnnnnnnnnnnnnnnnnnnnnnnnnnnnnnnnnnnnnnnnnnnnnnnnnnnnnnnnnnnnnnnnnnnnnnnnnnnnnnnnnnnnnnnnnnnnnnnnnnnnnnnnnnnnnnnnnnnnnnnnnnnnnnnnnnnnnnnnnnnnnnnnnnnnnnnnnnnnnnnnnnnnnnnnnnnnnnnnnnnnnnnnnnnnnnnnnnnnnnnnnnnnnnnnnnnnnnnnnnnnnnnnnnnnnnnnnnnnnnnnnnnnnnnnnnnnnnnnnnnnnnnnnnnnnnnnnnnnnnnnnnnnnnnnnnnnnnnnnnnnnnnnnnnnnnnnnnnnnnnnnnnnnnnnnnnnnnnnnnnnnnnnnnnnnnnnnnnnnnnnnnnnnnnnnnnnnnnnnnnnnnnnnnnnnnnnnnnnnnnnnnnnnnnnnnnnnnnnnnnnnnnnnnnnnnnnnnnnnnnnnnnnnnnnnnnnnnnnnnnnnnnnnnnnnnnnnnnnnnnnnnnnnnnnnnnnnnnnnnnnnnnnnnnnnnnnnnnnnnnnnnnnnnnnnnnnnnnnnnnnnnnnnnnnnnnnnnnnnnnnnnnnnnnnnnnnnnnnnnnnnnnnnnnnnnnnnnnnnnnnnnnnnnnnnnnnnnnnnnnnnnnnnnnnnnnnnnnnnnnnnnnnnnnnnnnnnnnnnnnnnnnnnnnnnnnnnnnnnnnnnnnnnnnnnnnnnnnnnnnnnnnnnnnnnnnnnnnnnnnnnnnnnnnnnnnnnnnnnnnnnnnnnnnnnnnnnnnnnnnnnnnnnnnnnnnnnnnnnnnnnnnnnnnnnnnnnnnnnnnnnnnnnnnnnnnnnnnnnnnnnnnnnnnnnnnnnnnnnnnnnnnnnnnnnnnnnnnnnnnnnnnnnnnnnnnnnnnnnnnnnnnnnnnnnnnnnnnnnnnnnnnnnnnnnnnnnnnnnnnnnnnnnnnnnnnnnnnnnnnnnnnnnnnnnnnnnnnnnnnnnnnnnnnnnnnnnnnnnnnnnnnnnnnnnnnnnnnnnnnnnnnnnnnnnnnnnnnnnnnnnnnnnnnnnnnnnnnnnnnnnnnnnnnnnnnnnnnnnnnnnnnnnnnnnnnnnnnnnnnnnnnnnnnnnnnnnnnnnnnnnnnnnnnnnnnnnnnnnnnnnnnnnnnnnnnnnnnnnnnnnnnnnnnnnnnnnnnnnnnnnnnnnnnnnnnnnnnnnnnnnnnnnnnnnnnnnnnnnnnnnnnnnnnnnnnnnnnnnnnnnnnnnnnnnnnnnnnnnnnnnnnnnnnnnnnnnnnnnnnnnnnnnnnnnnnnnnnnnnnnnnnnnnnnnnnnnnnnnnnnnnnnnnnnnnnnnnnnnnnnnnnnnnnnnnnnnnnnnnnnnnnnnnnnnnnnnnnnnnnnnnnnnnnnnnnnnnnnnnnnnnnnnnnnnnnnnnnnnnnnnnnnnnnnnnnnnnnnnnnnnnnnnnnnnnnnnnnnnnnnnnnnnnnnnnnnnnnnnnnnnnnnnnnnnnnnnnnnnnnnnnnnnnnnnnnnnnnnnnnnnnnnnnnnnnnnnnnnnnnnnnnnnnnnnnnnnnnnnnnnnnnnnnnnnnnnnnnnnnnnnnnnnnnnnnnnnnnnnnnnnnnnnnnnnnnnnnnnnnnnnnnnnnnnnnnnnnnnnnnnnnnnnnnnnnnnnnnnnnnnnnnnnnnnnnnnnnnnnnnnnnnnnnnnnnnnnnnnnnnnnnnnnnnnnnnnnnnnnnnnnnnnnnnnnnnnnnnnnnnnnnnnnnnnnnnnnnnnnnnnnnnnnnnnnnnnnnnnnnnnnnnnnnnnnnnnnnnnnnnnnnnnnnnnnnnnnnnnnnnnnnnnnnnnnnnnnnnnnnnnnnnnnnnnnnnnnnnnnnnnnnnnnnnnnnnnnnnnnnnnnnnnnnnnnnnnnnnnnnnnnnnnnnnnnnnnnnnnnnnnnnnnnnnnnnnnnnnnnnnnnnnnnnnnnnnnnnnnnnnnnnnnnnnnnnnnnnnnnnnnnnnnnnnnnnnnnnnnnnnnnnnnnnnnnnnnnnnnnnnnnnnnnnnnnnnnnnnnnnnnnnnnnnnnnnnnnnnnnnnnnnnnnnnnnnnnnnnnnnnnnnnnnnnnnnnnnnnnnnnnnnnnnnnnnnnnnnnnnnnnnnnnnnnnnnnnnnnnnnnnnnnnnnnnnnnnnnnnnnnnnnnnnnnnnnnnnnnnnnnnnnnnnnnnnnnnnnnnnnnnnnnnnnnnnnnnnnnnnnnnnnnnnnnnnnnnnnnnnnnnnnnnnnnnnnnnnnnnnnnnnnnnnnnnnnnnnnnnnnnnnnnnnnnnnnnnnnnnnnnnnnnnnnnnnnnnnnnnnnnnnnnnnnnnnnnnnnnnnnnnnnnnnnnnnnnnnnnnnnnnnnnnnnnnnnnnnnnnnnnnnnnnnnnnnnnnnnnnnnnnnnnnnnnnnnnnnnnnnnnnnnnnnnnnnnnnnnnnnnnnnnnnnnnnnnnnnnnnnnnnnnnnnnnnnnnnnnnnnnnnnnnnnnnnnnnnnnnnnnnnnnnnnnnnnnnnnnnnnnnnnnnnnnnnnnnnnnnnnnnnnnnnnnnnnnnnnnnnnnnnnnnnnnnnnnnnnnnnnnnnnnnnnnnnnnnnnnnnnnnnnnnnnnnnnnnnnnnnnnnnnnnnnnnnnnnnnnnnnnnnnnnnnnnnnnnnnnnnnnnnnnnnnnnnnnnnnnnnnnnnnnnnnnnnnnnnnnnnnnnnnnnnnnnnnnnnnnnnnnnnnnnnnnnnnnnnnnnnnnnnnnnnnnnnnnnnnnnnnnnnnnnnnnnnnnnnnnnnnnnnnnnnnnnnnnnnnnnnnnnnnnnnnnnnnnnnnnnnnnnnnnnnnnnnnnnnnnnnnnnnnnnnnnnnnnnnnnnnnnnnnnnnnnnnnnnnnnnnnnnnnnnnnnnnnnnnnnnnnnnnnnnnnnnnnnnnnnnnnnnnnnnnnnnnnnnnnnnnnnnnnnnnnnnnnnnnnnnnnnnnnnnnnnnnnnnnnnnnnnnnnnnnnnnnnnnnnnnnnnnnnnnnnnnnnnnnnnnnnnnnnnnnnnnnnnnnnnnnnnnnnnnnnnnnnnnnnnnnnnnnnnnnnnnnnnnnnnnnnnnnnnnnnnnnnnnnnnnnnnnnnnnnnnnnnnnnnnnnnnnnnnnnnnnnnnnnnnnnnnnnnnnnnnnnnnnnnnnnnnnnnnnnnnnnnnnnnnnnnnnnnnnnnnnnnnnnnnnnnnnnnnnnnnnnnnnnnnnnnnnnnnnnnnnnnnnnnnnnnnnnnnnnnnnnnnnnnnnnnnnnnnnnnnnnnnnnnnnnnnnnnnnnnnnnnnnnnnnnnnnnnnnnnnnnnnnnnnnnnnnnnnnnnnnnnnnnnnnnnnnnnnnnnnnnnnnnnnnnnnnnnnnnnnnnnnnnnnnnnnnnnnnnnnnnnnnnnnnnnnnnnnnnnnnnnnnnnnnnnnnnnnnnnnnnnnnnnnnnnnnnnnnnnnnnnnnnnnnnnnnnnnnnnnnnnnnnnnnnnnnnnnnnnnnnnnnnnnnnnnnnnnnnnnnnnnnnnnnnnnnnnnnnnnnnnnnnnnnnnnnnnnnnnnnnnnnnnnnnnnnnnnnnnnnnnnnnnnnnnnnnnnnnnnnnnnnnnnnnnnnnnnnnnnnnnnnnnnnnnnnnnnnnnnnnnnnnnnnnnnnnnnnnnnnnnnnnnnnnnnnnnnnnnnnnnnnnnnnnnnnnnnnnnnnnnnnnnnnnnnnnnnnnnnnnnnnnnnnnnnnnnnnnnnnnnnnnnnnnnnnnnnnnnnnnnnnnnnnnnnnnnnnnnnnnnnnnnnnnnnnnnnnnnnnnnnnnnnnnnnnnnnnnnnnnnnnnnnnnnnnnnnnnnnnnnnnnnnnnnnnnnnnnnnnnnnnnnnnnnnnnnnnnnnnnnnnnnnnnnnnnnnnnnnnnnnnnnnnnnnnnnnnnnnnnnnnnnnnnnnnnnnnnnnnnnnnnnnnnnnnnnnnnnnnnnnnnnnnnnnnnnnnnnnnnnnnnnnnnnnnnnnnnnnnnnnnnnnnnnnnnnnnnnnnnnnnnnnnnnnnnnnnnnnnnnnnnnnnnnnnnnnnnnnnnnnnnnnnnnnnnnnnnnnnnnnnnnnnnnnnnnnnnnnnnnnnnnnnnnnnnnnnnnnnnnnnnnnnnnnnnnnnnnnnnnnnnnnnnnnnnnnnnnnnnnnnnnnnnnnnnnnnnnnnnnnnnnnnnnnnnnnnnnnnnnnnnnnnnnnnnnnnnnnnnnnnnnnnnnnnnnnnnnnnnnnnnnnnnnnnnnnnnnnnnnnnnnnnnnnnnnnnnnnnnnnnnnnnnnnnnnnnnnnnnnnnnnnnnnnnnnnnnnnnnnnnnnnnnnnnnnnnnnnnnnnnnnnnnnnnnnnnnnnnnnnnnnnnnnnnnnnnnnnnnnnnnnnnnnnnnnnnnnnnnnnnnnnnnnnnnnnnnnnnnnnnnnnnnnnnnnnnnnnnnnnnnnnnnnnnnnnnnnnnnnnnnnnnnnnnnnnnnnnnnnnnnnnnnnnnnnnnnnnnnnnnnnnnnnnnnnnnnnnnnnnnnnnnnnnnnnnnnnnnnnnnnnnnnnnnnnnnnnnnnnnnnnnnnnnnnnnnnnnnnnnnnnnnnnnnnnnnnnnnnnnnnnnnnnnnnnnnnnnnnnnnnnnnnnnnnnnnnnnnnnnnnnnnnnnnnnnnnnnnnnnnnnnnnnnnnnnnnnnnnnnnnnnnnnnnnnnnnnnnnnnnnnnnnnnnnnnnnnnnnnnnnnnnnnnnnnnnnnnnnnnnnnnnnnnnnnnnnnnnnnnnnnnnnnnnnnnnnnnnnnnnnnnnnnnnnnnnnnnnnnnnnnnnnnnnnnnnnnnnnnnnnnnnnnnnnnnnnnnnnnnnnnnnnnnnnnnnnnnnnnnnnnnnnnnnnnnnnnnnnnnnnnnnnnnnnnnnnnnnnnnnnnnnnnnnnnnnnnnnnnnnnnnnnnnnnnnnnnnnnnnnnnnnnnnnnnnnnnnnnnnnnnnnnnnnnnnnnnnnnnnnnnnnnnnnnnnnnnnnnnnnnnnnnnnnnnnnnnnnnnnnnnnnnnnnnnnnnnnnnnnnnnnnnnnnnnnnnnnnnnnnnnnnnnnnnnnnnnnnnnnnnnnnnnnnnnnnnnnnnnnnnnnnnnnnnnnnnnnnnnnnnnnnnnnnnnnnnnnnnnnnnnnnnnnnnnnnnnnnnnnnnnnnnnnnnnnnnnnnnnnnnnnnnnnnnnnnnnnnnnnnnnnnnnnnnnnnnnnnnnnnnnnnnnnnnnnnnnnnnnnnnnnnnnnnnnnnnnnnnnnnnnnnnnnnnnnnnnnnnnnnnnnnnnnnnnnnnnnnnnnnnnnnnnnnnnnnnnnnnnnnnnnnnnnnnnnnnnnnnnnnnnnnnnnnnnnnnnnnnnnnnnnnnnnnnnnnnnnnnnnnnnnnnnnnnnnnnnnnnnnnnnnnnnnnnnnnnnnnnnnnnnnnnnnnnnnnnnnnnnnnnnnnnnnnnnnnnnnnnnnnnnnnnnnnnnnnnnnnnnnnnnnnnnnnnnnnnnnnnnnnnnnnnnnnnnnnnnnnnnnnnnnnnnnnnnnnnnnnnnnnnnnnnnnnnnnnnnnnnnnnnnnnnnnnnnnnnnnnnnnnnnnnnnnnnnnnnnnnnnnnnnnnnnnnnnnnnnnnnnnnnnnnnnnnnnnnnnnnnnnnnnnnnnnnnnnnnnnnnnnnnnnnnnnnnnnnnnnnnnnnnnnnnnnnnnnnnnnnnnnnnnnnnnnnnnnnnnnnnnnnnnnnnnnnnnnnnnnnnnnnnnnnnnnnnnnnnnnnnnnnnnnnnnnnnnnnnnnnnnnnnnnnnnnnnnnnnnnnnnnnnnnnnnnnnnnnnnnnnnnnnnnnnnnnnnnnnnnnnnnnnnnnnnnnnnnnnnnnnnnnnnnnnnnnnnnnnnnnnnnnnnnnnnnnnnnnnnnnnnnnnnnnnnnnnnnnnnnnnnnnnnnnnnnnnnnnnnnnnnnnnnnnnnnnnnnnnnnnnnnnnnnnnnnnnnnnnnnnnnnnnnnnnnnnnnnnnnnnnnnnnnnnnnnnnnnnnnnnnnnnnnnnnnnnnnnnnnnnnnnnnnnnnnnnnnnnnnnnnnnnnnnnnnnnnnnnnnnnnnnnnnnnnnnnnnnnnnnnnnnnnnnnnnnnnnnnnnnnnnnnnnnnnnnnnnnnnnnnnnnnnnnnnnnnnnnnnnnnnnnnnnnnnnnnnnnnnnnnnnnnnnnnnnnnnnnnnnnnnnnnnnnnnnnnnnnnnnnnnnnnnnnnnnnnnnnnnnnnnnnnnnnnnnnnnnnnnnnnnnnnnnnnnnnnnnnnnnnnnnnnnnnnnnnnnnnnnnnnnnnnnnnnnnnnnnnnnnnnnnnnnnnnnnnnnnnnnnnnnnnnnnnnnnnnnnnnnnnnnnnnnnnnnnnnnnnnnnnnnnnnnnnnnnnnnnnnnnnnnnnnnnnnnnnnnnnnnnnnnnnnnnnnnnnnnnnnnnnnnnnnnnnnnnnnnnnnnnnnnnnnnnnnnnnnnnnnnnnnnnnnnnnnnnnnnnnnnnnnnnnnnnnnnnnnnnnnnnnnnnnnnnnnnnnnnnnnnnnnnnnnnnnnnnnnnnnnnnnnnnnnnnnnnnnnnnnnnnnnnnnnnnnnnnnnnnnnnnnnnnnnnnnnnnnnnnnnnnnnnnnnnnnnnnnnnnnnnnnnnnnnnnnnnnnnnnnnnnnnnnnnnnnnnnnnnnnnnnnnnnnnnnnnnnnnnnnnnnnnnnnnnnnnnnnnnnnnnnnnnnnnnnnnnnnnnnnnnnnnnnnnnnnnnnnnnnnnnnnnnnnnnnnnnnnnnnnnnnnnnnnnnnnnnnnnnnnnnnnnnnnnnnnnnnnnnnnnnnnnnnnnnnnnnnnnnnnnnnnnnnnnnnnnnnnnnnnnnnnnnnnnnnnnnnnnnnnnnnnnnnnnnnnnnnnnnnnnnnnnnnnnnnnnnnnnnnnnnnnnnnnnnnnnnnnnnnnnnnnnnnnnnnnnnnnnnnnnnnnnnnnnnnnnnnnnnnnnnnnnnnnnnnnnnnnnnnnnnnnnnnnnnnnnnnnnnnnnnnnnnnnnnnnnnnnnnnnnnnnnnnnnnnnnnnnnnnnnnnnnnnnnnnnnnnnnnnnnnnnnnnnnnnnnnnnnnnnnnnnnnnnnnnnnnnnnnnnnnnnnnnnnnnnnnnnnnnnnnnnnnnnnnnnnnnnnnnnnnnnnnnnnnnnnnnnnnnnnnnnnnnnnnnnnnnnnnnnnnnnnnnnnnnnnnnnnnnnnnnnnnnnnnnnnnnnnnnnnnnnnnnnnnnnnnnnnnnnnnnnnnnnnnnnnnnnnnnnnnnnnnnnnnnnnnnnnnnnnnnnnnnnnnnnnnnnnnnnnnnnnnnnnnnnnnnnnnnnnnnnnnnnnnnnnnnnnnnnnnnnnnnnnnnnnnnnnnnnnnnnnnnnnnnnnnnnnnnnnnnnnnnnnnnnnnnnnnnnnnnnnnnnnnnnnnnnnnnnnnnnnnnnnnnnnnnnnnnnnnnnnnnnnnnnnnnnnnnnnnnnnnnnnnnnnnnnnnnnnnnnnnnnnnnnnnnnnnnnnnnnnnnnnnnnnnnnnnnnnnnnnnnnnnnnnnnnnnnnnnnnnnnnnnnnnnnnnnnnnnnnnnnnnnnnnnnnnnnnnnnnnnnnnnnnnnnnnnnnnnnnnnnnnnnnnnnnnnnnnnnnnnnnnnnnnnnnnnnnnnnnnnnnnnnnnnnnnnnnnnnnnnnnnnnnnnnnnnnnnnnnnnnnnnnnnnnnnnnnnnnnnnnnnnnnnnnnnnnnnnnnnnnnnnnnnnnnnnnnnnnnnnnnnnnnnnnnnnnnnnnnnnnnnnnnnnnnnnnnnnnnnnnnnnnnnnnnnnnnnnnnnnnnnnnnnnnnnnnnnnnnnnnnnnnnnnnnnnnnnnnnnnnnnnnnnnnnnnnnnnnnnnnnnnnnnnnnnnnnnnnnnnnnnnnnnnnnnnnnnnnnnnnnnnnnnnnnnnnnnnnnnnnnnnnnnnnnnnnnnnnnnnnnnnnnnnnnnnnnnnnnnnnnnnnnnnnnnnnnnnnnnnnnnnnnnnnnnnnnnnnnnnnnnnnnnnnnnnnnnnnnnnnnnnnnnnnnnnnnnnnnnnnnnnnnnnnnnnnnnnnnnnnnnnnnnnnnnnnnnnnnnnnnnnnnnnnnnnnnnnnnnnnnnnnnnnnnnnnnnnnnnnnnnnnnnnnnnnnnnnnnnnnnnnnnnnnnnnnnnnnnnnnnnnnnnnnnnnnnnnnnnnnnnnnnnnnnnnnnnnnnnnnnnnnnnnnnnnnnnnnnnnnnnnnnnnnnnnnnnnnnnnnnnnnnnnnnnnnnnnnnnnnnnnnnnnnnnnnnnnnnnnnnnnnnnnnnnnnnnnnnnnnnnnnnnnnnnnnnnnnnnnnnnnnnnnnnnnnnnnnnnnnnnnnnnnnnnnnnnnnnnnnnnnnnnnnnnnnnnnnnnnnnnnnnnnnnnnnnnnnnnnnnnnnnnnnnnnnnnnnnnnnnnnnnnnnnnnnnnnnnnnnnnnnnnnnnnnnnnnnnnnnnnnnnnnnnnnnnnnnnnnnnnnnnnnnnnnnnnnnnnnnnnnnnnnnnnnnnnnnnnnnnnnnnnnnnnnnnnnnnnnnnnnnnnnnnnnnnnnnnnnnnnnnnnnnnnnnnnnnnnnnnnnnnnnnnnnnnnnnnnnnnnnnnnnnnnnnnnnnnnnnnnnnnnnnnnnnnnnnnnnnnnnnnnnnnnnnnnnnnnnnnnnnnnnnnnnnnnnnnnnnnnnnnnnnnnnnnnnnnnnnnnnnnnnnnnnnnnnnnnnnnnnnnnnnnnnnnnnnnnnnnnnnnnnnnnnnnnnnnnnnnnnnnnnnnnnnnnnnnnnnnnnnnnnnnnnnnnnnnnnnnnnnnnnnnnnnnnnnnnnnnnnnnnnnnnnnnnnnnnnnnnnnnnnnnnnnnnnnnnnnnnnnnnnnnnnnnnnnnnnnnnnnnnnnnnnnnnnnnnnnnnnnnnnnnnnnnnnnnnnnnnnnnnnnnnnnnnnnnnnnnnnnnnnnnnnnnnnnnnnnnnnnnnnnnnnnnnnnnnnnnnnnnnnnnnnnnnnnnnnnnnnnnnnnnnnnnnnnnnnnnnnnnnnnnnnnnnnnnnnnnnnnnnnnnnnnnnnnnnnnnnnnnnnnnnnnnnnnnnnnnnnnnnnnnnnnnnnnnnnnnnnnnnnnnnnnnnnnnnnnnnnnnnnnnnnnnnnnnnnnnnnnnnnnnnnnnnnnnnnnnnnnnnnnnnnnnnnnnnnnnnnnnnnnnnnnnnnnnnnnnnnnnnnnnnnnnnnnnnnnnnnnnnnnnnnnnnnnnnnnnnnnnnnnnnnnnnnnnnnnnnnnnnnnnnnnnnnnnnnnnnnnnnnnnnnnnnnnnnnnnnnnnnnnnnnnnnnnnnnnnnnnnnnnnnnnnnnnnnnnnnnnnnnnnnnnnnnnnnnnnnnnnnnnnnnnnnnnnnnnnnnnnnnnnnnnnnnnnnnnnnnnnnnnnnnnnnnnnnnnnnnnnnnnnnnnnnnnnnnnnnnnnnnnnnnnnnnnnnnnnnnnnnnnnnnnnnnnnnnnnnnnnnnnnnnnnnnnnnnnnnnnnnnnnnnnnnnnnnnnnnnnnnnnnnnnnnnnnnnnnnnnnnnnnnnnnnnnnnnnnnnnnnnnnnnnnnnnnnnnnnnnnnnnnnnnnnnnnnnnnnnnnnnnnnnnnnnnnnnnnnnnnnnnnnnnnnnnnnnnnnnnnnnnnnnnnnnnnnnnnnnnnnnnnnnnnnnnnnnnnnnnnnnnnnnnnnnnnnnnnnnnnnnnnnnnnnnnnnnnnnnnnnnnnnnnnnnnnnnnnnnnnnnnnnnnnnnnnnnnnnnnnnnnnnnnnnnnnnnnnnnnnnnnnnnnnnnnnnnnnnnnnnnnnnnnnnnnnnnnnnnnnnnnnnnnnnnnnnnnnnnnnnnnnnnnnnnnnnnnnnnnnnnnnnnnnnnnnnnnnnnnnnnnnnnnnnnnnnnnnnnnnnnnnnnnnnnnnnnnnnnnnnnnnnnnnnnnnnnnnnnnnnnnnnnnnnnnnnnnnnnnnnnnnnnnnnnnnnnnnnnnnnnnnnnnnnnnnnnnnnnnnnnnnnnnnnnnnnnnnnnnnnnnnnnnnnnnnnnnnnnnnnnnnnnnnnnnnnnnnnnnnnnnnnnnnnnnnnnnnnnnnnnnnnnnnnnnnnnnnnnnnnnnnnnnnnnnnnnnnnnnnnnnnnnnnnnnnnnnnnnnnnnnnnnnnnnnnnnnnnnnnnnnnnnnnnnnnnnnnnnnnnnnnnnnnnnnnnnnnnnnnnnnnnnnnnnnnnnnnnnnnnnnnnnnnnnnnnnnnnnnnnnnnnnnnnnnnnnnnnnnnnnnnnnnnnnnnnnnnnnnnnnnnnnnnnnnnnnnnnnnnnnnnnnnnnnnnnnnnnnnnnnnnnnnnnnnnnnnnnnnnnnnnnnnnnnnnnnnnnnnnnnnnnnnnnnnnnnnnnnnnnnnnnnnnnnnnnnnnnnnnnnnnnnnnnnnnnnnnnnnnnnnnnnnnnnnnnnnnnnnnnnnnnnnnnnnnnnnnnnnnnnnnnnnnnnnnnnnnnnnnnnnnnnnnnnnnnnnnnnnnnnnnnnnnnnnnnnnnnnnnnnnnnnnnnnnnnnnnnnnnnnnnnnnnnnnnnnnnnnnnnnnnnnnnnnnnnnnnnnnnnnnnnnnnnnnnnnnnnnnnnnnnnnnnnnnnnnnnnnnnnnnnnnnnnnnnnnnnnnnnnnnnnnnnnnnnnnnnnnnnnnnnnnnnnnnnnnnnnnnnnnnnnnnnnnnnnnnnnnnnnnnnnnnnnnnnnnnnnnnnnnnnnnnnnnnnnnnnnnnnnnnnnnnnnnnnnnnnnnnnnnnnnnnnnnnnnnnnnnnnnnnnnnnnnnnnnnnnnnnnnnnnnnnnnnnnnnnnnnnnnnnnnnnnnnnnnnnnnnnnnnnnnnnnnnnnnnnnnnnnnnnnnnnnnnnnnnnnnnnnnnnnnnnnnnnnnnnnnnnnnnnnnnnnnnnnnnnnnnnnnnnnnnnnnnnnnnnnnnnnnnnnnnnnnnnnnnnnnnnnnnnnnnnnnnnnnnnnnnnnnnnnnnnnnnnnnnnnnnnnnnnnnnnnnnnnnnnnnnnnnnnnnnnnnnnnnnnnnnnnnnnnnnnnnnnnnnnnnnnnnnnnnnnnnnnnnnnnnnnnnnnnnnnnnnnnnnnnnnnnnnnnnnnnnnnnnnnnnnnnnnnnnnnnnnnnnnnnnnnnnnnnnnnnnnnnnnnnnnnnnnnnnnnnnnnnnnnnnnnnnnnnnnnnnnnnnnnnnnnnnnnnnnnnnnnnnnnnnnnnnnnnnnnnnnnnnnnnnnnnnnnnnnnnnnnnnnnnnnnnnnnnnnnnnnnnnnnnnnnnnnnnnnnnnnnnnnnnnnnnnnnnnnnnnnnnnnnnnnnnnnnnnnnnnnnnnnnnnnnnnnnnnnnnnnnnnnnnnnnnnnnnnnnnnnnnnnnnnnnnnnnnnnnnnnnnnnnnnnnnnnnnnnnnnnnnnnnnnnnnnnnnnnnnnnnnnnnnnnnnnnnnnnnnnnnnnnnnnnnnnnnnnnnnnnnnnnnnnnnnnnnnnnnnnnnnnnnnnnnnnnnnnnnnnnnnnnnnnnnnnnnnnnnnnnnnnnnnnnnnnnnnnnnnnnnnnnnnnnnnnnnnnnnnnnnnnnnnnnnnnnnnnnnnnnnnnnnnnnnnnnnnnnnnnnnnnnnnnnnnnnnnnnnnnnnnnnnnnnnnnnnnnnnnnnnnnnnnnnnnnnnnnnnnnnnnnnnnnnnnnnnnnnnnnnnnnnnnnnnnnnnnnnnnnnnnnnnnnnnnnnnnnnnnnnnnnnnnnnnnnnnnnnnnnnnnnnnnnnnnnnnnnnnnnnnnnnnnnnnnnnnnnnnnnnnnnnnnnnnnnnnnnnnnnnnnnnnnnnnnnnnnnnnnnnnnnnnnnnnnnnnnnnnnnnnnnnnnnnnnnnnnnnnnnnnnnnnnnnnnnnnnnnnnnnnnnnnnnnnnnnnnnnnnnnnnnnnnnnnnnnnnnnnnnnnnnnnnnnnnnnnnnnnnnnnnnnnnnnnnnnnnnnnnnnnnnnnnnnnnnnnnnnnnnnnnnnnnnnnnnnnnnnnnnnnnnnnnnnnnnnnnnnnnnnnnnnnnnnnnnnnnnnnnnnnnnnnnnnnnnnnnnnnnnnnnnnnnnnnnnnnnnnnnnnnnnnnnnnnnnnnnnnnnnnnnnnnnnnnnnnnnnnnnnnnnnnnnnnnnnnnnnnnnnnnnnnnnnnnnnnnnnnnnnnnnnnnnnnnnnnnnnnnnnnnnnnnnnnnnnnnnnnnnnnnnnnnnnnnnnnnnnnnnnnnnnnnnnnnnnnnnnnnnnnnnnnnnnnnnnnnnnnnnnnnnnnnnnnnnnnnnnnnnnnnnnnnnnnnnnnnnnnnnnnnnnnnnnnnnnnnnnnnnnnnnnnnnnnnnnnnnnnnnnnnnnnnnnnnnnnnnnnnnnnnnnnnnnnnnnnnnnnnnnnnnnnnnnnnnnnnnnnnnnnnnnnnnnnnnnnnnnnnnnnnnnnnnnnnnnnnnnnnnnnnnnnnnnnnnnnnnnnnnnnnnnnnnnnnnnnnnnnnnnnnnnnnnnnnnnnnnnnnnnnnnnnnnnnnnnnnnnnnnnnnnnnnnnnnnnnnnnnnnnnnnnnnnnnnnnnnnnnnnnnnnnnnnnnnnnnnnnnnnnnnnnnnnnnnnnnnnnnnnnnnnnnnnnnnnnnnnnnnnnnnnnnnnnnnnnnnnnnnnnnnnnnnnnnnnnnnnnnnnnnnnnnnnnnnnnnnnnnnnnnnnnnnnnnnnnnnnnnnnnnnnnnnnnnnnnnnnnnnnnnnnnnnnnnnnnnnnnnnnnnnnnnnnnnnnnnnnnnnnnnnnnnnnnnnnnnnnnnnnnnnnnnnnnnnnnnnnnnnnnnnnnnnnnnnnnnnnnnnnnnnnnnnnnnnnnnnnnnnnnnnnnnnnnnnnnnnnnnnnnnnnnnnnnnnnnnnnnnnnnnnnnnnnnnnnnnnnnnnnnnnnnnnnnnnnnnnnnnnnnnnnnnnnnnnnnnnnnnnnnnnnnnnnnnnnnnnnnnnnnnnnnnnnnnnnnnnnnnnnnnnnnnnnnnnnnnnnnnnnnnnnnnnnnnnnnnnnnnnnnnnnnnnnnnnnnnnnnnnnnnnnnnnnnnnnnnnnnnnnnnnnnnnnnnnnnnnnnnnnnnnnnnnnnnnnnnnnnnnnnnnnnnnnnnnnnnnnnnnnnnnnnnnnnnnnnnnnnnnnnnnnnnnnnnnnnnnnnnnnnnnnnnnnnnnnnnnnnnnnnnnnnnnnnnnnnnnnnnnnnnnnnnnnnnnnnnnnnnnnnnnnnnnnnnnnnnnnnnnnnnnnnnnnnnnnnnnnnnnnnnnnnnnnnnnnnnnnnnnnnnnnnnnnnnnnnnnnnnnnnnnnnnnnnnnnnnnnnnnnnnnnnnnnnnnnnnnnnnnnnnnnnnnnnnnnnnnnnnnnnnnnnnnnnnnnnnnnnnnnnnnnnnnnnnnnnnnnnnnnnnnnnnnnnnnnnnnnnnnnnnnnnnnnnnnnnnnnnnnnnnnnnnnnnnnnnnnnnnnnnnnnnnnnnnnnnnnnnnnnnnnnnnnnnnnnnnnnnnnnnnnnnnnnnnnnnnnnnnnnnnnnnnnnnnnnnnnnnnnnnnnnnnnnnnnnnnnnnnnnnnnnnnnnnnnnnnnnnnnnnnnnnnnnnnnnnnnnnnnnnnnnnnnnnnnnnnnnnnnnnnnnnnnnnnnnnnnnnnnnnnnnnnnnnnnnnnnnnnnnnnnnnnnnnnnnnnnnnnnnnnnnnnnnnnnnnnnnnnnnnnnnnnnnnnnnnnnnnnnnnnnnnnnnnnnnnnnnnnnnnnnnnnnnnnnnnnnnnnnnnnnnnnnnnnnnnnnnnnnnnnnnnnnnnnnnnnnnnnnnnnnnnnnnnnnnnnnnnnnnnnnnnnnnnnnnnnnnnnnnnnnnnnnnnnnnnnnnnnnnnnnnnnnnnnnnnnnnnnnnnnnnnnnnnnnnnnnnnnnnnnnnnnnnnnnnnnnnnnnnnnnnnnnnnnnnnnnnnnnnnnnnnnnnnnnnnnnnnnnnnnnnnnnnnnnnnnnnnnnnnnnnnnnnnnnnnnnnnnnnnnnnnnnnnnnnnnnnnnnnnnnnnnnnnnnnnnnnnnnnnnnnnnnnnnnnnnnnnnnnnnnnnnnnnnnnnnnnnnnnnnnnnnnnnnnnnnnnnnnnnnnnnnnnnnnnnnnnnnnnnnnnnnnnnnnnnnnnnnnnnnnnnnnnnnnnnnnnnnnnnnnnnnnnnnnnnnnnnnnnnnnnnnnnnnnnnnnnnnnnnnnnnnnnnnnnnnnnnnnnnnnnnnnnnnnnnnnnnnnnnnnnnnnnnnnnnnnnnnnnnnnnnnnnnnnnnnnnnnnnnnnnnnnnnnnnnnnnnnnnnnnnnnnnnnnnnnnnnnnnnnnnnnnnnnnnnnnnnnnnnnnnnnnnnnnnnnnnnnnnnnnnnnnnnnnnnnnnnnnnnnnnnnnnnnnnnnnnnnnnnnnnnnnnnnnnnnnnnnnnnnnnnnnnnnnnnnnnnnnnnnnnnnnnnnnnnnnnnnnnnnnnnnnnnnnnnnnnnnnnnnnnnnnnnnnnnnnnnnnnnnnnnnnnnnnnnnnnnnnnnnnnnnnnnnnnnnnnnnnnnnnnnnnnnnnnnnnnnnnnnnnnnnnnnnnnnnnnnnnnnnnnnnnnnnnnnnnnnnnnnnnnnnnnnnnnnnnnnnnnnnnnnnnnnnnnnnnnnnnnnnnnnnnnnnnnnnnnnnnnnnnnnnnnnnnnnnnnnnnnnnnnnnnnnnnnnnnnnnnnnnnnnnnnnnnnnnnnnnnnnnnnnnnnnnnnnnnnnnnnnnnnnnnnnnnnnnnnnnnnnnnnnnnnnnnnnnnnnnnnnnnnnnnnnnnnnnnnnnnnnnnnnnnnnnnnnnnnnnnnnnnnnnnnnnnnnnnnnnnnnnnnnnnnnnnnnnnnnnnnnnnnnnnnnnnnnnnnnnnnnnnnnnnnnnnnnnnnnnnnnnnnnnnnnnnnnnnnnnnnnnnnnnnnnnnnnnnnnnnnnnnnnnnnnnnnnnnnnnnnnnnnnnnnnnnnnnnnnnnnnnnnnnnnnnnnnnnnnnnnnnnnnnnnnnnnnnnnnnnnnnnnnnnnnnnnnnnnnnnnnnnnnnnnnnnnnnnnnnnnnnnnnnnnnnnnnnnnnnnnnnnnnnnnnnnnnnnnnnnnnnnnnnnnnnnnnnnnnnnnnnnnnnnnnnnnnnnnnnnnnnnnnnnnnnnnnnnnnnnnnnnnnnnnnnnnnnnnnnnnnnnnnnnnnnnnnnnnnnnnnnnnnnnnnnnnnnnnnnnnnnnnnnnnnnnnnnnnnnnnnnnnnnnnnnnnnnnnnnnnnnnnnnnnnnnnnnnnnnnnnnnnnnnnnnnnnnnnnnnnnnnnnnnnnnnnnnnnnnnnnnnnnnnnnnnnnnnnnnnnnnnnnnnnnnnnnnnnnnnnnnnnnnnnnnnnnnnnnnnnnnnnnnnnnnnnnnnnnnnnnnnnnnnnnnnnnnnnnnnnnnnnnnnnnnnnnnnnnnnnnnnnnnnnnnnnnnnnnnnnnnnnnnnnnnnnnnnnnnnnnnnnnnnnnnnnnnnnnnnnnnnnnnnnnnnnnnnnnnnnnnnnnnnnnnnnnnnnnnnnnnnnnnnnnnnnnnnnnnnnnnnnnnnnnnnnnnnnnnnnnnnnnnnnnnnnnnnnnnnnnnnnnnnnnnnnnnnnnnnnnnnnnnnnnnnnnnnnnnnnnnnnnnnnnnnnnnnnnnnnnnnnnnnnnnnnnnnnnnnnnnnnnnnnnnnnnnnnnnnnnnnnnnnnnnnnnnnnnnnnnnnnnnnnnnnnnnnnnnnnnnnnnnnnnnnnnnnnnnnnnnnnnnnnnnnnnnnnnnnnnnnnnnnnnnnnnnnnnnnnnnnnnnnnnnnnnnnnnnnnnnnnnnnnnnnnnnnnnnnnnnnnnnnnnnnnnnnnnnnnnnnnnnnnnnnnnnnnnnnnnnnnnnnnnnnnnnnnnnnnnnnnnnnnnnnnnnnnnnnnnnnnnnnnnnnnnnnnnnnnnnnnnnnnnnnnnnnnnnnnnnnnnnnnnnnnnnnnnnnnnnnnnnnnnnnnnnnnnnnnnnnnnnnnnnnnnnnnnnnnnnnnnnnnnnnnnnnnnnnnnnnnnnnnnnnnnnnnnnnnnnnnnnnnnnnnnnnnnnnnnnnnnnnnnnnnnnnnnnnnnnnnnnnnnnnnnnnnnnnnnnnnnnnnnnnnnnnnnnnnnnnnnnnnnnnnnnnnnnnnnnnnnnnnnnnnnnnnnnnnnnnnnnnnnnnnnnnnnnnnnnnnnnnnnnnnnnnnnnnnnnnnnnnnnnnnnnnnnnnnnnnnnnnnnnnnnnnnnnnnnnnnnnnnnnnnnnnnnnnnnnnnnnnnnnnnnnnnnnnnnnnnnnnnnnnnnnnnnnnnnnnnnnnnnnnnnnnnnnnnnnnnnnnnnnnnnnnnnnnnnnnnnnnnnnnnnnnnnnnnnnnnnnnnnnnnnnnnnnnnnnnnnnnnnnnnnnnnnnnnnnnnnnnnnnnnnnnnnnnnnnnnnnnnnnnnnnnnnnnnnnnnnnnnnnnnnnnnnnnnnnnnnnnnnnnnnnnnnnnnnnnnnnnnnnnnnnnnnnnnnnnnnnnnnnnnnnnnnnnnnnnnnnnnnnnnnnnnnnnnnnnnnnnnnnnnnnnnnnnnnnnnnnnnnnnnnnnnnnnnnnnnnnnnnnnnnnnnnnnnnnnnnnnnnnnnnnnnnnnnnnnnnnnnnnnnnnnnnnnnnnnnnnnnnnnnnnnnnnnnnnnnnnnnnnnnnnnnnnnnnnnnnnnnnnnnnnnnnnnnnnnnnnnnnnnnnnnnnnnnnnnnnnnnnnnnnnnnnnnnnnnnnnnnnnnnnnnnnnnnnnnnnnnnnnnnnnnnnnnnnnnnnnnnnnnnnnnnnnnnnnnnnnnnnnnnnnnnnnnnnnnnnnnnnnnnnnnnnnnnnnnnnnnnnnnnnnnnnnnnnnnnnnnnnnnnnnnnnnnnnnnnnnnnnnnnnnnnnnnnnnnnnnnnnnnnnnnnnnnnnnnnnnnnnnnnnnnnnnnnnnnnnnnnnnnnnnnnnnnnnnnnnnnnnnnnnnnnnnnnnnnnnnnnnnnnnnnnnnnnnnnnnnnnnnnnnnnnnnnnnnnnnnnnnnnnnnnnnnnnnnnnnnnnnnnnnnnnnnnnnnnnnnnnnnnnnnnnnnnnnnnnnnnnnnnnnnnnnnnnnnnnnnnnnnnnnnnnnnnnnnnnnnnnnnnnnnnnnnnnnnnnnnnnnnnnnnnnnnnnnnnnnnnnnnnnnnnnnnnnnnnnnnnnnnnnnnnnnnnnnnnnnnnnnnnnnnnnnnnnnnnnnnnnnnnnnnnnnnnnnnnnnnnnnnnnnnnnnnnnnnnnnnnnnnnnnnnnnnnnnnnnnnnnnnnnnnnnnnnnnnnnnnnnnnnnnnnnnnnnnnnnnnnnnnnnnnnnnnnnnnnnnnnnnnnnnnnnnnnnnnnnnnnnnnnnnnnnnnnnnnnnnnnnnnnnnnnnnnnnnnnnnnnnnnnnnnnnnnnnnnnnnnnnnnnnnnnnnnnnnnnnnnnnnnnnnnnnnnnnnnnnnnnnnnnnnnnnnnnnnnnnnnnnnnnnnnnnnnnnnnnnnnnnnnnnnnnnnnnnnnnnnnnnnnnnnnnnnnnnnnnnnnnnnnnnnnnnnnnnnnnnnnnnnnnnnnnnnnnnnnnnnnnnnnnnnnnnnnnnnnnnnnnnnnnnnnnnnnnnnnnnnnnnnnnnnnnnnnnnnnnnnnnnnnnnnnnnnnnnnnnnnnnnnnnnnnnnnnnnnnnnnnnnnnnnnnnnnnnnnnnnnnnnnnnnnnnnnnnnnnnnnnnnnnnnnnnnnnnnnnnnnnnnnnnnnnnnnnnnnnnnnnnnnnnnnnnnnnnnnnnnnnnnnnnnnnnnnnnnnnnnnnnnnnnnnnnnnnnnnnnnnnnnnnnnnnnnnnnnnnnnnnnnnnnnnnnnnnnnnnnnnnnnnnnnnnnnnnnnnnnnnnnnnnnnnnnnnnnnnnnnnnnnnnnnnnnnnnnnnnnnnnnnnnnnnnnnnnnnnnnnnnnnnnnnnnnnnnnnnnnnnnnnnnnnnnnnnnnnnnnnnnnnnnnnnnnnnnnnnnnnnnnnnnnnnnnnnnnnnnnnnnnnnnnnnnnnnnnnnnnnnnnnnnnnnnnnnnnnnnnnnnnnnnnnnnnnnnnnnnnnnnnnnnnnnnnnnnnnnnnnnnnnnnnnnnnnnnnnnnnnnnnnnnnnnnnnnnnnnnnnnnnnnnnnnnnnnnnnnnnnnnnnnnnnnnnnnnnnnnnnnnnnnnnnnnnnnnnnnnnnnnnnnnnnnnnnnnnnnnnnnnnnnnnnnnnnnnnnnnnnnnnnnnnnnnnnnnnnnnnnnnnnnnnnnnnnnnnnnnnnnnnnnnnnnnnnnnnnnnnnnnnnnnnnnnnnnnnnnnnnnnnnnnnnnnnnnnnnnnnnnnnnnnnnnnnnnnnnnnnnnnnnnnnnnnnnnnnnnnnnnnnnnnnnnnnnnnnnnnnnnnnnnnnnnnnnnnnnnnnnnnnnnnnnnnnnnnnnnnnnnnnnnnnnnnnnnnnnnnnnnnnnnnnnnnnnnnnnnnnnnnnnnnnnnnnnnnnnnnnnnnnnnnnnnnnnnnnnnnnnnnnnnnnnnnnnnnnnnnnnnnnnnnnnnnnnnnnnnnnnnnnnnnnnnnnnnnnnnnnnnnnnnnnnnnnnnnnnnnnnnnnnnnnnnnnnnnnnnnnnnnnnnnnnnnnnnnnnnnnnnnnnnnnnnnnnnnnnnnnnnnnnnnnnnnnnnnnnnnnnnnnnnnnnnnnnnnnnnnnnnnnnnnnnnnnnnnnnnnnnnnnnnnnnnnnnnnnnnnnnnnnnnnnnnnnnnnnnnnnnnnnnnnnnnnnnnnnnnnnnnnnnnnnnnnnnnnnnnnnnnnnnnnnnnnnnnnnnnnnnnnnnnnnnnnnnnnnnnnnnnnnnnnnnnnnnnnnnnnnnnnnnnnnnnnnnnnnnnnnnnnnnnnnnnnnnnnnnnnnnnnnnnnnnnnnnnnnnnnnnnnnnnnnnnnnnnnnnnnnnnnnnnnnnnnnnnnnnnnnnnnnnnnnnnnnnnnnnnnnnnnnnnnnnnnnnnnnnnnnnnnnnnnnnnnnnnnnnnnnnnnnnnnnnnnnnnnnnnnnnnnnnnnnnnnnnnnnnnnnnnnnnnnnnnnnnnnnnnnnnnnnnnnnnnnnnnnnnnnnnnnnnnnnnnnnnnnnnnnnnnnnnnnnnnnnnnnnnnnnnnnnnnnnnnnnnnnnnnnnnnnnnnnnnnnnnnnnnnnnnnnnnnnnnnnnnnnnnnnnnnnnnnnnnnnnnnnnnnnnnnnnnnnnnnnnnnnnnnnnnnnnnnnnnnnnnnnnnnnnnnnnnnnnnnnnnnnnnnnnnnnnnnnnnnnnnnnnnnnnnnnnnnnnnnnnnnnnnnnnnnnnnnnnnnnnnnnnnnnnnnnnnnnnnnnnnnnnnnnnnnnnnnnnnnnnnnnnnnnnnnnnnnnnnnnnnnnnnnnnnnnnnnnnnnnnnnnnnnnnnnnnnnnnnnnnnnnnnnnnnnnnnnnnnnnnnnnnnnnnnnnnnnnnnnnnnnnnnnnnnnnnnnnnnnnnnnnnnnnnnnnnnnnnnnnnnnnnnnnnnnnnnnnnnnnnnnnnnnnnnnnnnnnnnnnnnnnnnnnnnnnnnnnnnnnnnnnnnnnnnnnnnnnnnnnnnnnnnnnnnnnnnnnnnnnnnnnnnnnnnnnnnnnnnnnnnnnnnnnnnnnnnnnnnnnnnnnnnnnnnnnnnnnnnnnnnnnnnnnnnnnnnnnnnnnnnnnnnnnnnnnnnnnnnnnnnnnnnnnnnnnnnnnnnnnnnnnnnnnnnnnnnnnnnnnnnnnnnnnnnnnnnnnnnnnnnnnnnnnnnnnnnnnnnnnnnnnnnnnnnnnnnnnnnnnnnnnnnnnnnnnnnnnnnnnnnnnnnnnnnnnnnnnnnnnnnnnnnnnnnnnnnnnnnnnnnnnnnnnnnnnnnnnnnnnnnnnnnnnnnnnnnnnnnnnnnnnnnnnnnnnnnnnnnnnnnnnnnnnnnnnnnnnnnnnnnnnnnnnnnnnnnnnnnnnnnnnnnnnnnnnnnnnnnnnnnnnnnnnnnnnnnnnnnnnnnnnnnnnnnnnnnnnnnnnnnnnnnnnnnnnnnnnnnnnnnnnnnnnnnnnnnnnnnnnnnnnnnnnnnnnnnnnnnnnnnnnnnnnnnnnnnnnnnnnnnnnnnnnnnnnnnnnnnnnnnnnnnnnnnnnnnnnnnnnnnnnnnnnnnnnnnnnnnnnnnnnnnnnnnnnnnnnnnnnnnnnnnnnnnnnnnnnnnnnnnnnnnnnnnnnnnnnnnnnnnnnnnnnnnnnnnnnnnnnnnnnnnnnnnnnnnnnnnnnnnnnnnnnnnnnnnnnnnnnnnnnnnnnnnnnnnnnnnnnnnnnnnnnnnnnnnnnnnnnnnnnnnnnnnnnnnnnnnnnnnnnnnnnnnnnnnnnnnnnnnnnnnnnnnnnnnnnnnnnnnnnnnnnnnnnnnnnnnnnnnnnnnnnnnnnnnnnnnnnnnnnnnnnnnnnnnnnnnnnnnnnnnnnnnnnnnnnnnnnnnnnnnnnnnnnnnnnnnnnnnnnnnnnnnnnnnnnnnnnnnnnnnnnnnnnnnnnnnnnnnnnnnnnnnnnnnnnnnnnnnnnnnnnnnnnnnnnnnnnnnnnnnnnnnnnnnnnnnnnnnnnnnnnnnnnnnnnnnnnnnnnnnnnnnnnnnnnnnnnnnnnnnnnnnnnnnnnnnnnnnnnnnnnnnnnnnnnnnnnnnnnnnnnnnnnnnnnnnnnnnnnnnnnnnnnnnnnnnnnnnnnnnnnnnnnnnnnnnnnnnnnnnnnnnnnnnnnnnnnnnnnnnnnnnnnnnnnnnnnnnnnnnnnnnnnnnnnnnnnnnnnnnnnnnnnnnnnnnnnnnnnnnnnnnnnnnnnnnnnnnnnnnnnnnnnnnnnnnnnnnnnnnnnnnnnnnnnnnnnnnnnnnnnnnnnnnnnnnnnnnnnnnnnnnnnnnnnnnnnnnnnnnnnnnnnnnnnnnnnnnnnnnnnnnnnnnnnnnnnnnnnnnnnnnnnnnnnnnnnnnnnnnnnnnnnnnnnnnnnnnnnnnnnnnnnnnnnnnnnnnnnnnnnnnnnnnnnnnnnnnnnnnnnnnnnnnnnnnnnnnnnnnnnnnnnnnnnnnnnnnnnnnnnnnnnnnnnnnnnnnnnnnnnnnnnnnnnnnnnnnnnnnnnnnnnnnnnnnnnnnnnnnnnnnnnnnnnnnnnnnnnnnnnnnnnnnnnnnnnnnnnnnnnnnnnnnnnnnnnnnnnnnnnnnnnnnnnnnnnnnnnnnnnnnnnnnnnnnnnnnnnnnnnnnnnnnnnnnnnnnnnnnnnnnnnnnnnnnnnnnnnnnnnnnnnnnnnnnnnnnnnnnnnnnnnnnnnnnnnnnnnnnnnnnnnnnnnnnnnnnnnnnnnnnnnnnnnnnnnnnnnnnnnnnnnnnnnnnnnnnnnnnnnnnnnnnnnnnnnnnnnnnnnnnnnnnnnnnnnnnnnnnnnnnnnnnnnnnnnnnnnnnnnnnnnnnnnnnnnnnnnnnnnnnnnnnnnnnnnnnnnnnnnnnnnnnnnnnnnnnnnnnnnnnnnnnnnnnnnnnnnnnnnnnnnnnnnnnnnnnnnnnnnnnnnnnnnnnnnnnnnnnnnnnnnnnnnnnnnnnnnnnnnnnnnnnnnnnnnnnnnnnnnnnnnnnnnnnnnnnnnnnnnnnnnnnnnnnnnnnnnnnnnnnnnnnnnnnnnnnnnnnnnnnnnnnnnnnnnnnnnnnnnnnnnnnnnnnnnnnnnnnnnnnnnnnnnnnnnnnnnnnnnnnnnnnnnnnnnnnnnnnnnnnnnnnnnnnnnnnnnnnnnnnnnnnnnnnnnnnnnnnnnnnnnnnnnnnnnnnnnnnnnnnnnnnnnnnnnnnnnnnnnnnnnnnnnnnnnnnnnnnnnnnnnnnnnnnnnnnnnnnnnnnnnnnnnnnnnnnnnnnnnnnnnnnnnnnnnnnnnnnnnnnnnnnnnnnnnnnnnnnnnnnnnnnnnnnnnnnnnnnnnnnnnnnnnnnnnnnnnnnnnnnnnnnnnnnnnnnnnnnnnnnnnnnnnnnnnnnnnnnnnnnnnnnnnnnnnnnnnnnnnnnnnnnnnnnnnnnnnnnnnnnnnnnnnnnnnnnnnnnnnnnnnnnnnnnnnnnnnnnnnnnnnnnnnnnnnnnnnnnnnnnnnnnnnnnnnnnnnnnnnnnnnnnnnnnnnnnnnnnnnnnnnnnnnnnnnnnnnnnnnnnnnnnnnnnnnnnnnnnnnnnnnnnnnnnnnnnnnnnnnnnnnnnnnnnnnnnnnnnnnnnnnnnnnnnnnnnnnnnnnnnnnnnnnnnnnnnnnnnnnnnnnnnnnnnnnnnnnnnnnnnnnnnnnnnnnnnnnnnnnnnnnnnnnnnnnnnnnnnnnnnnnnnnnnnnnnnnnnnnnnnnnnnnnnnnnnnnnnnnnnnnnnnnnnnnnnnnnnnnnnnnnnnnnnnnnnnnnnnnnnnnnnnnnnnnnnnnnnnnnnnnnnnnnnnnnnnnnnnnnnnnnnnnnnnnnnnnnnnnnnnnnnnnnnnnnnnnnnnnnnnnnnnnnnnnnnnnnnnnnnnnnnnnnnnnnnnnnnnnnnnnnnnnnnnnnnnnnnnnnnnnnnnnnnnnnnnnnnnnnnnnnnnnnnnnnnnnnnnnnnnnnnnnnnnnnnnnnnnnnnnnnnnnnnnnnnnnnnnnnnnnnnnnnnnnnnnnnnnnnnnnnnnnnnnnnnnnnnnnnnnnnnnnnnnnnnnnnnnnnnnnnnnnnnnnnnnnnnnnnnnnnnnnnnnnnnnnnnnnnnnnnnnnnnnnnnnnnnnnnnnnnnnnnnnnnnnnnnnnnnnnnnnnnnnnnnnnnnnnnnnnnnnnnnnnnnnnnnnnnnnnnnnnnnnnnnnnnnnnnnnnnnnnnnnnnnnnnnnnnnnnnnnnnnnnnnnnnnnnnnnnnnnnnnnnnnnnnnnnnnnnnnnnnnnnnnnnnnnnnnnnnnnnnnnnnnnnnnnnnnnnnnnnnnnnnnnnnnnnnnnnnnnnnnnnnnnnnnnnnnnnnnnnnnnnnnnnnnnnnnnnnnnnnnnnnnnnnnnnnnnnnnnnnnnnnnnnnnnnnnnnnnnnnnnnnnnnnnnnnnnnnnnnnnnnnnnnnnnnnnnnnnnnnnnnnnnnnnnnnnnnnnnnnnnnnnnnnnnnnnnnnnnnnnnnnnnnnnnnnnnnnnnnnnnnnnnnnnnnnnnnnnnnnnnnnnnnnnnnnnnnnnnnnnnnnnnnnnnnnnnnnnnnnnnnnnnnnnnnnnnnnnnnnnnnnnnnnnnnnnnnnnnnnnnnnnnnnnnnnnnnnnnnnnnnnnnnnnnnnnnnnnnnnnnnnnnnnnnnnnnnnnnnnnnnnnnnnnnnnnnnnnnnnnnnnnnnnnnnnnnnnnnnnnnnnnnnnnnnnnnnnnnnnnnnnnnnnnnnnnnnnnnnnnnnnnnnnnnnnnnnnnnnnnnnnnnnnnnnnnnnnnnnnnnnnnnnnnnnnnnnnnnnnnnnnnnnnnnnnnnnnnnnnnnnnnnnnnnnnnnnnnnnnnnnnnnnnnnnnnnnnnnnnnnnnnnnnnnnnnnnnnnnnnnnnnnnnnnnnnnnnnnnnnnnnnnnnnnnnnnnnnnnnnnnnnnnnnnnnnnnnnnnnnnnnnnnnnnnnnnnnnnnnnnnnnnnnnnnnnnnnnnnnnnnnnnnnnnnnnnnnnnnnnnnnnnnnnnnnnnnnnnnnnnnnnnnnnnnnnnnnnnnnnnnnnnnnnnnnnnnnnnnnnnnnnnnnnnnnnnnnnnnnnnnnnnnnnnnnnnnnnnnnnnnnnnnnnnnnnnnnnnnnnnnnnnnnnnnnnnnnnnnnnnnnnnnnnnnnnnnnnnnnnnnnnnnnnnnnnnnnnnnnnnnnnnnnnnnnnnnnnnnnnnnnnnnnnnnnnnnnnnnnnnnnnnnnnnnnnnnnnnnnnnnnnnnnnnnnnnnnnnnnnnnnnnnnnnnnnnnnnnnnnnnnnnnnnnnnnnnnnnnnnnnnnnnnnnnnnnnnnnnnnnnnnnnnnnnnnnnnnnnnnnnnnnnnnnnnnnnnnnnnnnnnnnnnnnnnnnnnnnnnnnnnnnnnnnnnnnnnnnnnnnnnnnnnnnnnnnnnnnnnnnnnnnnnnnnnnnnnnnnnnnnnnnnnnnnnnnnnnnnnnnnnnnnnnnnnnnnnnnnnnnnnnnnnnnnnnnnnnnnnnnnnnnnnnnnnnnnnnnnnnnnnnnnnnnnnnnnnnnnnnnnnnnnnnnnnnnnnnnnnnnnnnnnnnnnnnnnnnnnnnnnnnnnnnnnnnnnnnnnnnnnnnnnnnnnnnnnnnnnnnnnnnnnnnnnnnnnnnnnnnnnnnnnnnnnnnnnnnnnnnnnnnnnnnnnnnnnnnnnnnnnnnnnnnnnnnnnnnnnnnnnnnnnnnnnnnnnnnnnnnnnnnnnnnnnnnnnnnnnnnnnnnnnnnnnnnnnnnnnnnnnnnnnnnnnnnnnnnnnnnnnnnnnnnnnnnnnnnnnnnnnnnnnnnnnnnnnnnnnnnnnnnnnnnnnnnnnnnnnnnnnnnnnnnnnnnnnnnnnnnnnnnnnnnnnnnnnnnnnnnnnnnnnnnnnnnnnnnnnnnnnnnnnnnnnnnnnnnnnnnnnnnnnnnnnnnnnnnnnnnnnnnnnnnnnnnnnnnnnnnnnnnnnnnnnnnnnnnnnnnnnnnnnnnnnnnnnnnnnnnnnnnnnnnnnnnnnnnnnnnnnnnnnnnnnnnnnnnnnnnnnnnnnnnnnnnnnnnnnnnnnnnnnnnnnnnnnnnnnnnnnnnnnnnnnnnnnnnnnnnnnnnnnnnnnnnnnnnnnnnnnnnnnnnnnnnnnnnnnnnnnnnnnnnnnnnnnnnnnnnnnnnnnnnnnnnnnnnnnnnnnnnnnnnnnnnnnnnnnnnnnnnnnnnnnnnnnnnnnnnnnnnnnnnnnnnnnnnnnnnnnnnnnnnnnnnnnnnnnnnnnnnnnnnnnnnnnnnnnnnnnnnnnnnnnnnnnnnnnnnnnnnnnnnnnnnnnnnnnnnnnnnnnnnnnnnnnnnnnnnnnnnnnnnnnnnnnnnnnnnnnnnnnnnnnnnnnnnnnnnnnnnnnnnnnnnnnnnnnnnnnnnnnnnnnnnnnnnnnnnnnnnnnnnnnnnnnnnnnnnnnnnnnnnnnnnnnnnnnnnnnnnnnnnnnnnnnnnnnnnnnnnnnnnnnnnnnnnnnnnnnnnnnnnnnnnnnnnnnnnnnnnnnnnnnnnnnnnnnnnnnnnnnnnnnnnnnnnnnnnnnnnnnnnnnnnnnnnnnnnnnnnnnnnnnnnnnnnnnnnnnnnnnnnnnnnnnnnnnnnnnnnnnnnnnnnnnnnnnnnnnnnnnnnnnnnnnnnnnnnnnnnnnnnnnnnnnnnnnnnnnnnnnnnnnnnnnnnnnnnnnnnnnnnnnnnnnnnnnnnnnnnnnnnnnnnnnnnnnnnnnnnnnnnnnnnnnnnnnnnnnnnnnnnnnnnnnnnnnnnnnnnnnnnnnnnnnnnnnnnnnnnnnnnnnnnnnnnnnnnnnnnnnnnnnnnnnnnnnnnnnnnnnnnnnnnnnnnnnnnnnnnnnnnnnnnnnnnnnnnnnnnnnnnnnnnnnnnnnnnnnnnnnnnnnnnnnnnnnnnnnnnnnnnnnnnnnnnnnnnnnnnnnnnnnnnnnnnnnnnnnnnnnnnnnnnnnnnnnnnnnnnnnnnnnnnnnnnnnnnnnnnnnnnnnnnnnnnnnnnnnnnnnnnnnnnnnnnnnnnnnnnnnnnnnnnnnnnnnnnnnnnnnnnnnnnnnnnnnnnnnnnnnnnnnnnnnnnnnnnnnnnnnnnnnnnnnnnnnnnnnnnnnnnnnnnnnnnnnnnnnnnnnnnnnnnnnnnnnnnnnnnnnnnnnnnnnnnnnnnnnnnnnnnnnnnnnnnnnnnnnnnnnnnnnnnnnnnnnnnnnnnnnnnnnnnnnnnnnnnnnnnnnnnnnnnnnnnnnnnnnnnnnnnnnnnnnnnnnnnnnnnnnnnnnnnnnnnnnnnnnnnnnnnnnnnnnnnnnnnnnnnnnnnnnnnnnnnnnnnnnnnnnnnnnnnnnnnnnnnnnnnnnnnnnnnnnnnnnnnnnnnnnnnnnnnnnnnnnnnnnnnnnnnnnnnnnnnnnnnnnnnnnnnnnnnnnnnnnnnnnnnnnnnnnnnnnnnnnnnnnnnnnnnnnnnnnnnnnnnnnnnnnnnnnnnnnnnnnnnnnnnnnnnnnnnnnnnnnnnnnnnnnnnnnnnnnnnnnnnnnnnnnnnnnnnnnnnnnnnnnnnnnnnnnnnnnnnnnnnnnnnnnnnnnnnnnnnnnnnnnnnnnnnnnnnnnnnnnnnnnnnnnnnnnnnnnnnnnnnnnnnnnnnnnnnnnnnnnnnnnnnnnnnnnnnnnnnnnnnnnnnnnnnnnnnnnnnnnnnnnnnnnnnnnnnnnnnnnnnnnnnnnnnnnnnnnnnnnnnnnnnnnnnnnnnnnnnnnnnnnnnnnnnnnnnnnnnnnnnnnnnnnnnnnnnnnnnnnnnnnnnnnnnnnnnnnnnnnnnnnnnnnnnnnnnnnnnnnnnnnnnnnnnnnnnnnnnnnnnnnnnnnnnnnnnnnnnnnnnnnnnnnnnnnnnnnnnnnnnnnnnnnnnnnnnnnnnnnnnnnnnnnnnnnnnnnnnnnnnnnnnnnnnnnnnnnnnnnnnnnnnnnnnnnnnnnnnnnnnnnnnnnnnnnnnnnnnnnnnnnnnnnnnnnnnnnnnnnnnnnnnnnnnnnnnnnnnnnnnnnnnnnnnnnnnnnnnnnnnnnnnnnnnnnnnnnnnnnnnnnnnnnnnnnnnnnnnnnnnnnnnnnnnnnnnnnnnnnnnnnnnnnnnnnnnnnnnnnnnnnnnnnnnnnnnnnnnnnnnnnnnnnnnnnnnnnnnnnnnnnnnnnnnnnnnnnnnnnnnnnnnnnnnnnnnnnnnnnnnnnnnnnnnnnnnnnnnnnnnnnnnnnnnnnnnnnnnnnnnnnnnnnnnnnnnnnnnnnnnnnnnnnnnnnnnnnnnnnnnnnnnnnnnnnnnnnnnnnnnnnnnnnnnnnnnnnnnnnnnnnnnnnnnnnnnnnnnnnnnnnnnnnnnnnnnnnnnnnnnnnnnnnnnnnnnnnnnnnnnnnnnnnnnnnnnnnnnnnnnnnnnnnnnnnnnnnnnnnnnnnnnnnnnnnnnnnnnnnnnnnnnnnnnnnnnnnnnnnnnnnnnnnnnnnnnnnnnnnnnnnnnnnnnnnnnnnnnnnnnnnnnnnnnnnnnnnnnnnnnnnnnnnnnnnnnnnnnnnnnnnnnnnnnnnnnnnnnnnnnnnnnnnnnnnnnnnnnnnnnnnnnnnnnnnnnnnnnnnnnnnnnnnnnnnnnnnnnnnnnnnnnnnnnnnnnnnnnnnnnnnnnnnnnnnnnnnnnnnnnnnnnnnnnnnnnnnnnnnnnnnnnnnnnnnnnnnnnnnnnnnnnnnnnnnnnnnnnnnnnnnnnnnnnnnnnnnnnnnnnnnnnnnnnnnnnnnnnnnnnnnnnnnnnnnnnnnnnnnnnnnnnnnnnnnnnnnnnnnnnnnnnnnnnnnnnnnnnnnnnnnnnnnnnnnnnnnnnnnnnnnnnnnnnnnnnnnnnnnnnnnnnnnnnnnnnnnnnnnnnnnnnnnnnnnnnnnnnnnnnnnnnnnnnnnnnnnnnnnnnnnnnnnnnnnnnnnnnnnnnnnnnnnnnnnnnnnnnnnnnnnnnnnnnnnnnnnnnnnnnnnnnnnnnnnnnnnnnnnnnnnnnnnnnnnnnnnnnnnnnnnnnnnnnnnnnnnnnnnnnnnnnnnnnnnnnnnnnnnnnnnnnnnnnnnnnnnnnnnnnnnnnnnnnnnnnnnnnnnnnnnnnnnnnnnnnnnnnnnnnnnnnnnnnnnnnnnnnnnnnnnnnnnnnnnnnnnnnnnnnnnnnnnnnnnnnnnnnnnnnnnnnnnnnnnnnnnnnnnnnnnnnnnnnnnnnnnnnnnnnnnnnnnnnnnnnnnnnnnnnnnnnnnnnnnnnnnnnnnnnnnnnnnnnnnnnnnnnnnnnnnnnnnnnnnnnnnnnnnnnnnnnnnnnnnnnnnnnnnnnnnnnnnnnnnnnnnnnnnnnnnnnnnnnnnnnnnnnnnnnnnnnnnnnnnnnnnnnnnnnnnnnnnnnnnnnnnnnnnnnnnnnnnnnnnnnnnnnnnnnnnnnnnnnnnnnnnnnnnnnnnnnnnnnnnnnnnnnnnnnnnnnnnnnnnnnnnnnnnnnnnnnnnnnnnnnnnnnnnnnnnnnnnnnnnnnnnnnnnnnnnnnnnnnnnnnnnnnnnnnnnnnnnnnnnnnnnnnnnnnnnnnnnnnnnnnnnnnnnnnnnnnnnnnnnnnnnnnnnnnnnnnnnnnnnnnnnnnnnnnnnnnnnnnnnnnnnnnnnnnnnnnnnnnnnnnnnnnnnnnnnnnnnnnnnnnnnnnnnnnnnnnnnnnnnnnnnnnnnnnnnnnnnnnnnnnnnnnnnnnnnnnnnnnnnnnnnnnnnnnnnnnnnnnnnnnnnnnnnnnnnnnnnnnnnnnnnnnnnnnnnnnnnnnnnnnnnnnnnnnnnnnnnnnnnnnnnnnnnnnnnnnnnnnnnnnnnnnnnnnnnnnnnnnnnnnnnnnnnnnnnnnnnnnnnnnnnnnnnnnnnnnnnnnnnnnnnnnnnnnnnnnnnnnnnnnnnnnnnnnnnnnnnnnnnnnnnnnnnnnnnnnnnnnnnnnnnnnnnnnnnnnnnnnnnnnnnnnnnnnnnnnnnnnnnnnnnnnnnnnnnnnnnnnnnnnnnnnnnnnnnnnnnnnnnnnnnnnnnnnnnnnnnnnnnnnnnnnnnnnnnnnnnnnnnnnnnnnnnnnnnnnnnnnnnnnnnnnnnnnnnnnnnnnnnnnnnnnnnnnnnnnnnnnnnnnnnnnnnnnnnnnnnnnnnnnnnnnnnnnnnnnnnnnnnnnnnnnnnnnnnnnnnnnnnnnnnnnnnnnnnnnnnnnnnnnnnnnnnnnnnnnnnnnnnnnnnnnnnnnnnnnnnnnnnnnnnnnnnnnnnnnnnnnnnnnnnnnnnnnnnnnnnnnnnnnnnnnnnnnnnnnnnnnnnnnnnnnnnnnnnnnnnnnnnnnnnnnnnnnnnnnnnnnnnnnnnnnnnnnnnnnnnnnnnnnnnnnnnnnnnnnnnnnnnnnnnnnnnnnnnnnnnnnnnnnnnnnnnnnnnnnnnnnnnnnnnnnnnnnnnnnnnnnnnnnnnnnnnnnnnnnnnnnnnnnnnnnnnnnnnnnnnnnnnnnnnnnnnnnnnnnnnnnnnnnnnnnnnnnnnnnnnnnnnnnnnnnnnnnnnnnnnnnnnnnnnnnnnnnnnnnnnnnnnnnnnnnnnnnnnnnnnnnnnnnnnnnnnnnnnnnnnnnnnnnnnnnnnnnnnnnnnnnnnnnnnnnnnnnnnnnnnnnnnnnnnnnnnnnnnnnnnnnnnnnnnnnnnnnnnnnnnnnnnnnnnnnnnnnnnnnnnnnnnnnnnnnnnnnnnnnnnnnnnnnnnnnnnnnnnnnnnnnnnnnnnnnnnnnnnnnnnnnnnnnnnnnnnnnnnnnnnnnnnnnnnnnnnnnnnnnnnnnnnnnnnnnnnnnnnnnnnnnnnnnnnnnnnnnnnnnnnnnnnnnnnnnnnnnnnnnnnnnnnnnnnnnnnnnnnnnnnnnnnnnnnnnnnnnnnnnnnnnnnnnnnnnnnnnnnnnnnnnnnnnnnnnnnnnnnnnnnnnnnnnnnnnnnnnnnnnnnnnnnnnnnnnnnnnnnnnnnnnnnnnnnnnnnnnnnnnnnnnnnnnnnnnnnnnnnnnnnnnnnnnnnnnnnnnnnnnnnnnnnnnnnnnnnnnnnnnnnnnnnnnnnnnnnnnnnnnnnnnnnnnnnnnnnnnnnnnnnnnnnnnnnnnnnnnnnnnnnnnnnnnnnnnnnnnnnnnnnnnnnnnnnnnnnnnnnnnnnnnnnnnnnnnnnnnnnnnnnnnnnnnnnnnnnnnnnnnnnnnnnnnnnnnnnnnnnnnnnnnnnnnnnnnnnnnnnnnnnnnnnnnnnnnnnnnnnnnnnnnnnnnnnnnnnnnnnnnnnnnnnnnnnnnnnnnnnnnnnnnnnnnnnnnnnnnnnnnnnnnnnnnnnnnnnnnnnnnnnnnnnnnnnnnnnnnnnnnnnnnnnnnnnnnnnnnnnnnnnnnnnnnnnnnnnnnnnnnnnnnnnnnnnnnnnnnnnnnnnnnnnnnnnnnnnnnnnnnnnnnnnnnnnnnnnnnnnnnnnnnnnnnnnnnnnnnnnnnnnnnnnnnnnnnnnnnnnnnnnnnnnnnnnnnnnnnnnnnnnnnnnnnnnnnnnnnnnnnnnnnnnnnnnnnnnnnnnnnnnnnnnnnnnnnnnnnnnnnnnnnnnnnnnnnnnnnnnnnnnnnnnnnnnnnnnnnnnnnnnnnnnnnnnnnnnnnnnnnnnnnnnnnnnnnnnnnnnnnnnnnnnnnnnnnnnnnnnnnnnnnnnnnnnnnnnnnnnnnnnnnnnnnnnnnnnnnnnnnnnnnnnnnnnnnnnnnnnnnnnnnnnnnnnnnnnnnnnnnnnnnnnnnnnnnnnnnnnnnnnnnnnnnnnnnnnnnnnnnnnnnnnnnnnnnnnnnnnnnnnnnnnnnnnnnnnnnnnnnnnnnnnnnnnnnnnnnnnnnnnnnnnnnnnnnnnnnnnnnnnnnnnnnnnnnnnnnnnnnnnnnnnnnnnnnnnnnnnnnnnnnnnnnnnnnnnnnnnnnnnnnnnnnnnnnnnnnnnnnnnnnnnnnnnnnnnnnnnnnnnnnnnnnnnnnnnnnnnnnnnnnnnnnnnnnnnnnnnnnnnnnnnnnnnnnnnnnnnnnnnnnnnnnnnnnnnnnnnnnnnnnnnnnnnnnnnnnnnnnnnnnnnnnnnnnnnnnnnnnnnnnnnnnnnnnnnnnnnnnnnnnnnnnnnnnnnnnnnnnnnnnnnnnnnnnnnnnnnnnnnnnnnnnnnnnnnnnnnnnnnnnnnnnnnnnnnnnnnnnnnnnnnnnnnnnnnnnnnnnnnnnnnnnnnnnnnnnnnnnnnnnnnnnnnnnnnnnnnnnnnnnnnnnnnnnnnnnnnnnnnnnnnnnnnnnnnnnnnnnnnnnnnnnnnnnnnnnnnnnnnnnnnnnnnnnnnnnnnnnnnnnnnnnnnnnnnnnnnnnnnnnnnnnnnnnnnnnnnnnnnnnnnnnnnnnnnnnnnnnnnnnnnnnnnnnnnnnnnnnnnnnnnnnnnnnnnnnnnnnnnnnnnnnnnnnnnnnnnnnnnnnnnnnnnnnnnnnnnnnnnnnnnnnnnnnnnnnnnnnnnnnnnnnnnnnnnnnnnnnnnnnnnnnnnnnnnnnnnnnnnnnnnnnnnnnnnnnnnnnnnnnnnnnnnnnnnnnnnnnnnnnnnnnnnnnnnnnnnnnnnnnnnnnnnnnnnnnnnnnnnnnnnnnnnnnnnnnnnnnnnnnnnnnnnnnnnnnnnnnnnnnnnnnnnnnnnnnnnnnnnnnnnnnnnnnnnnnnnnnnnnnnnnnnnnnnnnnnnnnnnnnnnnnnnnnnnnnnnnnnnnnnnnnnnnnnnnnnnnnnnnnnnnnnnnnnnnnnnnnnnnnnnnnnnnnnnnnnnnnnnnnnnnnnnnnnnnnnnnnnnnnnnnnnnnnnnnnnnnnnnnnnnnnnnnnnnnnnnnnnnnnnnnnnnnnnnnnnnnnnnnnnnnnnnnnnnnnnnnnnnnnnnnnnnnnnnnnnnnnnnnnnnnnnnnnnnnnnnnnnnnnnnnnnnnnnnnnnnnnnnnnnnnnnnnnnnnnnnnnnnnnnnnnnnnnnnnnnnnnnnnnnnnnnnnnnnnnnnnnnnnnnnnnnnnnnnnnnnnnnnnnnnnnnnnnnnnnnnnnnnnnnnnnnnnnnnnnnnnnnnnnnnnnnnnnnnnnnnnnnnnnnnnnnnnnnnnnnnnnnnnnnnnnnnnnnnnnnnnnnnnnnnnnnnnnnnnnnnnnnnnnnnnnnnnnnnnnnnnnnnnnnnnnnnnnnnnnnnnnnnnnnnnnnnnnnnnnnnnnnnnnnnnnnnnnnnnnnnnnnnnnnnnnnnnnnnnnnnnnnnnnnnnnnnnnnnnnnnnnnnnnnnnnnnnnnnnnnnnnnnnnnnnnnnnnnnnnnnnnnnnnnnnnnnnnnnnnnnnnnnnnnnnnnnnnnnnnnnnnnnnnnnnnnnnnnnnnnnnnnnnnnnnnnnnnnnnnnnnnnnnnnnnnnnnnnnnnnnnnnnnnnnnnnnnnnnnnnnnnnnnnnnnnnnnnnnnnnnnnnnnnnnnnnnnnnnnnnnnnnnnnnnnnnnnnnnnnnnnnnnnnnnnnnnnnnnnnnnnnnnnnnnnnnnnnnnnnnnnnnnnnnnnnnnnnnnnnnnnnnnnnnnnnnnnnnnnnnnnnnnnnnnnnnnnnnnnnnnnnnnnnnnnnnnnnnnnnnnnnnnnnnnnnnnnnnnnnnnnnnnnnnnnnnnnnnnnnnnnnnnnnnnnnnnnnnnnnnnnnnnnnnnnnnnnnnnnnnnnnnnnnnnnnnnnnnnnnnnnnnnnnnnnnnnnnnnnnnnnnnnnnnnnnnnnnnnnnnnnnnnnnnnnnnnnnnnnnnnnnnnnnnnnnnnnnnnnnnnnnnnnnnnnnnnnnnnnnnnnnnnnnnnnnnnnnnnnnnnnnnnnnnnnnnnnnnnnnnnnnnnnnnnnnnnnnnnnnnnnnnnnnnnnnnnnnnnnnnnnnnnnnnnnnnnnnnnnnnnnnnnnnnnnnnnnnnnnnnnnnnnnnnnnnnnnnnnnnnnnnnnnnnnnnnnnnnnnnnnnnnnnnnnnnnnnnnnnnnnnnnnnnnnnnnnnnnnnnnnnnnnnnnnnnnnnnnnnnnnnnnnnnnnnnnnnnnnnnnnnnnnnnnnnnnnnnnnnnnnnnnnnnnnnnnnnnnnnnnnnnnnnnnnnnnnnnnnnnnnnnnnnnnnnnnnnnnnnnnnnnnnnnnnnnnnnnnnnnnnnnnnnnnnnnnnnnnnnnnnnnnnnnnnnnnnnnnnnnnnnnnnnnnnnnnnnnnnnnnnnnnnnnnnnnnnnnnnnnnnnnnnnnnnnnnnnnnnnnnnnnnnnnnnnnnnnnnnnnnnnnnnnnnnnnnnnnnnnnnnnnnnnnnnnnnnnnnnnnnnnnnnnnnnnnnnnnnnnnnnnnnnnnnnnnnnnnnnnnnnnnnnnnnnnnnnnnnnnnnnnnnnnnnnnnnnnnnnnnnnnnnnnnnnnnnnnnnnnnnnnnnnnnnnnnnnnnnnnnnnnnnnnnnnnnnnnnnnnnnnnnnnnnnnnnnnnnnnnnnnnnnnnnnnnnnnnnnnnnnnnnnnnnnnnnnnnnnnnnnnnnnnnnnnnnnnnnnnnnnnnnnnnnnnnnnnnnnnnnnnnnnnnnnnnnnnnnnnnnnnnnnnnnnnnnnnnnnnnnnnnnnnnnnnnnnnnnnnnnnnnnnnnnnnnnnnnnnnnnnnnnnnnnnnnnnnnnnnnnnnnnnnnnnnnnnnnnnnnnnnnnnnnnnnnnnnnnnnnnnnnnnnnnnnnnnnnnnnnnnnnnnnnnnnnnnnnnnnnnnnnnnnnnnnnnnnnnnnnnnnnnnnnnnnnnnnnnnnnnnnnnnnnnnnnnnnnnnnnnnnnnnnnnnnnnnnnnnnnnnnnnnnnnnnnnnnnnnnnnnnnnnnnnnnnnnnnnnnnnnnnnnnnnnnnnnnnnnnnnnnnnnnnnnnnnnnnnnnnnnnnnnnnnnnnnnnnnnnnnnnnnnnnnnnnnnnnnnnnnnnnnnnnnnnnnnnnnnnnnnnnnnnnnnnnnnnnnnnnnnnnnnnnnnnnnnnnnnnnnnnnnnnnnnnnnnnnnnnnnnnnnnnnnnnnnnnnnnnnnnnnnnnnnnnnnnnnnnnnnnnnnnnnnnnnnnnnnnnnnnnnnnnnnnnnnnnnnnnnnnnnnnnnnnnnnnnnnnnnnnnnnnnnnnnnnnnnnnnnnnnnnnnnnnnnnnnnnnnnnnnnnnnnnnnnnnnnnnnnnnnnnnnnnnnnnnnnnnnnnnnnnnnnnnnnnnnnnnnnnnnnnnnnnnnnnnnnnnnnnnnnnnnnnnnnnnnnnnnnnnnnnnnnnnnnnnnnnnnnnnnnnnnnnnnnnnnnnnnnnnnnnnnnnnnnnnnnnnnnnnnnnnnnnnnnnnnnnnnnnnnnnnnnnnnnnnnnnnnnnnnnnnnnnnnnnnnnnnnnnnnnnnnnnnnnnnnnnnnnnnnnnnnnnnnnnnnnnnnnnnnnnnnnnnnnnnnnnnnnnnnnnnnnnnnnnnnnnnnnnnnnnnnnnnnnnnnnnnnnnnnnnnnnnnnnnnnnnnnnnnnnnnnnnnnnnnnnnnnnnnnnnnnnnnnnnnnnnnnnnnnnnnnnnnnnnnnnnnnnnnnnnnnnnnnnnnnnnnnnnnnnnnnnnnnnnnnnnnnnnnnnnnnnnnnnnnnnnnnnnnnnnnnnnnnnnnnnnnnnnnnnnnnnnnnnnnnnnnnnnnnnnnnnnnnnnnnnnnnnnnnnnnnnnnnnnnnnnnnnnnnnnnnnnnnnnnnnnnnnnnnnnnnnnnnnnnnnnnnnnnnnnnnnnnnnnnnnnnnnnnnnnnnnnnnnnnnnnnnnnnnnnnnnnnnnnnnnnnnnnnnnnnnnnnnnnnnnnnnnnnnnnnnnnnnnnnnnnnnnnnnnnnnnnnnnnnnnnnnnnnnnnnnnnnnnnnnnnnnnnnnnnnnnnnnnnnnnnnnnnnnnnnnnnnnnnnnnnnnnnnnnnnnnnnnnnnnnnnnnnnnnnnnnnnnnnnnnnnnnnnnnnnnnnnnnnnnnnnnnnnnnnnnnnnnnnnnnnnnnnnnnnnnnnnnnnnnnnnnnnnnnnnnnnnnnnnnnnnnnnnnnnnnnnnnnnnnnnnnnnnnnnnnnnnnnnnnnnnnnnnnnnnnnnnnnnnnnnnnnnnnnnnnnnnnnnnnnnnnnnnnnnnnnnnnnnnnnnnnnnnnnnnnnnnnnnnnnnnnnnnnnnnnnnnnnnnnnnnnnnnnnnnnnnnnnnnnnnnnnnnnnnnnnnnnnnnnnnnnnnnnnnnnnnnnnnnnnnnnnnnnnnnnnnnnnnnnnnnnnnnnnnnnnnnnnnnnnnnnnnnnnnnnnnnnnnnnnnnnnnnnnnnnnnnnnnnnnnnnnnnnnnnnnnnnnnnnnnnnnnnnnnnnnnnnnnnnnnnnnnnnnnnnnnnnnnnnnnnnnnnnnnnnnnnnnnnnnnnnnnnnnnnnnnnnnnnnnnnnnnnnnnnnnnnnnnnnnnnnnnnnnnnnnnnnnnnnnnnnnnnnnnnnnnnnnnnnnnnnnnnnnnnnnnnnnnnnnnnnnnnnnnnnnnnnnnnnnnnnnnnnnnnnnnnnnnnnnnnnnnnnnnnnnnnnnnnnnnnnnnnnnnnnnnnnnnnnnnnnnnnnnnnnnnnnnnnnnnnnnnnnnnnnnnnnnnnnnnnnnnnnnnnnnnnnnnnnnnnnnnnnnnnnnnnnnnnnnnnnnnnnnnnnnnnnnnnnnnnnnnnnnnnnnnnnnnnnnnnnnnnnnnnnnnnnnnnnnnnnnnnnnnnnnnnnnnnnnnnnnnnnnnnnnnnnnnnnnnnnnnnnnnnnnnnnnnnnnnnnnnnnnnnnnnnnnnnnnnnnnnnnnnnnnnnnnnnnnnnnnnnnnnnnnnnnnnnnnnnnnnnnnnnnnnnnnnnnnnnnnnnnnnnnnnnnnnnnnnnnnnnnnnnnnnnnnnnnnnnnnnnnnnnnnnnnnnnnnnnnnnnnnnnnnnnnnnnnnnnnnnnnnnnnnnnnnnnnnnnnnnnnnnnnnnnnnnnnnnnnnnnnnnnnnnnnnnnnnnnnnnnnnnnnnnnnnnnnnnnnnnnnnnnnnnnnnnnnnnnnnnnnnnnnnnnnnnnnnnnnnnnnnnnnnnnnnnnnnnnnnnnnnnnnnnnnnnnnnnnnnnnnnnnnnnnnnnnnnnnnnnnnnnnnnnnnnnnnnnnnnnnnnnnnnnnnnnnnnnnnnnnnnnnnnnnnnnnnnnnnnnnnnnnnnnnnnnnnnnnnnnnnnnnnnnnnnnnnnnnnnnnnnnnnnnnnnnnnnnnnnnnnnnnnnnnnnnnnnnnnnnnnnnnnnnnnnnnnnnnnnnnnnnnnnnnnnnnnnnnnnnnnnnnnnnnnnnnnnnnnnnnnnnnnnnnnnnnnnnnnnnnnnnnnnnnnnnnnnnnnnnnnnnnnnnnnnnnnnnnnnnnnnnnnnnnnnnnnnnnnnnnnnnnnnnnnnnnnnnnnnnnnnnnnnnnnnnnnnnnnnnnnnnnnnnnnnnnnnnnnnnnnnnnnnnnnnnnnnnnnnnnnnnnnnnnnnnnnnnnnnnnnnnnnnnnnnnnnnnnnnnnnnnnnnnnnnnnnnnnnnnnnnnnnnnnnnnnnnnnnnnnnnnnnnnnnnnnnnnnnnnnnnnnnnnnnnnnnnnnnnnnnnnnnnnnnnnnnnnnnnnnnnnnnnnnnnnnnnnnnnnnnnnnnnnnnnnnnnnnnnnnnnnnnnnnnnnnnnnnnnnnnnnnnnnnnnnnnnnnnnnnnnnnnnnnnnnnnnnnnnnnnnnnnnnnnnnnnnnnnnnnnnnnnnnnnnnnnnnnnnnnnnnnnnnnnnnnnnnnnnnnnnnnnnnnnnnnnnnnnnnnnnnnnnnnnnnnnnnnnnnnnnnnnnnnnnnnnnnnnnnnnnnnnnnnnnnnnnnnnnnnnnnnnnnnnnnnnnnnnnnnnnnnnnnnnnnnnnnnnnnnnnnnnnnnnnnnnnnnnnnnnnnnnnnnnnnnnnnnnnnnnnnnnnnnnnnnnnnnnnnnnnnnnnnnnnnnnnnnnnnnnnnnnnnnnnnnnnnnnnnnnnnnnnnnnnnnnnnnnnnnnnnnnnnnnnnnnnnnnnnnnnnnnnnnnnnnnnnnnnnnnnnnnnnnnnnnnnnnnnnnnnnnnnnnnnnnnnnnnnnnnnnnnnnnnnnnnnnnnnnnnnnnnnnnnnnnnnnnnnnnnnnnnnnnnnnnnnnnnnnnnnnnnnnnnnnnnnnnnnnnnnnnnnnnnnnnnnnnnnnnnnnnnnnnnnnnnnnnnnnnnnnnnnnnnnnnnnnnnnnnnnnnnnnnnnnnnnnnnnnnnnnnnnnnnnnnnnnnnnnnnnnnnnnnnnnnnnnnnnnnnnnnnnnnnnnnnnnnnnnnnnnnnnnnnnnnnnnnnnnnnnnnnnnnnnnnnnnnnnnnnnnnnnnnnnnnnnnnnnnnnnnnnnnnnnnnnnnnnnnnnnnnnnnnnnnnnnnnnnnnnnnnnnnnnnnnnnnnnnnnnnnnnnnnnnnnnnnnnnnnnnnnnnnnnnnnnnnnnnnnnnnnnnnnnnnnnnnnnnnnnnnnnnnnnnnnnnnnnnnnnnnnnnnnnnnnnnnnnnnnnnnnnnnnnnnnnnnnnnnnnnnnnnnnnnnnnnnnnnnnnnnnnnnnnnnnnnnnnnnnnnnnnnnnnnnnnnnnnnnnnnnnnnnnnnnnnnnnnnnnnnnnnnnnnnnnnnnnnnnnnnnnnnnnnnnnnnnnnnnnnnnnnnnnnnnnnnnnnnnnnnnnnnnnnnnnnnnnnnnnnnnnnnnnnnnnnnnnnnnnnnnnnnnnnnnnnnnnnnnnnnnnnnnnnnnnnnnnnnnnnnnnnnnnnnnnnnnnnnnnnnnnnnnnnnnnnnnnnnnnnnnnnnnnnnnnnnnnnnnnnnnnnnnnnnnnnnnnnnnnnnnnnnnnnnnnnnnnnnnnnnnnnnnnnnnnnnnnnnnnnnnnnnnnnnnnnnnnnnnnnnnnnnnnnnnnnnnnnnnnnnnnnnnnnnnnnnnnnnnnnnnnnnnnnnnnnnnnnnnnnnnnnnnnnnnnnnnnnnnnnnnnnnnnnnnnnnnnnnnnnnnnnnnnnnnnnnnnnnnnnnnnnnnnnnnnnnnnnnnnnnnnnnnnnnnnnnnnnnnnnnnnnnnnnnnnnnnnnnnnnnnnnnnnnnnnnnnnnnnnnnnnnnnnnnnnnnnnnnnnnnnnnnnnnnnnnnnnnnnnnnnnnnnnnnnnnnnnnnnnnnnnnnnnnnnnnnnnnnnnnnnnnnnnnnnnnnnnnnnnnnnnnnnnnnnnnnnnnnnnnnnnnnnnnnnnnnnnnnnnnnnnnnnnnnnnnnnnnnnnnnnnnnnnnnnnnnnnnnnnnnnnnnnnnnnnnnnnnnnnnnnnnnnnnnnnnnnnnnnnnnnnnnnnnnnnnnnnnnnnnnnnnnnnnnnnnnnnnnnnnnnnnnnnnnnnnnnnnnnnnnnnnnnnnnnnnnnnnnnnnnnnnnnnnnnnnnnnnnnnnnnnnnnnnnnnnnnnnnnnnnnnnnnnnnnnnnnnnnnnnnnnnnnnnnnnnnnnnnnnnnnnnnnnnnnnnnnnnnnnnnnnnnnnnnnnnnnnnnnnnnnnnnnnnnnnnnnnnnnnnnnnnnnnnnnnnnnnnnnnnnnnnnnnnnnnnnnnnnnnnnnnnnnnnnnnnnnnnnnnnnnnnnnnnnnnnnnnnnnnnnnnnnnnnnnnnnnnnnnnnnnnnnnnnnnnnnnnnnnnnnnnnnnnnnnnnnnnnnnnnnnnnnnnnnnnnnnnnnnnnnnnnnnnnnnnnnnnnnnnnnnnnnnnnnnnnnnnnnnnnnnnnnnnnnnnnnnnnnnnnnnnnnnnnnnnnnnnnnnnnnnnnnnnnnnnnnnnnnnnnnnnnnnnnnnnnnnnnnnnnnnnnnnnnnnnnnnnnnnnnnnnnnnnnnnnnnnnnnnnnnnnnnnnnnnnnnnnnnnnnnnnnnnnnnnnnnnnnnnnnnnnnnnnnnnnnnnnnnnnnnnnnnnnnnnnnnnnnnnnnnnnnnnnnnnnnnnnnnnnnnnnnnnnnnnnnnnnnnnnnnnnnnnnnnnnnnnnnnnnnnnnnnnnnnnnnnnnnnnnnnnnnnnnnnnnnnnnnnnnnnnnnnnnnnnnnnnnnnnnnnnnnnnnnnnnnnnnnnnnnnnnnnnnnnnnnnnnnnnnnnnnnnnnnnnnnnnnnnnnnnnnnnnnnnnnnnnnnnnnnnnnnnnnnnnnnnnnnnnnnnnnnnnnnnnnnnnnnnnnnnnnnnnnnnnnnnnnnnnnnnnnnnnnnnnnnnnnnnnnnnnnnnnnnnnnnnnnnnnnnnnnnnnnnnnnnnnnnnnnnnnnnnnnnnnnnnnnnnnnnnnnnnnnnnnnnnnnnnnnnnnnnnnnnnnnnnnnnnnnnnnnnnnnnnnnnnnnnnnnnnnnnnnnnnnnnnnnnnnnnnnnnnnnnnnnnnnnnnnnnnnnnnnnnnnnnnnnnnnnnnnnnnnnnnnnnnnnnnnnnnnnnnnnnnnnnnnnnnnnnnnnnnnnnnnnnnnnnnnnnnnnnnnnnnnnnnnnnnnnnnnnnnnnnnnnnnnnnnnnnnnnnnnnnnnnnnnnnnnnnnnnnnnnnnnnnnnnnnnnnnnnnnnnnnnnnnnnnnnnnnnnnnnnnnnnnnnnnnnnnnnnnnnnnnnnnnnnnnnnnnnnnnnnnnnnnnnnnnnnnnnnnnnnnnnnnnnnnnnnnnnnnnnnnnnnnnnnnnnnnnnnnnnnnnnnnnnnnnnnnnnnnnnnnnnnnnnnnnnnnnnnnnnnnnnnnnnnnnnnnnnnnnnnnnnnnnnnnnnnnnnnnnnnnnnnnnnnnnnnnnnnnnnnnnnnnnnnnnnnnnnnnnnnnnnnnnnnnnnnnnnnnnnnnnnnnnnnnnnnnnnnnnnnnnnnnnnnnnnnnnnnnnnnnnnnnnnnnnnnnnnnnnnnnnnnnnnnnnnnnnnnnnnnnnnnnnnnnnnnnnnnnnnnnnnnnnnnnnnnnnnnnnnnnnnnnnnnnnnnnnnnnnnnnnnnnnnnnnnnnnnnnnnnnnnnnnnnnnnnnnnnnnnnnnnnnnnnnnnnnnnnnnnnnnnnnnnnnnnnnnnnnnnnnnnnnnnnnnnnnnnnnnnnnnnnnnnnnnnnnnnnnnnnnnnnnnnnnnnnnnnnnnnnnnnnnnnnnnnnnnnnnnnnnnnnnnnnnnnnnnnnnnnnnnnnnnnnnnnnnnnnnnnnnnnnnnnnnnnnnnnnnnnnnnnnnnnnnnnnnnnnnnnnnnnnnnnnnnnnnnnnnnnnnnnnnnnnnnnnnnnnnnnnnnnnnnnnnnnnnnnnnnnnnnnnnnnnnnnnnnnnnnnnnnnnnnnnnnnnnnnnnnnnnnnnnnnnnnnnnnnnnnnnnnnnnnnnnnnnnnnnnnnnnnnnnnnnnnnnnnnnnnnnnnnnnnnnnnnnnnnnnnnnnnnnnnnnnnnnnnnnnnnnnnnnnnnnnnnnnnnnnnnnnnnnnnnnnnnnnnnnnnnnnnnnnnnnnnnnnnnnnnnnnnnnnnnnnnnnnnnnnnnnnnnnnnnnnnnnnnnnnnnnnnnnnnnnnnnnnnnnnnnnnnnnnnnnnnnnnnnnnnnnnnnnnnnnnnnnnnnnnnnnnnnnnnnnnnnnnnnnnnnnnnnnnnnnnnnnnnnnnnnnnnnnnnnnnnnnnnnnnnnnnnnnnnnnnnnnnnnnnnnnnnnnnnnnnnnnnnnnnnnnnnnnnnnnnnnnnnnnnnnnnnnnnnnnnnnnnnnnnnnnnnnnnnnnnnnnnnnnnnnnnnnnnnnnnnnnnnnnnnnnnnnnnnnnnnnnnnnnnnnnnnnnnnnnnnnnnnnnnnnnnnnnnnnnnnnnnnnnnnnnnnnnnnnnnnnnnnnnnnnnnnnnnnnnnnnnnnnnnnnnnnnnnnnnnnnnnnnnnnnnnnnnnnnnnnnnnnnnnnnnnnnnnnnnnnnnnnnnnnnnnnnnnnnnnnnnnnnnnnnnnnnnnnnnnnnnnnnnnnnnnnnnnnnnnnnnnnnnnnnnnnnnnnnnnnnnnnnnnnnnnnnnnnnnnnnnnnnnnnnnnnnnnnnnnnnnnnnnnnnnnnnnnnnnnnnnnnnnnnnnnnnnnnnnnnnnnnnnnnnnnnnnnnnnnnnnnnnnnnnnnnnnnnnnnnnnnnnnnnnnnnnnnnnnnnnnnnnnnnnnnnnnnnnnnnnnnnnnnnnnnnnnnnnnnnnnnnnnnnnnnnnnnnnnnnnnnnnnnnnnnnnnnnnnnnnnnnnnnnnnnnnnnnnnnnnnnnnnnnnnnnnnnnnnnnnnnnnnnnnnnnnnnnnnnnnnnnnnnnnnnnnnnnnnnnnnnnnnnnnnnnnnnnnnnnnnnnnnnnnnnnnnnnnnnnnnnnnnnnnnnnnnnnnnnnnnnnnnnnnnnnnnnnnnnnnnnnnnnnnnnnnnnnnnnnnnnnnnnnnnnnnnnnnnnnnnnnnnnnnnnnnnnnnnnnnnnnnnnnnnnnnnnnnnnnnnnnnnnnnnnnnnnnnnnnnnnnnnnnnnnnnnnnnnnnnnnnnnnnnnnnnnnnnnnnnnnnnnnnnnnnnnnnnnnnnnnnnnnnnnnnnnnnnnnnnnnnnnnnnnnnnnnnnnnnnnnnnnnnnnnnnnnnnnnnnnnnnnnnnnnnnnnnnnnnnnnnnnnnnnnnnnnnnnnnnnnnnnnnnnnnnnnnnnnnnnnnnnnnnnnnnnnnnnnnnnnnnnnnnnnnnnnnnnnnnnnnnnnnnnnnnnnnnnnnnnnnnnnnnnnnnnnnnnnnnnnnnnnnnnnnnnnnnnnnnnnnnnnnnnnnnnnnnnnnnnnnnnnnnnnnnnnnnnnnnnnnnnnnnnnnnnnnnnnnnnnnnnnnnnnnnnnnnnnnnnnnnnnnnnnnnnnnnnnnnnnnnnnnnnnnnnnnnnnnnnnnnnnnnnnnnnnnnnnnnnnnnnnnnnnnnnnnnnnnnnnnnnnnnnnnnnnnnnnnnnnnnnnnnnnnnnnnnnnnnnnnnnnnnnnnnnnnnnnnnnnnnnnnnnnnnnnnnnnnnnnnnnnnnnnnnnnnnnnnnnnnnnnnnnnnnnnnnnnnnnnnnnnnnnnnnnnnnnnnnnnnnnnnnnnnnnnnnnnnnnnnnnnnnnnnnnnnnnnnnnnnnnnnnnnnnnnnnnnnnnnnnnnnnnnnnnnnnnnnnnnnnnnnnnnnnnnnnnnnnnnnnnnnnnnnnnnnnnnnnnnnnnnnnnnnnnnnnnnnnnnnnnnnnnnnnnnnnnnnnnnnnnnnnnnnnnnnnnnnnnnnnnnnnnnnnnnnnnnnnnnnnnnnnnnnnnnnnnnnnnnnnnnnnnnnnnnnnnnnnnnnnnnnnnnnnnnnnnnnnnnnnnnnnnnnnnnnnnnnnnnnnnnnnnnnnnnnnnnnnnnnnnnnnnnnnnnnnnnnnnnnnnnnnnnnnnnnnnnnnnnnnnnnnnnnnnnnnnnnnnnnnnnnnnnnnnnnnnnnnnnnnnnnnnnnnnnnnnnnnnnnnnnnnnnnnnnnnnnnnnnnnnnnnnnnnnnnnnnnnnnnnnnnnnnnnnnnnnnnnnnnnnnnnnnnnnnnnnnnnnnnnnnnnnnnnnnnnnnnnnnnnnnnnnnnnnnnnnnnnnnnnnnnnnnnnnnnnnnnnnnnnnnnnnnnnnnnnnnnnnnnnnnnnnnnnnnnnnnnnnnnnnnnnnnnnnnnnnnnnnnnnnnnnnnnnnnnnnnnnnnnnnnnnnnnnnnnnnnnnnnnnnnnnnnnnnnnnnnnnnnnnnnnnnnnnnnnnnnnnnnnnnnnnnnnnnnnnnnnnnnnnnnnnnnnnnnnnnnnnnnnnnnnnnnnnnnnnnnnnnnnnnnnnnnnnnnnnnnnnnnnnnnnnnnnnnnnnnnnnnnnnnnnnnnnnnnnnnnnnnnnnnnnnnnnnnnnnnnnnnnnnnnnnnnnnnnnnnnnnnnnnnnnnnnnnnnnnnnnnnnnnnnnnnnnnnnnnnnnnnnnnnnnnnnnnnnnnnnnnnnnnnnnnnnnnnnnnnnnnnnnnnnnnnnnnnnnnnnnnnnnnnnnnnnnnnnnnnnnnnnnnnnnnnnnnnnnnnnnnnnnnnnnnnnnnnnnnnnnnnnnnnnnnnnnnnnnnnnnnnnnnnnnnnnnnnnnnnnnnnnnnnnnnnnnnnnnnnnnnnnnnnnnnnnnnnnnnnnnnnnnnnnnnnnnnnnnnnnnnnnnnnnnnnnnnnnnnnnnnnnnnnnnnnnnnnnnnnnnnnnnnnnnnnnnnnnnnnnnnnnnnnnnnnnnnnnnnnnnnnnnnnnnnnnnnnnnnnnnnnnnnnnnnnnnnnnnnnnnnnnnnnnnnnnnnnnnnnnnnnnnnnnnnnnnnnnnnnnnnnnnnnnnnnnnnnnnnnnnnnnnnnnnnnnnnnnnnnnnnnnnnnnnnnnnnnnnnnnnnnnnnnnnnnnnnnnnnnnnnnnnnnnnnnnnnnnnnnnnnnnnnnnnnnnnnnnnnnnnnnnnnnnnnnnnnnnnnnnnnnnnnnnnnnnnnnnnnnnnnnnnnnnnnnnnnnnnnnnnnnnnnnnnnnnnnnnnnnnnnnnnnnnnnnnnnnnnnnnnnnnnnnnnnnnnnnnnnnnnnnnnnnnnnnnnnnnnnnnnnnnnnnnnnnnnnnnnnnnnnnnnnnnnnnnnnnnnnnnnnnnnnnnnnnnnnnnnnnnnnnnnnnnnnnnnnnnnnnnnnnnnnnnnnnnnnnnnnnnnnnnnnnnnnnnnnnnnnnnnnnnnnnnnnnnnnnnnnnnnnnnnnnnnnnnnnnnnnnnnnnnnnnnnnnnnnnnnnnnnnnnnnnnnnnnnnnnnnnnnnnnnnnnnnnnnnnnnnnnnnnnnnnnnnnnnnnnnnnnnnnnnnnnnnnnnnnnnnnnnnnnnnnnnnnnnnnnnnnnnnnnnnnnnnnnnnnnnnnnnnnnnnnnnnnnnnnnnnnnnnnnnnnnnnnnnnnnnnnnnnnnnnnnnnnnnnnnnnnnnnnnnnnnnnnnnnnnnnnnnnnnnnnnnnnnnnnnnnnnnnnnnnnnnnnnnnnnnnnnnnnnnnnnnnnnnnnnnnnnnnnnnnnnnnnnnnnnnnnnnnnnnnnnnnnnnnnnnnnnnnnnnnnnnnnnnnnnnnnnnnnnnnnnnnnnnnnnnnnnnnnnnnnnnnnnnnnnnnnnnnnnnnnnnnnnnnnnnnnnnnnnnnnnnnnnnnnnnnnnnnnnnnnnnnnnnnnnnnnnnnnnnnnnnnnnnnnnnnnnnnnnnnnnnnnnnnnnnnnnnnnnnnnnnnnnnnnnnnnnnnnnnnnnnnnnnnnnnnnnnnnnnnnnnnnnnnnnnnnnnnnnnnnnnnnnnnnnnnnnnnnnnnnnnnnnnnnnnnnnnnnnnnnnnnnnnnnnnnnnnnnnnnnnnnnnnnnnnnnnnnnnnnnnnnnnnnnnnnnnnnnnnnnnnnnnnnnnnnnnnnnnnnnnnnnnnnnnnnnnnnnnnnnnnnnnnnnnnnnnnnnnnnnnnnnnnnnnnnnnnnnnnnnnnnnnnnnnnnnnnnnnnnnnnnnnnnnnnnnnnnnnnnnnnnnnnnnnnnnnnnnnnnnnnnnnnnnnnnnnnnnnnnnnnnnnnnnnnnnnnnnnnnnnnnnnnnnnnnnnnnnnnnnnnnnnnnnnnnnnnnnnnnnnnnnnnnnnnnnnnnnnnnnnnnnnnnnnnnnnnnnnnnnnnnnnnnnnnnnnnnnnnnnnnnnnnnnnnnnnnnnnnnnnnnnnnnnnnnnnnnnnnnnnnnnnnnnnnnnnnnnnnnnnnnnnnnnnnnnnnnnnnnnnnnnnnnnnnnnnnnnnnnnnnnnnnnnnnnnnnnnnnnnnnnnnnnnnnnnnnnnnnnnnnnnnnnnnnnnnnnnnnnnnnnnnnnnnnnnnnnnnnnnnnnnnnnnnnnnnnnnnnnnnnnnnnnnnnnnnnnnnnnnnnnnnnnnnnnnnnnnnnnnnnnnnnnnnnnnnnnnnnnnnnnnnnnnnnnnnnnnnnnnnnnnnnnnnnnnnnnnnnnnnnnnnnnnnnnnnnnnnnnnnnnnnnnnnnnnnnnnnnnnnnnnnnnnnnnnnnnnnnnnnnnnnnnnnnnnnnnnnnnnnnnnnnnnnnnnnnnnnnnnnnnnnnnnnnnnnnnnnnnnnnnnnnnnnnnnnnnnnnnnnnnnnnnnnnnnnnnnnnnnnnnnnnnnnnnnnnnnnnnnnnnnnnnnnnnnnnnnnnnnnnnnnnnnnnnnnnnnnnnnnnnnnnnnnnnnnnnnnnnnnnnnnnnnnnnnnnnnnnnnnnnnnnnnnnnnnnnnnnnnnnnnnnnnnnnnnnnnnnnnnnnnnnnnnnnnnnnnnnnnnnnnnnnnnnnnnnnnnnnnnnnnnnnnnnnnnnnnnnnnnnnnnnnnnnnnnnnnnnnnnnnnnnnnnnnnnnnnnnnnnnnnnnnnnnnnnnnnnnnnnnnnnnnnnnnnnnnnnnnnnnnnnnnnnnnnnnnnnnnnnnnnnnnnnnnnnnnnnnnnnnnnnnnnnnnnnnnnnnnnnnnnnnnnnnnnnnnnnnnnnnnnnnnnnnnnnnnnnnnnnnnnnnnnnnnnnnnnnnnnnnnnnnnnnnnnnnnnnnnnnnnnnnnnnnnnnnnnnnnnnnnnnnnnnnnnnnnnnnnnnnnnnnnnnnnnnnnnnnnnnnnnnnnnnnnnnnnnnnnnnnnnnnnnnnnnnnnnnnnnnnnnnnnnnnnnnnnnnnnnnnnnnnnnnnnnnnnnnnnnnnnnnnnnnnnnnnnnnnnnnnnnnnnnnnnnnnnnnnnnnnnnnnnnnnnnnnnnnnnnnnnnnnnnnnnnnnnnnnnnnnnnnnnnnnnnnnnnnnnnnnnnnnnnnnnnnnnnnnnnnnnnnnnnnnnnnnnnnnnnnnnnnnnnnnnnnnnnnnnnnnnnnnnnnnnnnnnnnnnnnnnnnnnnnnnnnnnnnnnnnnnnnnnnnnnnnnnnnnnnnnnnnnnnnnnnnnnnnnnnnnnnnnnnnnnnnnnnnnnnnnnnnnnnnnnnnnnnnnnnnnnnnnnnnnnnnnnnnnnnnnnnnnnnnnnnnnnnnnnnnnnnnnnnnnnnnnnnnnnnnnnnnnnnnnnnnnnnnnnnnnnnnnnnnnnnnnnnnnnnnnnnnnnnnnnnnnnnnnnnnnnnnnnnnnnnnnnnnnnnnnnnnnnnnnnnnnnnnnnnnnnnnnnnnnnnnnnnnnnnnnnnnnnnnnnnnnnnnnnnnnnnnnnnnnnnnnnnnnnnnnnnnnnnnnnnnnnnnnnnnnnnnnnnnnnnnnnnnnnnnnnnnnnnnnnnnnnnnnnnnnnnnnnnnnnnnnnnnnnnnnnnnnnnnnnnnnnnnnnnnnnnnnnnnnnnnnnnnnnnnnnnnnnnnnnnnnnnnnnnnnnnnnnnnnnnnnnnnnnnnnnnnnnnnnnnnnnnnnnnnnnnnnnnnnnnnnnnnnnnnnnnnnnnnnnnnnnnnnnnnnnnnnnnnnnnnnnnnnnnnnnnnnnnnnnnnnnnnnnnnnnnnnnnnnnnnnnnnnnnnnnnnnnnnnnnnnnnnnnnnnnnnnnnnnnnnnnnnnnnnnnnnnnnnnnnnnnnnnnnnnnnnnnnnnnnnnnnnnnnnnnnnnnnnnnnnnnnnnnnnnnnnnnnnnnnnnnnnnnnnnnnnnnnnnnnnnnnnnnnnnnnnnnnnnnnnnnnnnnnnnnnnnnnnnnnnnnnnnnnnnnnnnnnnnnnnnnnnnnnnnnnnnnnnnnnnnnnnnnnnnnnnnnnnnnnnnnnnnnnnnnnnnnnnnnnnnnnnnnnnnnnnnnnnnnnnnnnnnnnnnnnnnnnnnnnnnnnnnnnnnnnnnnnnnnnnnnnnnnnnnnnnnnnnnnnnnnnnnnnnnnnnnnnnnnnnnnnnnnnnnnnnnnnnnnnnnnnnnnnnnnnnnnnnnnnnnnnnnnnnnnnnnnnnnnnnnnnnnnnnnnnnnnnnnnnnnnnnnnnnnnnnnnnnnnnnnnnnnnnnnnnnnnnnnnnnnnnnnnnnnnnnnnnnnnnnnnnnnnnnnnnnnnnnnnnnnnnnnnnnnnnnnnnnnnnnnnnnnnnnnnnnnnnnnnnnnnnnnnnnnnnnnnnnnnnnnnnnnnnnnnnnnnnnnnnnnnnnnnnnnnnnnnnnnnnnnnnnnnnnnnnnnnnnnnnnnnnnnnnnnnnnnnnnnnnnnnnnnnnnnnnnnnnnnnnnnnnnnnnnnnnnnnnnnnnnnnnnnnnnnnnnnnnnnnnnnnnnnnnnnnnnnnnnnnnnnnnnnnnnnnnnnnnnnnnnnnnnnnnnnnnnnnnnnnnnnnnnnnnnnnnnnnnnnnnnnnnnnnnnnnnnnnnnnnnnnnnnnnnnnnnnnnnnnnnnnnnnnnnnnnnnnnnnnnnnnnnnnnnnnnnnnnnnnnnnnnnnnnnnnnnnnnnnnnnnnnnnnnnnnnnnnnnnnnnnnnnnnnnnnnnnnnnnnnnnnnnnnnnnnnnnnnnnnnnnnnnnnnnnnnnnnnnnnnnnnnnnnnnnnnnnnnnnnnnnnnnnnnnnnnnnnnnnnnnnnnnnnnnnnnnnnnnnnnnnnnnnnnnnnnnnnnnnnnnnnnnnnnnnnnnnnnnnnnnnnnnnnnnnnnnnnnnnnnnnnnnnnnnnnnnnnnnnnnnnnnnnnnnnnnnnnnnnnnnnnnnnnnnnnnnnnnnnnnnnnnnnnnnnnnnnnnnnnnnnnnnnnnnnnnnnnnnnnnnnnnnnnnnnnnnnnnnnnnnnnnnnnnnnnnnnnnnnnnnnnnnnnnnnnnnnnnnnnnnnnnnnnnnnnnnnnnnnnnnnnnnnnnnnnnnnnnnnnnnnnnnnnnnnnnnnnnnnnnnnnnnnnnnnnnnnnnnnnnnnnnnnnnnnnnnnnnnnnnnnnnnnnnnnnnnnnnnnnnnnnnnnnnnnnnnnnnnnnnnnnnnnnnnnnnnnnnnnnnnnnnnnnnnnnnnnnnnnnnnnnnnnnnnnnnnnnnnnnnnnnnnnnnnnnnnnnnnnnnnnnnnnnnnnnnnnnnnnnnnnnnnnnnnnnnnnnnnnnnnnnnnnnnnnnnnnnnnnnnnnnnnnnnnnnnnnnnnnnnnnnnnnnnnnnnnnnnnnnnnnnnnnnnnnnnnnnnnnnnnnnnnnnnnnnnnnnnnnnnnnnnnnnnnnnnnnnnnnnnnnnnnnnnnnnnnnnnnnnnnnnnnnnnnnnnnnnnnnnnnnnnnnnnnnnnnnnnnnnnnnnnnnnnnnnnnnnnnnnnnnnnnnnnnnnnnnnnnnnnnnnnnnnnnnnnnnnnnnnnnnnnnnnnnnnnnnnnnnnnnnnnnnnnnnnnnnnnnnnnnnnnnnnnnnnnnnnnnnnnnnnnnnnnnnnnnnnnnnnnnnnnnnnnnnnnnnnnnnnnnnnnnnnnnnnnnnnnnnnnnnnnnnnnnnnnnnnnnnnnnnnnnnnnnnnnnnnnnnnnnnnnnnnnnnnnnnnnnnnnnnnnnnnnnnnnnnnnnnnnnnnnnnnnnnnnnnnnnnnnnnnnnnnnnnnnnnnnnnnnnnnnnnnnnnnnnnnnnnnnnnnnnnnnnnnnnnnnnnnnnnnnnnnnnnnnnnnnnnnnnnnnnnnnnnnnnnnnnnnnnnnnnnnnnnnnnnnnnnnnnnnnnnnnnnnnnnnnnnnnnnnnnnnnnnnnnnnnnnnnnnnnnnnnnnnnnnnnnnnnnnnnnnnnnnnnnnnnnnnnnnnnnnnnnnnnnnnnnnnnnnnnnnnnnnnnnnnnnnnnnnnnnnnnnnnnnnnnnnnnnnnnnnnnnnnnnnnnnnnnnnnnnnnnnnnnnnnnnnnnnnnnnnnnnnnnnnnnnnnnnnnnnnnnnnnnnnnnnnnnnnnnnnnnnnnnnnnnnnnnnnnnnnnnnnnnnnnnnnnnnnnnnnnnnnnnnnnnnnnnnnnnnnnnnnnnnnnnnnnnnnnnnnnnnnnnnnnnnnnnnnnnnnnnnnnnnnnnnnnnnnnnnnnnnnnnnnnnnnnnnnnnnnnnnnnnnnnnnnnnnnnnnnnnnnnnnnnnnnnnnnnnnnnnnnnnnnnnnnnnnnnnnnnnnnnnnnnnnnnnnnnnnnnnnnnnnnnnnnnnnnnnnnnnnnnnnnnnnnnnnnnnnnnnnnnnnnnnnnnnnnnnnnnnnnnnnnnnnnnnnnnnnnnnnnnnnnnnnnnnnnnnnnnnnnnnnnnnnnnnnnnnnnnnnnnnnnnnnnnnnnnnnnnnnnnnnnnnnnnnnnnnnnnnnnnnnnnnnnnnnnnnnnnnnnnnnnnnnnnnnnnnnnnnnnnnnnnnnnnnnnnnnnnnnnnnnnnnnnnnnnnnnnnnnnnnnnnnnnnnnnnnnnnnnnnnnnnnnnnnnnnnnnnnnnnnnnnnnnnnnnnnnnnnnnnnnnnnnnnnnnnnnnnnnnnnnnnnnnnnnnnnnnnnnnnnnnnnnnnnnnnnnnnnnnnnnnnnnnnnnnnnnnnnnnnnnnnnnnnnnnnnnnnnnnnnnnnnnnnnnnnnnnnnnnnnnnnnnnnnnnnnnnnnnnnnnnnnnnnnnnnnnnnnnnnnnnnnnnnnnnnnnnnnnnnnnnnnnnnnnnnnnnnnnnnnnnnnnnnnnnnnnnnnnnnnnnnnnnnnnnnnnnnnnnnnnnnnnnnnnnnnnnnnnnnnnnnnnnnnnnnnnnnnnnnnnnnnnnnnnnnnnnnnnnnnnnnnnnnnnnnnnnnnnnnnnnnnnnnnnnnnnnnnnnnnnnnnnnnnnnnnnnnnnnnnnnnnnnnnnnnnnnnnnnnnnnnnnnnnnnnnnnnnnnnnnnnnnnnnnnnnnnnnnnnnnnnnnnnnnnnnnnnnnnnnnnnnnnnnnnnnnnnnnnnnnnnnnnnnnnnnnnnnnnnnnnnnnnnnnnnnnnnnnnnnnnnnnnnnnnnnnnnnnnnnnnnnnnnnnnnnnnnnnnnnnnnnnnnnnnnnnnnnnnnnnnnnnnnnnnnnnnnnnnnnnnnnnnnnnnnnnnnnnnnnnnnnnnnnnnnnnnnnnnnnnnnnnnnnnnnnnnnnnnnnnnnnnnnnnnnnnnnnnnnnnnnnnnnnnnnnnnnnnnnnnnnnnnnnnnnnnnnnnnnnnnnnnnnnnnnnnnnnnnnnnnnnnnnnnnnnnnnnnnnnnnnnnnnnnnnnnnnnnnnnnnnnnnnnnnnnnnnnnnnnnnnnnnnnnnnnnnnnnnnnnnnnnnnnnnnnnnnnnnnnnnnnnnnnnnnnnnnnnnnnnnnnnnnnnnnnnnnnnnnnnnnnnnnnnnnnnnnnnnnnnnnnnnnnnnnnnnnnnnnnnnnnnnnnnnnnnnnnnnnnnnnnnnnnnnnnnnnnnnnnnnnnnnnnnnnnnnnnnnnnnnnnnnnnnnnnnnnnnnnnnnnnnnnnnnnnnnnnnnnnnnnnnnnnnnnnnnnnnnnnnnnnnnnnnnnnnnnnnnnnnnnnnnnnnnnnnnnnnnnnnnnnnnnnnnnnnnnnnnnnnnnnnnnnnnnnnnnnnnnnnnnnnnnnnnnnnnnnnnnnnnnnnnnnnnnnnnnnnnnnnnnnnnnnnnnnnnnnnnnnnnnnnnnnnnnnnnnnnnnnnnnnnnnnnnnnnnnnnnnnnnnnnnnnnnnnnnnnnnnnnnnnnnnnnnnnnnnnnnnnnnnnnnnnnnnnnnnnnnnnnnnnnnnnnnnnnnnnnnnnnnnnnnnnnnnnnnnnnnnnnnnnnnnnnnnnnnnnnnnnnnnnnnnnnnnnnnnnnnnnnnnnnnnnnnnnnnnnnnnnnnnnnnnnnnnnnnnnnnnnnnnnnnnnnnnnnnnnnnnnnnnnnnnnnnnnnnnnnnnnnnnnnnnnnnnnnnnnnnnnnnnnnnnnnnnnnnnnnnnnnnnnnnnnnnnnnnnnnnnnnnnnnnnnnnnnnnnnnnnnnnnnnnnnnnnnnnnnnnnnnnnnnnnnnnnnnnnnnnnnnnnnnnnnnnnnnnnnnnnnnnnnnnnnnnnnnnnnnnnnnnnnnnnnnnnnnnnnnnnnnnnnnnnnnnnnnnnnnnnnnnnnnnnnnnnnnnnnnnnnnnnnnnnnnnnnnnnnnnnnnnnnnnnnnnnnnnnnnnnnnnnnnnnnnnnnnnnnnnnnnnnnnnnnnnnnnnnnnnnnnnnnnnnnnnnnnnnnnnnnnnnnnnnnnnnnnnnnnnnnnnnnnnnnnnnnnnnnnnnnnnnnnnnnnnnnnnnnnnnnnnnnnnnnnnnnnnnnnnnnnnnnnnnnnnnnnnnnnnnnnnnnnnnnnnnnnnnnnnnnnnnnnnnnnnnnnnnnnnnnnnnnnnnnnnnnnnnnnnnnnnnnnnnnnnnnnnnnnnnnnnnnnnnnnnnnnnnnnnnnnnnnnnnnnnnnnnnnnnnnnnnnnnnnnnnnnnnnnnnnnnnnnnnnnnnnnnnnnnnnnnnnnnnnnnnnnnnnnnnnnnnnnnnnnnnnnnnnnnnnnnnnnnnnnnnnnnnnnnnnnnnnnnnnnnnnnnnnnnnnnnnnnnnnnnnnnnnnnnnnnnnnnnnnnnnnnnnnnnnnnnnnnnnnnnnnnnnnnnnnnnnnnnnnnnnnnnnnnnnnnnnnnnnnnnnnnnnnnnnnnnnnnnnnnnnnnnnnnnnnnnnnnnnnnnnnnnnnnnnnnnnnnnnnnnnnnnnnnnnnnnnnnnnnnnnnnnnnnnnnnnnnnnnnnnnnnnnnnnnnnnnnnnnnnnnnnnnnnnnnnnnnnnnnnnnnnnnnnnnnnnnnnnnnnnnnnnnnnnnnnnnnnnnnnnnnnnnnnnnnnnnnnnnnnnnnnnnnnnnnnnnnnnnnnnnnnnnnnnnnnnnnnnnnnnnnnnnnnnnnnnnnnnnnnnnnnnnnnnnnnnnnnnnnnnnnnnnnnnnnnnnnnnnnnnnnnnnnnnnnnnnnnnnnnnnnnnnnnnnnnnnnnnnnnnnnnnnnnnnnnnnnnnnnnnnnnnnnnnnnnnnnnnnnnnnnnnnnnnnnnnnnnnnnnnnnnnnnnnnnnnnnnnnnnnnnnnnnnnnnnnnnnnnnnnnnnnnnnnnnnnnnnnnnnnnnnnnnnnnnnnnnnnnnnnnnnnnnnnnnnnnnnnnnnnnnnnnnnnnnnnnnnnnnnnnnnnnnnnnnnnnnnnnnnnnnnnnnnnnnnnnnnnnnnnnnnnnnnnnnnnnnnnnnnnnnnnnnnnnnnnnnnnnnnnnnnnnnnnnnnnnnnnnnnnnnnnnnnnnnnnnnnnnnnnnnnnnnnnnnnnnnnnnnnnnnnnnnnnnnnnnnnnnnnnnnnnnnnnnnnnnnnnnnnnnnnnnnnnnnnnnnnnnnnnnnnnnnnnnnnnnnnnnnnnnnnnnnnnnnnnnnnnnnnnnnnnnnnnnnnnnnnnnnnnnnnnnnnnnnnnnnnnnnnnnnnnnnnnnnnnnnnnnnnnnnnnnnnnnnnnnnnnnnnnnnnnnnnnnnnnnnnnnnnnnnnnnnnnnnnnnnnnnnnnnnnnnnnnnnnnnnnnnnnnnnnnnnnnnnnnnnnnnnnnnnnnnnnnnnnnnnnnnnnnnnnnnnnnnnnnnnnnnnnnnnnnnnnnnnnnnnnnnnnnnnnnnnnnnnnnnnnnnnnnnnnnnnnnnnnnnnnnnnnnnnnnnnnnnnnnnnnnnnnnnnnnnnnnnnnnnnnnnnnnnnnnnnnnnnnnnnnnnnnnnnnnnnnnnnnnnnnnnnnnnnnnnnnnnnnnnnnnnnnnnnnnnnnnnnnnnnnnnnnnnnnnnnnnnnnnnnnnnnnnnnnnnnnnnnnnnnnnnnnnnnnnnnnnnnnnnnnnnnnnnnnnnnnnnnnnnnnnnnnnnnnnnnnnnnnnnnnnnnnnnnnnnnnnnnnnnnnnnnnnnnnnnnnnnnnnnnnnnnnnnnnnnnnnnnnnnnnnnnnnnnnnnnnnnnnnnnnnnnnnnnnnnnnnnnnnnnnnnnnnnnnnnnnnnnnnnnnnnnnnnnnnnnnnnnnnnnnnnnnnnnnnnnnnnnnnnnnnnnnnnnnnnnnnnnnnnnnnnnnnnnnnnnnnnnnnnnnnnnnnnnnnnnnnnnnnnnnnnnnnnnnnnnnnnnnnnnnnnnnnnnnnnnnnnnnnnnnnnnnnnnnnnnnnnnnnnnnnnnnnnnnnnnnnnnnnnnnnnnnnnnnnnnnnnnnnnnnnnnnnnnnnnnnnnnnnnnnnnnnnnnnnnnnnnnnnnnnnnnnnnnnnnnnnnnnnnnnnnnnnnnnnnnnnnnnnnnnnnnnnnnnnnnnnnnnnnnnnnnnnnnnnnnnnnnnnnnnnnnnnnnnnnnnnnnnnnnnnnnnnnnnnnnnnnnnnnnnnnnnnnnnnnnnnnnnnnnnnnnnnnnnnnnnnnnnnnnnnnnnnnnnnnnnnnnnnnnnnnnnnnnnnnnnnnnnnnnnnnnnnnnnnnnnnnnnnnnnnnnnnnnnnnnnnnnnnnnnnnnnnnnnnnnnnnnnnnnnnnnnnnnnnnnnnnnnnnnnnnnnnnnnnnnnnnnnnnnnnnnnnnnnnnnnnnnnnnnnnnnnnnnnnnnnnnnnnnnnnnnnnnnnnnnnnnnnnnnnnnnnnnnnnnnnnnnnnnnnnnnnnnnnnnnnnnnnnnnnnnnnnnnnnnnnnnnnnnnnnnnnnnnnnnnnnnnnnnnnnnnnnnnnnnnnnnnnnnnnnnnnnnnnnnnnnnnnnnnnnnnnnnnnnnnnnnnnnnnnnnnnnnnnnnnnnnnnnnnnnnnnnnnnnnnnnnnnnnnnnnnnnnnnnnnnnnnnnnnnnnnnnnnnnnnnnnnnnnnnnnnnnnnnnnnnnnnnnnnnnnnnnnnnnnnnnnnnnnnnnnnnnnnnnnnnnnnnnnnnnnnnnnnnnnnnnnnnnnnnnnnnnnnnnnnnnnnnnnnnnnnnnnnnnnnnnnnnnnnnnnnnnnnnnnnnnnnnnnnnnnnnnnnnnnnnnnnnnnnnnnnnnnnnnnnnnnnnnnnnnnnnnnnnnnnnnnnnnnnnnnnnnnnnnnnnnnnnnnnnnnnnnnnnnnnnnnnnnnnnnnnnnnnnnnnnnnnnnnnnnnnnnnnnnnnnnnnnnnnnnnnnnnnnnnnnnnnnnnnnnnnnnnnnnnnnnnnnnnnnnnnnnnnnnnnnnnnnnnnnnnnnnnnnnnnnnnnnnnnnnnnnnnnnnnnnnnnnnnnnnnnnnnnnnnnnnnnnnnnnnnnnnnnnnnnnnnnnnnnnnnnnnnnnnnnnnnnnnnnnnnnnnnnnnnnnnnnnnnnnnnnnnnnnnnnnnnnnnnnnnnnnnnnnnnnnnnnnnnnnnnnnnnnnnnnnnnnnnnnnnnnnnnnnnnnnnnnnnnnnnnnnnnnnnnnnnnnnnnnnnnnnnnnnnnnnnnnnnnnnnnnnnnnnnnnnnnnnnnnnnnnnnnnnnnnnnnnnnnnnnnnnnnnnnnnnnnnnnnnnnnnnnnnnnnnnnnnnnnnnnnnnnnnnnnnnnnnnnnnnnnnnnnnnnnnnnnnnnnnnnnnnnnnnnnnnnnnnnnnnnnnnnnnnnnnnnnnnnnnnnnnnnnnnnnnnnnnnnnnnnnnnnnnnnnnnnnnnnnnnnnnnnnnnnnnnnnnnnnnnnnnnnnnnnnnnnnnnnnnnnnnnnnnnnnnnnnnnnnnnnnnnnnnnnnnnnnnnnnnnnnnnnnnnnnnnnnnnnnnnnnnnnnnnnnnnnnnnnnnnnnnnnnnnnnnnnnnnnnnnnnnnnnnnnnnnnnnnnnnnnnnnnnnnnnnnnnnnnnnnnnnnnnnnnnnnnnnnnnnnnnnnnnnnnnnnnnnnnnnnnnnnnnnnnnnnnnnnnnnnnnnnnnnnnnnnnnnnnnnnnnnnnnnnnnnnnnnnnnnnnnnnnnnnnnnnnnnnnnnnnnnnnnnnnnnnnnnnnnnnnnnnnnnnnnnnnnnnnnnnnnnnnnnnnnnnnnnnnnnnnnnnnnnnnnnnnnnnnnnnnnnnnnnnnnnnnnnnnnnnnnnnnnnnnnnnnnnnnnnnnnnnnnnnnnnnnnnnnnnnnnnnnnnnnnnnnnnnnnnnnnnnnnnnnnnnnnnnnnnnnnnnnnnnnnnnnnnnnnnnnnnnnnnnnnnnnnnnnnnnnnnnnnnnnnnnnnnnnnnnnnnnnnnnnnnnnnnnnnnnnnnnnnnnnnnnnnnnnnnnnnnnnnnnnnnnnnnnnnnnnnnnnnnnnnnnnnnnnnnnnnnnnnnnnnnnnnnnnnnnnnnnnnnnnnnnnnnnnnnnnnnnnnnnnnnnnnnnnnnnnnnnnnnnnnnnnnnnnnnnnnnnnnnnnnnnnnnnnnnnnnnnnnnnnnnnnnnnnnnnnnnnnnnnnnnnnnnnnnnnnnnnnnnnnnnnnnnnnnnnnnnnnnnnnnnnnnnnnnnnnnnnnnnnnnnnnnnnnnnnnnnnnnnnnnnnnnnnnnnnnnnnnnnnnnnnnnnnnnnnnnnnnnnnnnnnnnnnnnnnnnnnnnnnnnnnnnnnnnnnnnnnnnnnnnnnnnnnnnnnnnnnnnnnnnnnnnnnnnnnnnnnnnnnnnnnnnnnnnnnnnnnnnnnnnnnnnnnnnnnnnnnnnnnnnnnnnnnnnnnnnnnnnnnnnnnnnnnnnnnnnnnnnnnnnnnnnnnnnnnnnnnnnnnnnnnnnnnnnnnnnnnnnnnnnnnnnnnnnnnnnnnnnnnnnnnnnnnnnnnnnnnnnnnnnnnnnnnnnnnnnnnnnnnnnnnnnnnnnnnnnnnnnnnnnnnnnnnnnnnnnnnnnnnnnnnnnnnnnnnnnnnnnnnnnnnnnnnnnnnnnnnnnnnnnnnnnnnnnnnnnnnnnnnnnnnnnnnnnnnnnnnnnnnnnnnnnnnnnnnnnnnnnnnnnnnnnnnnnnnnnnnnnnnnnnnnnnnnnnnnnnnnnnnnnnnnnnnnnnnnnnnnnnnnnnnnnnnnnnnnnnnnnnnnnnnnnnnnnnnnnnnnnnnnnnnnnnnnnnnnnnnnnnnnnnnnnnnnnnnnnnnnnnnnnnnnnnnnnnnnnnnnnnnnnnnnnnnnnnnnnnnnnnnnnnnnnnnnnnnnnnnnnnnnnnnnnnnnnnnnnnnnnnnnnnnnnnnnnnnnnnnnnnnnnnnnnnnnnnnnnnnnnnnnnnnnnnnnnnnnnnnnnnnnnnnnnnnnnnnnnnnnnnnnnnnnnnnnnnnnnnnnnnnnnnnnnnnnnnnnnnnnnnnnnnnnnnnnnnnnnnnnnnnnnnnnnnnnnnnnnnnnnnnnnnnnnnnnnnnnnnnnnnnnnnnnnnnnnnnnnnnnnnnnnnnnnnnnnnnnnnnnnnnnnnnnnnnnnnnnnnnnnnnnnnnnnnnnnnnnnnnnnnnnnnnnnnnnnnnnnnnnnnnnnnnnnnnnnnnnnnnnnnnnnnnnnnnnnnnnnnnnnnnnnnnnnnnnnnnnnnnnnnnnnnnnnnnnnnnnnnnnnnnnnnnnnnnnnnnnnnnnnnnnnnnnnnnnnnnnnnnnnnnnnnnnnnnnnnnnnnnnnnnnnnnnnnnnnnnnnnnnnnnnnnnnnnnnnnnnnnnnnnnnnnnnnnnnnnnnnnnnnnnnnnnnnnnnnnnnnnnnnnnnnnnnnnnnnnnnnnnnnnnnnnnnnnnnnnnnnnnnnnnnnnnnnnnnnnnnnnnnnnnnnnnnnnnnnnnnnnnnnnnnnnnnnnnnnnnnnnnnnnnnnnnnnnnnnnnnnnnnnnnnnnnnnnnnnnnnnnnnnnnnnnnnnnnnnnnnnnnnnnnnnnnnnnnnnnnnnnnnnnnnnnnnnnnnnnnnnnnnnnnnnnnnnnnnnnnnnnnnnnnnnnnnnnnnnnnnnnnnnnnnnnnnnnnnnnnnnnnnnnnnnnnnnnnnnnnnnnnnnnnnnnnnnnnnnnnnnnnnnnnnnnnnnnnnnnnnnnnnnnnnnnnnnnnnnnnnnnnnnnnnnnnnnnnnnnnnnnnnnnnnnnnnnnnnnnnnnnnnnnnnnnnnnnnnnnnnnnnnnnnnnnnnnnnnnnnnnnnnnnnnnnnnnnnnnnnnnnnnnnnnnnnnnnnnnnnnnnnnnnnnnnnnnnnnnnnnnnnnnnnnnnnnnnnnnnnnnnnnnnnnnnnnnnnnnnnnnnnnnnnnnnnnnnnnnnnnnnnnnnnnnnnnnnnnnnnnnnnnnnnnnnnnnnnnnnnnnnnnnnnnnnnnnnnnnnnnnnnnnnnnnnnnnnnnnnnnnnnnnnnnnnnnnnnnnnnnnnnnnnnnnnnnnnnnnnnnnnnnnnnnnnnnnnnnnnnnnnnnnnnnnnnnnnnnnnnnnnnnnnnnnnnnnnnnnnnnnnnnnnnnnnnnnnnnnnnnnnnnnnnnnnnnnnnnnnnnnnnnnnnnnnnnnnnnnnnnnnnnnnnnnnnnnnnnnnnnnnnnnnnnnnnnnnnnnnnnnnnnnnnnnnnnnnnnnnnnnnnnnnnnnnnnnnnnnnnnnnnnnnnnnnnnnnnnnnnnnnnnnnnnnnnnnnnnnnnnnnnnnnnnnnnnnnnnnnnnnnnnnnnnnnnnnnnnnnnnnnnnnnnnnnnnnnnnnnnnnnnnnnnnnnnnnnnnnnnnnnnnnnnnnnnnnnnnnnnnnnnnnnnnnnnnnnnnnnnnnnnnnnnnnnnnnnnnnnnnnnnnnnnnnnnnnnnnnnnnnnnnnnnnnnnnnnnnnnnnnnnnnnnnnnnnnnnnnnnnnnnnnnnnnnnnnnnnnnnnnnnnnnnnnnnnnnnnnnnnnnnnnnnnnnnnnnnnnnnnnnnnnnnnnnnnnnnnnnnnnnnnnnnnnnnnnnnnnnnnnnnnnnnnnnnnnnnnnnnnnnnnnnnnnnnnnnnnnnnnnnnnnnnnnnnnnnnnnnnnnnnnnnnnnnnnnnnnnnnnnnnnnnnnnnnnnnnnnnnnnnnnnnnnnnnnnnnnnnnnnnnnnnnnnnnnnnnnnnnnnnnnnnnnnnnnnnnnnnnnnnnnnnnnnnnnnnnnnnnnnnnnnnnnnnnnnnnnnnnnnnnnnnnnnnnnnnnnnnnnnnnnnnnnnnnnnnnnnnnnnnnnnnnnnnnnnnnnnnnnnnnnnnnnnnnnnnnnnnnnnnnnnnnnnnnnnnnnnnnnnnnnnnnnnnnnnnnnnnnnnnnnnnnnnnnnnnnnnnnnnnnnnnnnnnnnnnnnnnnnnnnnnnnnnnnnnnnnnnnnnnnnnnnnnnnnnnnnnnnnnnnnnnnnnnnnnnnnnnnnnnnnnnnnnnnnnnnnnnnnnnnnnnnnnnnnnnnnnnnnnnnnnnnnnnnnnnnnnnnnnnnnnnnnnnnnnnnnnnnnnnnnnnnnnnnnnnnnnnnnnnnnnnnnnnnnnnnnnnnnnnnnnnnnnnnnnnnnnnnnnnnnnnnnnnnnnnnnnnnnnnnnnnnnnnnnnnnnnnnnnnnnnnnnnnnnnnnnnnnnnnnnnnnnnnnnnnnnnnnnnnnnnnnnnnnnnnnnnnnnnnnnnnnnnnnnnnnnnnnnnnnnnnnnnnnnnnnnnnnnnnnnnnnnnnnnnnnnnnnnnnnnnnnnnnnnnnnnnnnnnnnnnnnnnnnnnnnnnnnnnnnnnnnnnnnnnnnnnnnnnnnnnnnnnnnnnnnnnnnnnnnnnnnnnnnnnnnnnnnnnnnnnnnnnnnnnnnnnnnnnnnnnnnnnnnnnnnnnnnnnnnnnnnnnnnnnnnnnnnnnnnnnnnnnnnnnnnnnnnnnnnnnnnnnnnnnnnnnnnnnnnnnnnnnnnnnnnnnnnnnnnnnnnnnnnnnnnnnnnnnnnnnnnnnnnnnnnnnnnnnnnnnnnnnnnnnnnnnnnnnnnnnnnnnnnnnnnnnnnnnnnnnnnnnnnnnnnnnnnnnnnnnnnnnnnnnnnnnnnnnnnnnnnnnnnnnnnnnnnnnnnnnnnnnnnnnnnnnnnnnnnnnnnnnnnnnnnnnnnnnnnnnnnnnnnnnnnnnnnnnnnnnnnnnnnnnnnnnnnnnnnnnnnnnnnnnnnnnnnnnnnnnnnnnnnnnnnnnnnnnnnnnnnnnnnnnnnnnnnnnnnnnnnnnnnnnnnnnnnnnnnnnnnnnnnnnnnnnnnnnnnnnnnnnnnnnnnnnnnnnnnnnnnnnnnnnnnnnnnnnnnnnnnnnnnnnnnnnnnnnnnnnnnnnnnnnnnnnnnnnnnnnnnnnnnnnnnnnnnnnnnnnnnnnnnnnnnnnnnnnnnnnnnnnnnnnnnnnnnnnnnnnnnnnnnnnnnnnnnnnnnnnnnnnnnnnnnnnnnnnnnnnnnnnnnnnnnnnnnnnnnnnnnnnnnnnnnnnnnnnnnnnnnnnnnnnnnnnnnnnnnnnnnnnnnnnnnnnnnnnnnnnnnnnnnnnnnnnnnnnnnnnnnnnnnnnnnnnnnnnnnnnnnnnnnnnnnnnnnnnnnnnnnnnnnnnnnnnnnnnnnnnnnnnnnnnnnnnnnnnnnnnnnnnnnnnnnnnnnnnnnnnnnnnnnnnnnnnnnnnnnnnnnnnnnnnnnnnnnnnnnnnnnnnnnnnnnnnnnnnnnnnnnnnnnnnnnnnnnnnnnnnnnnnnnnnnnnnnnnnnnnnnnnnnnnnnnnnnnnnnnnnnnnnnnnnnnnnnnnnnnnnnnnnnnnnnnnnnnnnnnnnnnnnnnnnnnnnnnnnnnnnnnnnnnnnnnnnnnnnnnnnnnnnnnnnnnnnnnnnnnnnnnnnnnnnnnnnnnnnnnnnnnnnnnnnnnnnnnnnnnnnnnnnnnnnnnnnnnnnnnnnnnnnnnnnnnnnnnnnnnnnnnnnnnnnnnnnnnnnnnnnnnnnnnnnnnnnnnnnnnnnnnnnnnnnnnnnnnnnnnnnnnnnnnnnnnnnnnnnnnnnnnnnnnnnnnnnnnnnnnnnnnnnnnnnnnnnnnnnnnnnnnnnnnnnnnnnnnnnnnnnnnnnnnnnnnnnnnnnnnnnnnnnnnnnnnnnnnnnnnnnnnnnnnnnnnnnnnnnnnnnnnnnnnnnnnnnnnnnnnnnnnnnnnnnnnnnnnnnnnnnnnnnnnnnnnnnnnnnnnnnnnnnnnnnnnnnnnnnnnnnnnnnnnnnnnnnnnnnnnnnnnnnnnnnnnnnnnnnnnnnnnnnnnnnnnnnnnnnnnnnnnnnnnnnnnnnnnnnnnnnnnnnnnnnnnnnnnnnnnnnnnnnnnnnnnnnnnnnnnnnnnnnnnnnnnnnnnnnnnnnnnnnnnnnnnnnnnnnnnnnnnnnnnnnnnnnnnnnnnnnnnnnnnnnnnnnnnnnnnnnnnnnnnnnnnnnnnnnnnnnnnnnnnnnnnnnnnnnnnnnnnnnnnnnnnnnnnnnnnnnnnnnnnnnnnnnnnnnnnnnnnnnnnnnnnnnnnnnnnnnnnnnnnnnnnnnnnnnnnnnnnnnnnnnnnnnnnnnnnnnnnnnnnnnnnnnnnnnnnnnnnnnnnnnnnnnnnnnnnnnnnnnnnnnnnnnnnnnnnnnnnnnnnnnnnnnnnnnnnnnnnnnnnnnnnnnnnnnnnnnnnnnnnnnnnnnnnnnnnnnnnnnnnnnnnnnnnnnnnnnnnnnnnnnnnnnnnnnnnnnnnnnnnnnnnnnnnnnnnnnnnnnnnnnnnnnnnnnnnnnnnnnnnnnnnnnnnnnnnnnnnnnnnnnnnnnnnnnnnnnnnnnnnnnnnnnnnnnnnnnnnnnnnnnnnnnnnnnnnnnnnnnnnnnnnnnnnnnnnnnnnnnnnnnnnnnnnnnnnnnnnnnnnnnnnnnnnnnnnnnnnnnnnnnnnnnnnnnnnnnnnnnnnnnnnnnnnnnnnnnnnnnnnnnnnnnnnnnnnnnnnnnnnnnnnnnnnnnnnnnnnnnnnnnnnnnnnnnnnnnnnnnnnnnnnnnnnnnnnnnnnnnnnnnnnnnnnnnnnnnnnnnnnnnnnnnnnnnnnnnnnnnnnnnnnnnnnnnnnnnnnnnnnnnnnnnnnnnnnnnnnnnnnnnnnnnnnnnnnnnnnnnnnnnnnnnnnnnnnnnnnnnnnnnnnnnnnnnnnnnnnnnnnnnnnnnnnnnnnnnnnnnnnnnnnnnnnnnnnnnnnnnnnnnnnnnnnnnnnnnnnnnnnnnnnnnnnnnnnnnnnnnnnnnnnnnnnnnnnnnnnnnnnnnnnnnnnnnnnnnnnnnnnnnnnnnnnnnnnnnnnnnnnnnnnnnnnnnnnnnnnnnnnnnnnnnnnnnnnnnnnnnnnnnnnnnnnnnnnnnnnnnnnnnnnnnnnnnnnnnnnnnnnnnnnnnnnnnnnnnnnnnnnnnnnnnnnnnnnnnnnnnnnnnnnnnnnnnnnnnnnnnnnnnnnnnnnnnnnnnnnnnnnnnnnnnnnnnnnnnnnnnnnnnnnnnnnnnnnnnnnnnnnnnnnnnnnnnnnnnnnnnnnnnnnnnnnnnnnnnnnnnnnnnnnnnnnnnnnnnnnnnnnnnnnnnnnnnnnnnnnnnnnnnnnnnnnnnnnnnnnnnnnnnnnnnnnnnnnnnnnnnnnnnnnnnnnnnnnnnnnnnnnnnnnnnnnnnnnnnnnnnnnnnnnnnnnnnnnnnnnnnnnnnnnnnnnnnnnnnnnnnnnnnnnnnnnnnnnnnnnnnnnnnnnnnnnnnnnnnnnnnnnnnnnnnnnnnnnnnnnnnnnnnnnnnnnnnnnnnnnnnnnnnnnnnnnnnnnnnnnnnnnnnnnnnnnnnnnnnnnnnnnnnnnnnnnnnnnnnnnnnnnnnnnnnnnnnnnnnnnnnnnnnnnnnnnnnnnnnnnnnnnnnnnnnnnnnnnnnnnnnnnnnnnnnnnnnnnnnnnnnnnnnnnnnnnnnnnnnnnnnnnnnnnnnnnnnnnnnnnnnnnnnnnnnnnnnnnnnnnnnnnnnnnnnnnnnnnnnnnnnnnnnnnnnnnnnnnnnnnnnnnnnnnnnnnnnnnnnnnnnnnnnnnnnnnnnnnnnnnnnnnnnnnnnnnnnnnnnnnnnnnnnnnnnnnnnnnnnnnnnnnnnnnnnnnnnnnnnnnnnnnnnnnnnnnnnnnnnnnnnnnnnnnnnnnnnnnnnnnnnnnnnnnnnnnnnnnnnnnnnnnnnnnnnnnnnnnnnnnnnnnnnnnnnnnnnnnnnnnnnnnnnnnnnnnnnnnnnnnnnnnnnnnnnnnnnnnnnnnnnnnnnnnnnnnnnnnnnnnnnnnnnnnnnnnnnnnnnnnnnnnnnnnnnnnnnnnnnnnnnnnnnnnnnnnnnnnnnnnnnnnnnnnnnnnnnnnnnnnnnnnnnnnnnnnnnnnnnnnnnnnnnnnnnnnnnnnnnnnnnnnnnnnnnnnnnnnnnnnnnnnnnnnnnnnnnnnnnnnnnnnnnnnnnnnnnnnnnnnnnnnnnnnnnnnnnnnnnnnnnnnnnnnnnnnnnnnnnnnnnnnnnnnnnnnnnnnnnnnnnnnnnnnnnnnnnnnnnnnnnnnnnnnnnnnnnnnnnnnnnnnnnnnnnnnnnnnnnnnnnnnnnnnnnnnnnnnnnnnnnnnnnnnnnnnnnnnnnnnnnnnnnnnnnnnnnnnnnnnnnnnnnnnnnnnnnnnnnnnnnnnnnnnnnnnnnnnnnnnnnnnnnnnnnnnnnnnnnnnnnnnnnnnnnnnnnnnnnnnnnnnnnnnnnnnnnnnnnnnnnnnnnnnnnnnnnnnnnnnnnnnnnnnnnnnnnnnnnnnnnnnnnnnnnnnnnnnnnnnnnnnnnnnnnnnnnnnnnnnnnnnnnnnnnnnnnnnnnnnnnnnnnnnnnnnnnnnnnnnnnnnnnnnnnnnnnnnnnnnnnnnnnnnnnnnnnnnnnnnnnnnnnnnnnnnnnnnnnnnnnnnnnnnnnnnnnnnnnnnnnnnnnnnnnnnnnnnnnnnnnnnnnnnnnnnnnnnnnnnnnnnnnnnnnnnnnnnnnnnnnnnnnnnnnnnnnnnnnnnnnnnnnnnnnnnnnnnnnnnnnnnnnnnnnnnnnnnnnnnnnnnnnnnnnnnnnnnnnnnnnnnnnnnnnnnnnnnnnnnnnnnnnnnnnnnnnnnnnnnnnnnnnnnnnnnnnnnnnnnnnnnnnnnnnnnnnnnnnnnnnnnnnnnnnnnnnnnnnnnnnnnnnnnnnnnnnnnnnnnnnnnnnnnnnnnnnnnnnnnnnnnnnnnnnnnnnnnnnnnnnnnnnnnnnnnnnnnnnnnnnnnnnnnnnnnnnnnnnnnnnnnnnnnnnnnnnnnnnnnnnnnnnnnnnnnnnnnnnnnnnnnnnnnnnnnnnnnnnnnnnnnnnnnnnnnnnnnnnnnnnnnnnnnnnnnnnnnnnnnnnnnnnnnnnnnnnnnnnnnnnnnnnnnnnnnnnnnnnnnnnnnnnnnnnnnnnnnnnnnnnnnnnnnnnnnnnnnnnnnnnnnnnnnnnnnnnnnnnnnnnnnnnnnnnnnnnnnnnnnnnnnnnnnnnnnnnnnnnnnnnnnnnnnnnnnnnnnnnnnnnnnnnnnnnnnnnnnnnnnnnnnnnnnnnnnnnnnnnnnnnnnnnnnnnnnnnnnnnnnnnnnnnnnnnnnnnnnnnnnnnnnnnnnnnnnnnnnnnnnnnnnnnnnnnnnnnnnnnnnnnnnnnnnnnnnnnnnnnnnnnnnnnnnnnnnnnnnnnnnnnnnnnnnnnnnnnnnnnnnnnnnnnnnnnnnnnnnnnnnnnnnnnnnnnnnnnnnnnnnnnnnnnnnnnnnnnnnnnnnnnnnnnnnnnnnnnnnnnnnnnnnnnnnnnnnnnnnnnnnnnnnnnnnnnnnnnnnnnnnnnnnnnnnnnnnnnnnnnnnnnnnnnnnnnnnnnnnnnnnnnnnnnnnnnnnnnnnnnnnnnnnnnnnnnnnnnnnnnnnnnnnnnnnnnnnnnnnnnnnnnnnnnnnnnnnnnnnnnnnnnnnnnnnnnnnnnnnnnnnnnnnnnnnnnnnnnnnnnnnnnnnnnnnnnnnnnnnnnnnnnnnnnnnnnnnnnnnnnnnnnnnnnnnnnnnnnnnnnnnnnnnnnnnnnnnnnnnnnnnnnnnnnnnnnnnnnnnnnnnnnnnnnnnnnnnnnnnnnnnnnnnnnnnnnnnnnnnnnnnnnnnnnnnnnnnnnnnnnnnnnnnnnnnnnnnnnnnnnnnnnnnnnnnnnnnnnnnnnnnnnnnnnnnnnnnnnnnnnnnnnnnnnnnnnnnnnnnnnnnnnnnnnnnnnnnnnnnnnnnnnnnnnnnnnnnnnnnnnnnnnnnnnnnnnnnnnnnnnnnnnnnnnnnnnnnnnnnnnnnnnnnnnnnnnnnnnnnnnnnnnnnnnnnnnnnnnnnnnnnnnnnnnnnnnnnnnnnnnnnnnnnnnnnnnnnnnnnnnnnnnnnnnnnnnnnnnnnnnnnnnnnnnnnnnnnnnnnnnnnnnnnnnnnnnnnnnnnnnnnnnnnnnnnnnnnnnnnnnnnnnnnnnnnnnnnnnnnnnnnnnnnnnnnnnnnnnnnnnnnnnnnnnnnnnnnnnnnnnnnnnnnnnnnnnnnnnnnnnnnnnnnnnnnnnnnnnnnnnnnnnnnnnnnnnnnnnnnnnnnnnnnnnnnnnnnnnnnnnnnnnnnnnnnnnnnnnnnnnnnnnnnnnnnnnnnnnnnnnnnnnnnnnnnnnnnnnnnnnnnnnnnnnnnnnnnnnnnnnnnnnnnnnnnnnnnnnnnnnnnnnnnnnnnnnnnnnnnnnnnnnnnnnnnnnnnnnnnnnnnnnnnnnnnnnnnnnnnnnnnnnnnnnnnnnnnnnnnnnnnnnnnnnnnnnnnnnnnnnnnnnnnnnnnnnnnnnnnnnnnnnnnnnnnnnnnnnnnnnnnnnnnnnnnnnnnnnnnnnnnnnnnnnnnnnnnnnnnnnnnnnnnnnnnnnnnnnnnnnnnnnnnnnnnnnnnnnnnnnnnnnnnnnnnnnnnnnnnnnnnnnnnnnnnnnnnnnnnnnnnnnnnnnnnnnnnnnnnnnnnnnnnnnnnnnnnnnnnnnnnnnnnnnnnnnnnnnnnnnnnnnnnnnnnnnnnnnnnnnnnnnnnnnnnnnnnnnnnnnnnnnnnnnnnnnnnnnnnnnnnnnnnnnnnnnnnnnnnnnnnnnnnnnnnnnnnnnnnnnnnnnnnnnnnnnnnnnnnnnnnnnnnnnnnnnnnnnnnnnnnnnnnnnnnnnnnnnnnnnnnnnnnnnnnnnnnnnnnnnnnnnnnnnnnnnnnnnnnnnnnnnnnnnnnnnnnnnnnnnnnnnnnnnnnnnnnnnnnnnnnnnnnnnnnnnnnnnnnnnnnnnnnnnnnnnnnnnnnnnnnnnnnnnnnnnnnnnnnnnnnnnnnnnnnnnnnnnnnnnnnnnnnnnnnnnnnnnnnnnnnnnnnnnnnnnnnnnnnnnnnnnnnnnnnnnnnnnnnnnnnnnnnnnnnnnnnnnnnnnnnnnnnnnnnnnnnnnnnnnnnnnnnnnnnnnnnnnnnnnnnnnnnnnnnnnnnnnnnnnnnnnnnnnnnnnnnnnnnnnnnnnnnnnnnnnnnnnnnnnnnnnnnnnnnnnnnnnnnnnnnnnnnnnnnnnnnnnnnnnnnnnnnnnnnnnnnnnnnnnnnnnnnnnnnnnnnnnnnnnnnnnnnnnnnnnnnnnnnnnnnnnnnnnnnnnnnnnnnnnnnnnnnnnnnnnnnnnnnnnnnnnnnnnnnnnnnnnnnnnnnnnnnnnnnnnnnnnnnnnnnnnnnnnnnnnnnnnnnnnnnnnnnnnnnnnnnnnnnnnnnnnnnnnnnnnnnnnnnnnnnnnnnnnnnnnnnnnnnnnnnnnnnnnnnnnnnnnnnnnnnnnnnnnnnnnnnnnnnnnnnnnnnnnnnnnnnnnnnnnnnnnnnnnnnnnnnnnnnnnnnnnnnnnnnnnnnnnnnnnnnnnnnnnnnnnnnnnnnnnnnnnnnnnnnnnnnnnnnnnnnnnnnnnnnnnnnnnnnnnnnnnnnnnnnnnnnnnnnnnnnnnnnnnnnnnnnnnnnnnnnnnnnnnnnnnnnnnnnnnnnnnnnnnnnnnnnnnnnnnnnnnnnnnnnnnnnnnnnnnnnnnnnnnnnnnnnnnnnnnnnnnnnnnnnnnnnnnnnnnnnnnnnnnnnnnnnnnnnnnnnnnnnnnnnnnnnnnnnnnnnnnnnnnnnnnnnnnnnnnnnnnnnnnnnnnnnnnnnnnnnnnnnnnnnnnnnnnnnnnnnnnnnnnnnnnnnnnnnnnnnnnnnnnnnnnnnnnnnnnnnnnnnnnnnnnnnnnnnnnnnnnnnnnnnnnnnnnnnnnnnnnnnnnnnnnnnnnnnnnnnnnnnnnnnnnnnnnnnnnnnnnnnnnnnnnnnnnnnnnnnnnnnnnnnnnnnnnnnnnnnnnnnnnnnnnnnnnnnnnnnnnnnnnnnnnnnnnnnnnnnnnnnnnnnnnnnnnnnnnnnnnnnnnnnnnnnnnnnnnnnnnnnnnnnnnnnnnnnnnnnnnnnnnnnnnnnnnnnnnnnnnnnnnnnnnnnnnnnnnnnnnnnnnnnnnnnnnnnnnnnnnnnnnnnnnnnnnnnnnnnnnnnnnnnnnnnnnnnnnnnnnnnnnnnnnnnnnnnnnnnnnnnnnnnnnnnnnnnnnnnnnnnnnnnnnnnnnnnnnnnnnnnnnnnnnnnnnnnnnnnnnnnnnnnnnnnnnnnnnnnnnnnnnnnnnnnnnnnnnnnnnnnnnnnnnnnnnnnnnnnnnnnnnnnnnnnnnnnnnnnnnnnnnnnnnnnnnnnnnnnnnnnnnnnnnnnnnnnnnnnnnnnnnnnnnnnnnnnnnnnnnnnnnnnnnnnnnnnnnnnnnnnnnnnnnnnnnnnnnnnnnnnnnnnnnnnnnnnnnnnnnnnnnnnnnnnnnnnnnnnnnnnnnnnnnnnnnnnnnnnnnnnnnnnnnnnnnnnnnnnnnnnnnnnnnnnnnnnnnnnnnnnnnnnnnnnnnnnnnnnnnnnnnnnnnnnnnnnnnnnnnnnnnnnnnnnnnnnnnnnnnnnnnnnnnnnnnnnnnnnnnnnnnnnnnnnnnnnnnnnnnnnnnnnnnnnnnnnnnnnnnnnnnnnnnnnnnnnnnnnnnnnnnnnnnnnnnnnnnnnnnnnnnnnnnnnnnnnnnnnnnnnnnnnnnnnnnnnnnnnnnnnnnnnnnnnnnnnnnnnnnnnnnnnnnnnnnnnnnnnnnnnnnnnnnnnnnnnnnnnnnnnnnnnnnnnnnnnnnnnnnnnnnnnnnnnnnnnnnnnnnnnnnnnnnnnnnnnnnnnnnnnnnnnnnnnnnnnnnnnnnnnnnnnnnnnnnnnnnnnnnnnnnnnnnnnnnnnnnnnnnnnnnnnnnnnnnnnnnnnnnnnnnnnnnnnnnnnnnnnnnnnnnnnnnnnnnnnnnnnnnnnnnnnnnnnnnnnnnnnnnnnnnnnnnnnnnnnnnnnnnnnnnnnnnnnnnnnnnnnnnnnnnnnnnnnnnnnnnnnnnnnnnnnnnnnnnnnnnnnnnnnnnnnnnnnnnnnnnnnnnnnnnnnnnnnnnnnnnnnnnnnnnnnnnnnnnnnnnnnnnnnnnnnnnnnnnnnnnnnnnnnnnnnnnnnnnnnnnnnnnnnnnnnnnnnnnnnnnnnnnnnnnnnnnnnnnnnnnnnnnnnnnnnnnnnnnnnnnnnnnnnnnnnnnnnnnnnnnnnnnnnnnnnnnnnnnnnnnnnnnnnnnnnnnnnnnnnnnnnnnnnnnnnnnnnnnnnnnnnnnnnnnnnnnnnnnnnnnnnnnnnnnnnnnnnnnnnnnnnnnnnnnnnnnnnnnnnnnnnnnnnnnnnnnnnnnnnnnnnnnnnnnnnnnnnnnnnnnnnnnnnnnnnnnnnnnnnnnnnnnnnnnnnnnnnnnnnnnnnnnnnnnnnnnnnnnnnnnnnnnnnnnnnnnnnnnnnnnnnnnnnnnnnnnnnnnnnnnnnnnnnnnnnnnnnnnnnnnnnnnnnnnnnnnnnnnnnnnnnnnnnnnnnnnnnnnnnnnnnnnnnnnnnnnnnnnnnnnnnnnnnnnnnnnnnnnnnnnnnnnnnnnnnnnnnnnnnnnnnnnnnnnnnnnnnnnnnnnnnnnnnnnnnnnnnnnnnnnnnnnnnnnnnnnnnnnnnnnnnnnnnnnnnnnnnnnnnnnnnnnnnnnnnnnnnnnnnnnnnnnnnnnnnnnnnnnnnnnnnnnnnnnnnnnnnnnnnnnnnnnnnnnnnnnnnnnnnnnnnnnnnnnnnnnnnnnnnnnnnnnnnnnnnnnnnnnnnnnnnnnnnnnnnnnnnnnnnnnnnnnnnnnnnnnnnnnnnnnnnnnnnnnnnnnnnnnnnnnnnnnnnnnnnnnnnnnnnnnnnnnnnnnnnnnnnnnnnnnnnnnnnnnnnnnnnnnnnnnnnnnnnnnnnnnnnnnnnnnnnnnnnnnnnnnnnnnnnnnnnnnnnnnnnnnnnnnnnnnnnnnnnnnnnnnnnnnnnnnnnnnnnnnnnnnnnnnnnnnnnnnnnnnnnnnnnnnnnnnnnnnnnnnnnnnnnnnnnnnnnnnnnnnnnnnnnnnnnnnnnnnnnnnnnnnnnnnnnnnnnnnnnnnnnnnnnnnnnnnnnnnnnnnnnnnnnnnnnnnnnnnnnnnnnnnnnnnnnnnnnnnnnnnnnnnnnnnnnnnnnnnnnnnnnnnnnnnnnnnnnnnnnnnnnnnnnnnnnnnnnnnnnnnnnnnnnnnnnnnnnnnnnnnnnnnnnnnnnnnnnnnnnnnnnnnnnnnnnnnnnnnnnnnnnnnnnnnnnnnnnnnnnnnnnnnnnnnnnnnnnnnnnnnnnnnnnnnnnnnnnnnnnnnnnnnnnnnnnnnnnnnnnnnnnnnnnnnnnnnnnnnnnnnnnnnnnnnnnnnnnnnnnnnnnnnnnnnnnnnnnnnnnnnnnnnnnnnnnnnnnnnnnnnnnnnnnnnnnnnnnnnnnnnnnnnnnnnnnnnnnnnnnnnnnnnnnnnnnnnnnnnnnnnnnnnnnnnnnnnnnnnnnnnnnnnnnnnnnnnnnnnnnnnnnnnnnnnnnnnnnnnnnnnnnnnnnnnnnnnnnnnnnnnnnnnnnnnnnnnnnnnnnnnnnnnnnnnnnnnnnnnnnnnnnnnnnnnnnnnnnnnnnnnnnnnnnnnnnnnnnnnnnnnnnnnnnnnnnnnnnnnnnnnnnnnnnnnnnnnnnnnnnnnnnnnnnnnnnnnnnnnnnnnnnnnnnnnnnnnnnnnnnnnnnnnnnnnnnnnnnnnnnnnnnnnnnnnnnnnnnnnnnnnnnnnnnnnnnnnnnnnnnnnnnnnnnnnnnnnnnnnnnnnnnnnnnnnnnnnnnnnnnnnnnnnnnnnnnnnnnnnnnnnnnnnnnnnnnnnnnnnnnnnnnnnnnnnnnnnnnnnnnnnnnnnnnnnnnnnnnnnnnnnnnnnnnnnnnnnnnnnnnnnnnnnnnnnnnnnnnnnnnnnnnnnnnnnnnnnnnnnnnnnnnnnnnnnnnnnnnnnnnnnnnnnnnnnnnnnnnnnnnnnnnnnnnnnnnnnnnnnnnnnnnnnnnnnnnnnnnnnnnnnnnnnnnnnnnnnnnnnnnnnnnnnnnnnnnnnnnnnnnnnnnnnnnnnnnnnnnnnnnnnnnnnnnnnnnnnnnnnnnnnnnnnnnnnnnnnnnnnnnnnnnnnnnnnnnnnnnnnnnnnnnnnnnnnnnnnnnnnnnnnnnnnnnnnnnnnnnnnnnnnnnnnnnnnnnnnnnnnnnnnnnnnnnnnnnnnnnnnnnnnnnnnnnnnnnnnnnnnnnnnnnnnnnnnnnnnnnnnnnnnnnnnnnnnnnnnnnnnnnnnnnnnnnnnnnnnnnnnnnnnnnnnnnnnnnnnnnnnnnnnnnnnnnnnnnnnnnnnnnnnnnnnnnnnnnnnnnnnnnnnnnnnnnnnnnnnnnnnnnnnnnnnnnnnnnnnnnnnnnnnnnnnnnnnnnnnnnnnnnnnnnnnnnnnnnnnnnnnnnnnnnnnnnnnnnnnnnnnnnnnnnnnnnnnnnnnnnnnnnnnnnnnnnnnnnnnnnnnnnnnnnnnnnnnnnnnnnnnnnnnnnnnnnnnnnnnnnnnnnnnnnnnnnnnnnnnnnnnnnnnnnnnnnnnnnnnnnnnnnnnnnnnnnnnnnnnnnnnnnnnnnnnnnnnnnnnnnnnnnnnnnnnnnnnnnnnnnnnnnnnnnnnnnnnnnnnnnnnnnnnnnnnnnnnnnnnnnnnnnnnnnnnnnnnnnnnnnnnnnnnnnnnnnnnnnnnnnnnnnnnnnnnnnnnnnnnnnnnnnnnnnnnnnnnnnnnnnnnnnnnnnnnnnnnnnnnnnnnnnnnnnnnnnnnnnnnnnnnnnnnnnnnnnnnnnnnnnnnnnnnnnnnnnnnnnnnnnnnnnnnnnnnnnnnnnnnnnnnnnnnnnnnnnnnnnnnnnnnnnnnnnnnnnnnnnnnnnnnnnnnnnnnnnnnnnnnnnnnnnnnnnnnnnnnnnnnnnnnnnnnnnnnnnnnnnnnnnnnnnnnnnnnnnnnnnnnnnnnnnnnnnnnnnnnnnnnnnnnnnnnnnnnnnnnnnnnnnnnnnnnnnnnnnnnnnnnnnnnnnnnnnnnnnnnnnnnnnnnnnnnnnnnnnnnnnnnnnnnnnnnnnnnnnnnnnnnnnnnnnnnnnnnnnnnnnnnnnnnnnnnnnnnnnnnnnnnnnnnnnnnnnnnnnnnnnnnnnnnnnnnnnnnnnnnnnnnnnnnnnnnnnnnnnnnnnnnnnnnnnnnnnnnnnnnnnnnnnnnnnnnnnnnnnnnnnnnnnnnnnnnnnnnnnnnnnnnnnnnnnnnnnnnnnnnnnnnnnnnnnnnnnnnnnnnnnnnnnnnnnnnnnnnnnnnnnnnnnnnnnnnnnnnnnnnnnnnnnnnnnnnnnnnnnnnnnnnnnnnnnnnnnnnnnnnnnnnnnnnnnnnnnnnnnnnnnnnnnnnnnnnnnnnnnnnnnnnnnnnnnnnnnnnnnnnnnnnnnnnnnnnnnnnnnnnnnnnnnnnnnnnnnnnnnnnnnnnnnnnnnnnnnnnnnnnnnnnnnnnnnnnnnnnnnnnnnnnnnnnnnnnnnnnnnnnnnnnnnnnnnnnnnnnnnnnnnnnnnnnnnnnnnnnnnnnnnnnnnnnnnnnnnnnnnnnnnnnnnnnnnnnnnnnnnnnnnnnnnnnnnnnnnnnnnnnnnnnnnnnnnnnnnnnnnnnnnnnnnnnnnnnnnnnnnnnnnnnnnnnnnnnnnnnnnnnnnnnnnnnnnnnnnnnnnnnnnnnnnnnnnnnnnnnnnnnnnnnnnnnnnnnnnnnnnnnnnnnnnnnnnnnnnnnnnnnnnnnnnnnnnnnnnnnnnnnnnnnnnnnnnnnnnnnnnnnnnnnnnnnnnnnnnnnnnnnnnnnnnnnnnnnnnnnnnnnnnnnnnnnnnnnnnnnnnnnnnnnnnnnnnnnnnnnnnnnnnnnnnnnnnnnnnnnnnnnnnnnnnnnnnnnnnnnnnnnnnnnnnnnnnnnnnnnnnnnnnnnnnnnnnnnnnnnnnnnnnnnnnnnnnnnnnnnnnnnnnnnnnnnnnnnnnnnnnnnnnnnnnnnnnnnnnnnnnnnnnnnnnnnnnnnnnnnnnnnnnnnnnnnnnnnnnnnnnnnnnnnnnnnnnnnnnnnnnnnnnnnnnnnnnnnnnnnnnnnnnnnnnnnnnnnnnnnnnnnnnnnnnnnnnnnnnnnnnnnnnnnnnnnnnnnnnnnnnnnnnnnnnnnnnnnnnnnnnnnnnnnnnnnnnnnnnnnnnnnnnnnnnnnnnnnnnnnnnnnnnnnnnnnnnnnnnnnnnnnnnnnnnnnnnnnnnnnnnnnnnnnnnnnnnnnnnnnnnnnnnnnnnnnnnnnnnnnnnnnnnnnnnnnnnnnnnnnnnnnnnnnnnnnnnnnnnnnnnnnnnnnnnnnnnnnnnnnnnnnnnnnnnnnnnnnnnnnnnnnnnnnnnnnnnnnnnnnnnnnnnnnnnnnnnnnnnnnnnnnnnnnnnnnnnnnnnnnnnnnnnnnnnnnnnnnnnnnnnnnnnnnnnnnnnnnnnnnnnnnnnnnnnnnnnnnnnnnnnnnnnnnnnnnnnnnnnnnnnnnnnnnnnnnnnnnnnnnnnnnnnnnnnnnnnnnnnnnnnnnnnnnnnnnnnnnnnnnnnnnnnnnnnnnnnnnnnnnnnnnnnnnnnnnnnnnnnnnnnnnnnnnnnnnnnnnnnnnnnnnnnnnnnnnnnnnnnnnnnnnnnnnnnnnnnnnnnnnnnnnnnnnnnnnnnnnnnnnnnnnnnnnnnnnnnnnnnnnnnnnnnnnnnnnnnnnnnnnnnnnnnnnnnnnnnnnnnnnnnnnnnnnnnnnnnnnnnnnnnnnnnnnnnnnnnnnnnnnnnnnnnnnnnnnnnnnnnnnnnnnnnnnnnnnnnnnnnnnnnnnnnnnnnnnnnnnnnnnnnnnnnnnnnnnnnnnnnnnnnnnnnnnnnnnnnnnnnnnnnnnnnnnnnnnnnnnnnnnnnnnnnnnnnnnnnnnnnnnnnnnnnnnnnnnnnnnnnnnnnnnnnnnnnnnnnnnnnnnnnnnnnnnnnnnnnnnnnnnnnnnnnnnnnnnnnnnnnnnnnnnnnnnnnnnnnnnnnnnnnnnnnnnnnnnnnnnnnnnnnnnnnnnnnnnnnnnnnnnnnnnnnnnnnnnnnnnnnnnnnnnnnnnnnnnnnnnnnnnnnnnnnnnnnnnnnnnnnnnnnnnnnnnnnnnnnnnnnnnnnnnnnnnnnnnnnnnnnnnnnnnnnnnnnnnnnnnnnnnnnnnnnnnnnnnnnnnnnnnnnnnnnnnnnnnnnnnnnnnnnnnnnnnnnnnnnnnnnnnnnnnnnnnnnnnnnnnnnnnnnnnnnnnnnnnnnnnnnnnnnnnnnnnnnnnnnnnnnnnnnnnnnnnnnnnnnnnnnnnnnnnnnnnnnnnnnnnnnnnnnnnnnnnnnnnnnnnnnnnnnnnnnnnnnnnnnnnnnnnnnnnnnnnnnnnnnnnnnnnnnnnnnnnnnnnnnnnnnnnnnnnnnnnnnnnnnnnnnnnnnnnnnnnnnnnnnnnnnnnnnnnnnnnnnnnnnnnnnnnnnnnnnnnnnnnnnnnnnnnnnnnnnnnnnnnnnnnnnnnnnnnnnnnnnnnnnnnnnnnnnnnnnnnnnnnnnnnnnnnnnnnnnnnnnnnnnnnnnnnnnnnnnnnnnnnnnnnnnnnnnnnnnnnnnnnnnnnnnnnnnnnnnnnnnnnnnnnnnnnnnnnnnnnnnnnnnnnnnnnnnnnnnnnnnnnnnnnnnnnnnnnnnnnnnnnnnnnnnnnnnnnnnnnnnnnnnnnnnnnnnnnnnnnnnnnnnnnnnnnnnnnnnnnnnnnnnnnnnnnnnnnnnnnnnnnnnnnnnnnnnnnnnnnnnnnnnnnnnnnnnnnnnnnnnnnnnnnnnnnnnnnnnnnnnnnnnnnnnnnnnnnnnnnnnnnnnnnnnnnnnnnnnnnnnnnnnnnnnnnnnnnnnnnnnnnnnnnnnnnnnnnnnnnnnnnnnnnnnnnnnnnnnnnnnnnnnnnnnnnnnnnnnnnnnnnnnnnnnnnnnnnnnnnnnnnnnnnnnnnnnnnnnnnnnnnnnnnnnnnnnnnnnnnnnnnnnnnnnnnnnnnnnnnnnnnnnnnnnnnnnnnnnnnnnnnnnnnnnnnnnnnnnnnnnnnnnnnnnnnnnnnnnnnnnnnnnnnnnnnnnnnnnnnnnnnnnnnnnnnnnnnnnnnnnnnnnnnnnnnnnnnnnnnnnnnnnnnnnnnnnnnnnnnnnnnnnnnnnnnnnnnnnnnnnnnnnnnnnnnnnnnnnnnnnnnnnnnnnnnnnnnnnnnnnnnnnnnnnnnnnnnnnnnnnnnnnnnnnnnnnnnnnnnnnnnnnnnnnnnnnnnnnnnnnnnnnnnnnnnnnnnnnnnnnnnnnnnnnnnnnnnnnnnnnnnnnnnnnnnnnnnnnnnnnnnnnnnnnnnnnnnnnnnnnnnnnnnnnnnnnnnnnnnnnnnnnnnnnnnnnnnnnnnnnnnnnnnnnnnnnnnnnnnnnnnnnnnnnnnnnnnnnnnnnnnnnnnnnnnnnnnnnnnnnnnnnnnnnnnnnnnnnnnnnnnnnnnnnnnnnnnnnnnnnnnnnnnnnnnnnnnnnnnnnnnnnnnnnnnnnnnnnnnnnnnnnnnnnnnnnnnnnnnnnnnnnnnnnnnnnnnnnnnnnnnnnnnnnnnnnnnnnnnnnnnnnnnnnnnnnnnnnnnnnnnnnnnnnnnnnnnnnnnnnnnnnnnnnnnnnnnnnnnnnnnnnnnnnnnnnnnnnnnnnnnnnnnnnnnnnnnnnnnnnnnnnnnnnnnnnnnnnnnnnnnnnnnnnnnnnnnnnnnnnnnnnnnnnnnnnnnnnnnnnnnnnnnnnnnnnnnnnnnnnnnnnnnnnnnnnnnnnnnnnnnnnnnnnnnnnnnnnnnnnnnnnnnnnnnnnnnnnnnnnnnnnnnnnnnnnnnnnnnnnnnnnnnnnnnnnnnnnnnnnnnnnnnnnnnnnnnnnnnnnnnnnnnnnnnnnnnnnnnnnnnnnnnnnnnnnnnnnnnnnnnnnnnnnnnnnnnnnnnnnnnnnnnnnnnnnnnnnnnnnnnnnnnnnnnnnnnnnnnnnnnnnnnnnnnnnnnnnnnnnnnnnnnnnnnnnnnnnnnnnnnnnnnnnnnnnnnnnnnnnnnnnnnnnnnnnnnnnnnnnnnnnnnnnnnnnnnnnnnnnnnnnnnnnnnnnnnnnnnnnnnnnnnnnnnnnnnnnnnnnnnnnnnnnnnnnnnnnnnnnnnnnnnnnnnnnnnnnnnnnnnnnnnnnnnnnnnnnnnnnnnnnnnnnnnnnnnnnnnnnnnnnnnnnnnnnnnnnnnnnnnnnnnnnnnnnnnnnnnnnnnnnnnnnnnnnnnnnnnnnnnnnnnnnnnnnnnnnnnnnnnnnnnnnnnnnnnnnnnnnnnnnnnnnnnnnnnnnnnnnnnnnnnnnnnnnnnnnnnnnnnnnnnnnnnnnnnnnnnnnnnnnnnnnnnnnnnnnnnnnnnnnnnnnnnnnnnnnnnnnnnnnnnnnnnnnnnnnnnnnnnnnnnnnnnnnnnnnnnnnnnnnnnnnnnnnnnnnnnnnnnnnnnnnnnnnnnnnnnnnnnnnnnnnnnnnnnnnnnnnnnnnnnnnnnnnnnnnnnnnnnnnnnnnnnnnnnnnnnnnnnnnnnnnnnnnnnnnnnnnnnnnnnnnnnnnnnnnnnnnnnnnnnnnnnnnnnnnnnnnnnnnnnnnnnnnnnnnnnnnnnnnnnnnnnnnnnnnnnnnnnnnnnnnnnnnnnnnnnnnnnnnnnnnnnnnnnnnnnnnnnnnnnnnnnnnnnnnnnnnnnnnnnnnnnnnnnnnnnnnnnnnnnnnnnnnnnnnnnnnnnnnnnnnnnnnnnnnnnnnnnnnnnnnnnnnnnnnnnnnnnnnnnnnnnnnnnnnnnnnnnnnnnnnnnnnnnnnnnnnnnnnnnnnnnnnnnnnnnnnnnnnnnnnnnnnnnnnnnnnnnnnnnnnnnnnnnnnnnnnnnnnnnnnnnnnnnnnnnnnnnnnnnnnnnnnnnnnnnnnnnnnnnnnnnnnnnnnnnnnnnnnnnnnnnnnnnnnnnnnnnnnnnnnnnnnnnnnnnnnnnnnnnnnnnnnnnnnnnnnnnnnnnnnnnnnnnnnnnnnnnnnnnnnnnnnnnnnnnnnnnnnnnnnnnnnnnnnnnnnnnnnnnnnnnnnnnnnnnnnnnnnnnnnnnnnnnnnnnnnnnnnnnnnnnnnnnnnnnnnnnnnnnnnnnnnnnnnnnnnnnnnnnnnnnnnnnnnnnnnnnnnnnnnnnnnnnnnnnnnnnnnnnnnnnnnnnnnnnnnnnnnnnnnnnnnnnnnnnnnnnnnnnnnnnnnnnnnnnnnnnnnnnnnnnnnnnnnnnnnnnnnnnnnnnnnnnnnnnnnnnnnnnnnnnnnnnnnnnnnnnnnnnnnnnnnnnnnnnnnnnnnnnnnnnnnnnnnnnnnnnnnnnnnnnnnnnnnnnnnnnnnnnnnnnnnnnnnnnnnnnnnnnnnnnnnnnnnnnnnnnnnnnnnnnnnnnnnnnnnnnnnnnnnnnnnnnnnnnnnnnnnnnnnnnnnnnnnnnnnnnnnnnnnnnnnnnnnnnnnnnnnnnnnnnnnnnnnnnnnnnnnnnnnnnnnnnnnnnnnnnnnnnnnnnnnnnnnnnnnnnnnnnnnnnnnnnnnnnnnnnnnnnnnnnnnnnnnnnnnnnnnnnnnnnnnnnnnnnnnnnnnnnnnnnnnnnnnnnnnnnnnnnnnnnnnnnnnnnnnnnnnnnnnnnnnnnnnnnnnnnnnnnnnnnnnnnnnnnnnnnnnnnnnnnnnnnnnnnnnnnnnnnnnnnnnnnnnnnnnnnnnnnnnnnnnnnnnnnnnnnnnnnnnnnnnnnnnnnnnnnnnnnnnnnnnnnnnnnnnnnnnnnnnnnnnnnnnnnnnnnnnnnnnnnnnnnnnnnnnnnnnnnnnnnnnnnnnnnnnnnnnnnnnnnnnnnnnnnnnnnnnnnnnnnnnnnnnnnnnnnnnnnnnnnnnnnnnnnnnnnnnnnnnnnnnnnnnnnnnnnnnnnnnnnnnnnnnnnnnnnnnnnnnnnnnnnnnnnnnnnnnnnnnnnnnnnnnnnnnnnnnnnnnnnnnnnnnnnnnnnnnnnnnnnnnnnnnnnnnnnnnnnnnnnnnnnnnnnnnnnnnnnnnnnnnnnnnnnnnnnnnnnnnnnnnnnnnnnnnnnnnnnnnnnnnnnnnnnnnnnnnnnnnnnnnnnnnnnnnnnnnnnnnnnnnnnnnnnnnnnnnnnnnnnnnnnnnnnnnnnnnnnnnnnnnnnnnnnnnnnnnnnnnnnnnnnnnnnnnnnnnnnnnnnnnnnnnnnnnnnnnnnnnnnnnnnnnnnnnnnnnnnnnnnnnnnnnnnnnnnnnnnnnnnnnnnnnnnnnnnnnnnnnnnnnnnnnnnnnnnnnnnnnnnnnnnnnnnnnnnnnnnnnnnnnnnnnnnnnnnnnnnnnnnnnnnnnnnnnnnnnnnnnnnnnnnnnnnnnnnnnnnnnnnnnnnnnnnnnnnnnnnnnnnnnnnnnnnnnnnnnnnnnnnnnnnnnnnnnnnnnnnnnnnnnnnnnnnnnnnnnnnnnnnnnnnnnnnnnnnnnnnnnnnnnnnnnnnnnnnnnnnnnnnnnnnnnnnnnnnnnnnnnnnnnnnnnnnnnnnnnnnnnnnnnnnnnnnnnnnnnnnnnnnnnnnnnnnnnnnnnnnnnnnnnnnnnnnnnnnnnnnnnnnnnnnnnnnnnnnnnnnnnnnnnnnnnnnnnnnnnnnnnnnnnnnnnnnnnnnnnnnnnnnnnnnnnnnnnnnnnnnnnnnnnnnnnnnnnnnnnnnnnnnnnnnnnnnnnnnnnnnnnnnnnnnnnnnnnnnnnnnnnnnnnnnnnnnnnnnnnnnnnnnnnnnnnnnnnnnnnnnnnnnnnnnnnnnnnnnnnnnnnnnnnnnnnnnnnnnnnnnnnnnnnnnnnnnnnnnnnnnnnnnnnnnnnnnnnnnnnnnnnnnnnnnnnnnnnnnnnnnnnnnnnnnnnnnnnnnnnnnnnnnnnnnnnnnnnnnnnnnnnnnnnnnnnnnnnnnnnnnnnnnnnnnnnnnnnnnnnnnnnnnnnnnnnnnnnnnnnnnnnnnnnnnnnnnnnnnnnnnnnnnnnnnnnnnnnnnnnnnnnnnnnnnnnnnnnnnnnnnnnnnnnnnnnnnnnnnnnnnnnnnnnnnnnnnnnnnnnnnnnnnnnnnnnnnnnnnnnnnnnnnnnnnnnnnnnnnnnnnnnnnnnnnnnnnnnnnnnnnnnnnnnnnnnnnnnnnnnnnnnnnnnnnnnnnnnnnnnnnnnnnnnnnnnnnnnnnnnnnnnnnnnnnnnnnnnnnnnnnnnnnnnnnnnnnnnnnnnnnnnnnnnnnnnnnnnnnnnnnnnnnnnnnnnnnnnnnnnnnnnnnnnnnnnnnnnnnnnnnnnnnnnnnnnnnnnnnnnnnnnnnnnnnnnnnnnnnnnnnnnnnnnnnnnnnnnnnnnnnnnnnnnnnnnnnnnnnnnnnnnnnnnnnnnnnnnnnnnnnnnnnnnnnnnnnnnnnnnnnnnnnnnnnnnnnnnnnnnnnnnnnnnnnnnnnnnnnnnnnnnnnnnnnnnnnnnnnnnnnnnnnnnnnnnnnnnnnnnnnnnnnnnnnnnnnnnnnnnnnnnnnnnnnnnnnnnnnnnnnnnnnnnnnnnnnnnnnnnnnnnnnnnnnnnnnnnnnnnnnnnnnnnnnnnnnnnnnnnnnnnnnnnnnnnnnnnnnnnnnnnnnnnnnnnnnnnnnnnnnnnnnnnnnnnnnnnnnnnnnnnnnnnnnnnnnnnnnnnnnnnnnnnnnnnnnnnnnnnnnnnnnnnnnnnnnnnnnnnnnnnnnnnnnnnnnnnnnnnnnnnnnnnnnnnnnnnnnnnnnnnnnnnnnnnnnnnnnnnnnnnnnnnnnnnnnnnnnnnnnnnnnnnnnnnnnnnnnnnnnnnnnnnnnnnnnnnnnnnnnnnnnnnnnnnnnnnnnnnnnnnnnnnnnnnnnnnnnnnnnnnnnnnnnnnnnnnnnnnnnnnnnnnnnnnnnnnnnnnnnnnnnnnnnnnnnnnnnnnnnnnnnnnnnnnnnnnnnnnnnnnnnnnnnnnnnnnnnnnnnnnnnnnnnnnnnnnnnnnnnnnnnnnnnnnnnnnnnnnnnnnnnnnnnnnnnnnnnnnnnnnnnnnnnnnnnnnnnnnnnnnnnnnnnnnnnnnnnnnnnnnnnnnnnnnnnnnnnnnnnnnnnnnnnnnnnnnnnnnnnnnnnnnnnnnnnnnnnnnnnnnnnnnnnnnnnnnnnnnnnnnnnnnnnnnnnnnnnnnnnnnnnnnnnnnnnnnnnnnnnnnnnnnnnnnnnnnnnnnnnnnnnnnnnnnnnnnnnnnnnnnnnnnnnnnnnnnnnnnnnnnnnnnnnnnnnnnnnnnnnnnnnnnnnnnnnnnnnnnnnnnnnnnnnnnnnnnnnnnnnnnnnnnnnnnnnnnnnnnnnnnnnnnnnnnnnnnnnnnnnnnnnnnnnnnnnnnnnnnnnnnnnnnnnnnnnnnnnnnnnnnnnnnnnnnnnnnnnnnnnnnnnnnnnnnnnnnnnnnnnnnnnnnnnnnnnnnnnnnnnnnnnnnnnnnnnnnnnnnnnnnnnnnnnnnnnnnnnnnnnnnnnnnnnnnnnnnnnnnnnnnnnnnnnnnnnnnnnnnnnnnnnnnnnnnnnnnnnnnnnnnnnnnnnnnnnnnnnnnnnnnnnnnnnnnnnnnnnnnnnnnnnnnnnnnnnnnnnnnnnnnnnnnnnnnnnnnnnnnnnnnnnnnnnnnnnnnnnnnnnnnnnnnnnnnnnnnnnnnnnnnnnnnnnnnnnnnnnnnnnnnnnnnnnnnnnnnnnnnnnnnnnnnnnnnnnnnnnnnnnnnnnnnnnnnnnnnnnnnnnnnnnnnnnnnnnnnnnnnnnnnnnnnnnnnnnnnnnnnnnnnnnnnnnnnnnnnnnnnnnnnnnnnnnnnnnnnnnnnnnnnnnnnnnnnnnnnnnnnnnnnnnnnnnnnnnnnnnnnnnnnnnnnnnnnnnnnnnnnnnnnnnnnnnnnnnnnnnnnnnnnnnnnnnnnnnnnnnnnnnnnnnnnnnnnnnnnnnnnnnnnnnnnnnnnnnnnnnnnnnnnnnnnnnnnnnnnnnnnnnnnnnnnnnnnnnnnnnnnnnnnnnnnnnnnnnnnnnnnnnnnnnnnnnnnnnnnnnnnnnnnnnnnnnnnnnnnnnnnnnnnnnnnnnnnnnnnnnnnnnnnnnnnnnnnnnnnnnnnnnnnnnnnnnnnnnnnnnnnnnnnnnnnnnnnnnnnnnnnnnnnnnnnnnnnnnnnnnnnnnnnnnnnnnnnnnnnnnnnnnnnnnnnnnnnnnnnnnnnnnnnnnnnnnnnnnnnnnnnnnnnnnnnnnnnnnnnnnnnnnnnnnnnnnnnnnnnnnnnnnnnnnnnnnnnnnnnnnnnnnnnnnnnnnnnnnnnnnnnnnnnnnnnnnnnnnnnnnnnnnnnnnnnnnnnnnnnnnnnnnnnnnnnnnnnnnnnnnnnnnnnnnnnnnnnnnnnnnnnnnnnnnnnnnnnnnnnnnnnnnnnnnnnnnnnnnnnnnnnnnnnnnnnnnnnnnnnnnnnnnnnnnnnnnnnnnnnnnnnnnnnnnnnnnnnnnnnnnnnnnnnnnnnnnnnnnnnnnnnnnnnnnnnnnnnnnnnnnnnnnnnnnnnnnnnnnnnnnnnnnnnnnnnnnnnnnnnnnnnnnnnnnnnnnnnnnnnnnnnnnnnnnnnnnnnnnnnnnnnnnnnnnnnnnnnnnnnnnnnnnnnnnnnnnnnnnnnnnnnnnnnnnnnnnnnnnnnnnnnnnnnnnnnnnnnnnnnnnnnnnnnnnnnnnnnnnnnnnnnnnnnnnnnnnnnnnnnnnnnnnnnnnnnnnnnnnnnnnnnnnnnnnnnnnnnnnnnnnnnnnnnnnnnnnnnnnnnnnnnnnnnnnnnnnnnnnnnnnnnnnnnnnnnnnnnnnnnnnnnnnnnnnnnnnnnnnnnnnnnnnnnnnnnnnnnnnnnnnnnnnnnnnnnnnnnnnnnnnnnnnnnnnnnnnnnnnnnnnnnnnnnnnnnnnnnnnnnnnnnnnnnnnnnnnnnnnnnnnnnnnnnnnnnnnnnnnnnnnnnnnnnnnnnnnnnnnnnnnnnnnnnnnnnnnnnnnnnnnnnnnnnnnnnnnnnnnnnnnnnnnnnnnnnnnnnnnnnnnnnnnnnnnnnnnnnnnnnnnnnnnnnnnnnnnnnnnnnnnnnnnnnnnnnnnnnnnnnnnnnnnnnnnnnnnnnnnnnnnnnnnnnnnnnnnnnnnnnnnnnnnnnnnnnnnnnnnnnnnnnnnnnnnnnnnnnnnnnnnnnnnnnnnnnnnnnnnnnnnnnnnnnnnnnnnnnnnnnnnnnnnnnnnnnnnnnnnnnnnnnnnnnnnnnnnnnnnnnnnnnnnnnnnnnnnnnnnnnnnnnnnnnnnnnnnnnnnnnnnnnnnnnnnnnnnnnnnnnnnnnnnnnnnnnnnnnnnnnnnnnnnnnnnnnnnnnnnnnnnnnnnnnnnnnnnnnnnnnnnnnnnnnnnnnnnnnnnnnnnnnnnnnnnnnnnnnnnnnnnnnnnnnnnnnnnnnnnnnnnnnnnnnnnnnnnnnnnnnnnnnnnnnnnnnnnnnnnnnnnnnnnnnnnnnnnnnnnnnnnnnnnnnnnnnnnnnnnnnnnnnnnnnnnnnnnnnnnnnnnnnnnnnnnnnnnnnnnnnnnnnnnnnnnnnnnnnnnnnnnnnnnnnnnnnnnnnnnnnnnnnnnnnnnnnnnnnnnnnnnnnnnnnnnnnnnnnnnnnnnnnnnnnnnnnnnnnnnnnnnnnnnnnnnnnnnnnnnnnnnnnnnnnnnnnnnnnnnnnnnnnnnnnnnnnnnnnnnnnnnnnnnnnnnnnnnnnnnnnnnnnnnnnnnnnnnnnnnnnnnnnnnnnnnnnnnnnnnnnnnnnnnnnnnnnnnnnnnnnnnnnnnnnnnnnnnnnnnnnnnnnnnnnnnnnnnnnnnnnnnnnnnnnnnnnnnnnnnnnnnnnnnnnnnnnnnnnnnnnnnnnnnnnnnnnnnnnnnnnnnnnnnnnnnnnnnnnnnnnnnnnnnnnnnnnnnnnnnnnnnnnnnnnnnnnnnnnnnnnnnnnnnnnnnnnnnnnnnnnnnnnnnnnnnnnnnnnnnnnnnnnnnnnnnnnnnnnnnnnnnnnnnnnnnnnnnnnnnnnnnnnnnnnnnnnnnnnnnnnnnnnnnnnnnnnnnnnnnnnnnnnnnnnnnnnnnnnnnnnnnnnnnnnnnnnnnnnnnnnnnnnnnnnnnnnnnnnnnnnnnnnnnnnnnnnnnnnnnnnnnnnnnnnnnnnnnnnnnnnnnnnnnnnnnnnnnnnnnnnnnnnnnnnnnnnnnnnnnnnnnnnnnnnnnnnnnnnnnnnnnnnnnnnnnnnnnnnnnnnnnnnnnnnnnnnnnnnnnnnnnnnnnnnnnnnnnnnnnnnnnnnnnnnnnnnnnnnnnnnnnnnnnnnnnnnnnnnnnnnnnnnnnnnnnnnnnnnnnnnnnnnnnnnnnnnnnnnnnnnnnnnnnnnnnnnnnnnnnnnnnnnnnnnnnnnnnnnnnnnnnnnnnnnnnnnnnnnnnnnnnnnnnnnnnnnnnnnnnnnnnnnnnnnnnnnnnnnnnnnnnnnnnnnnnnnnnnnnnnnnnnnnnnnnnnnnnnnnnnnnnnnnnnnnnnnnnnnnnnnnnnnnnnnnnnnnnnnnnnnnnnnnnnnnnnnnnnnnnnnnnnnnnnnnnnnnnnnnnnnnnnnnnnnnnnnnnnnnnnnnnnnnnnnnnnnnnnnnnnnnnnnnnnnnnnnnnnnnnnnnnnnnnnnnnnnnnnnnnnnnnnnnnnnnnnnnnnnnnnnnnnnnnnnnnnnnnnnnnnnnnnnnnnnnnnnnnnnnnnnnnnnnnnnnnnnnnnnnnnnnnnnnnnnnnnnnnnnnnnnnnnnnnnnnnnnnnnnnnnnnnnnnnnnnnnnnnnnnnnnnnnnnnnnnnnnnnnnnnnnnnnnnnnnnnnnnnnnnnnnnnnnnnnnnnnnnnnnnnnnnnnnnnnnnnnnnnnnnnnnnnnnnnnnnnnnnnnnnnnnnnnnnnnnnnnnnnnnnnnnnnnnnnnnnnnnnnnnnnnnnnnnnnnnnnnnnnnnnnnnnnnnnnnnnnnnnnnnnnnnnnnnnnnnnnnnnnnnnnnnnnnnnnnnnnnnnnnnnnnnnnnnnnnnnnnnnnnnnnnnnnnnnnnnnnnnnnnnnnnnnnnnnnnnnnnnnnnnnnnnnnnnnnnnnnnnnnnnnnnnnnnnnnnnnnnnnnnnnnnnnnnnnnnnnnnnnnnnnnnnnnnnnnnnnnnnnnnnnnnnnnnnnnnnnnnnnnnnnnnnnnnnnnnnnnnnnnnnnnnnnnnnnnnnnnnnnnnnnnnnnnnnnnnnnnnnnnnnnnnnnnnnnnnnnnnnnnnnnnnnnnnnnnnnnnnnnnnnnnnnnnnnnnnnnnnnnnnnnnnnnnnnnnnnnnnnnnnnnnnnnnnnnnnnnnnnnnnnnnnnnnnnnnnnnnnnnnnnnnnnnnnnnnnnnnnnnnnnnnnnnnnnnnnnnnnnnnnnnnnnnnnnnnnnnnnnnnnnnnnnnnnnnnnnnnnnnnnnnnnnnnnnnnnnnnnnnnnnnnnnnnnnnnnnnnnnnnnnnnnnnnnnnnnnnnnnnnnnnnnnnnnnnnnnnnnnnnnnnnnnnnnnnnnnnnnnnnnnnnnnnnnnnnnnnnnnnnnnnnnnnnnnnnnnnnnnnnnnnnnnnnnnnnnnnnnnnnnnnnnnnnnnnnnnnnnnnnnnnnnnnnnnnnnnnnnnnnnnnnnnnnnnnnnnnnnnnnnnnnnnnnnnnnnnnnnnnnnnnnnnnnnnnnnnnnnnnnnnnnnnnnnnnnnnnnnnnnnnnnnnnnnnnnnnnnnnnnnnnnnnnnnnnnnnnnnnnnnnnnnnnnnnnnnnnnnnnnnnnnnnnnnnnnnnnnnnnnnnnnnnnnnnnnnnnnnnnnnnnnnnnnnnnnnnnnnnnnnnnnnnnnnnnnnnnnnnnnnnnnnnnnnnnnnnnnnnnnnnnnnnnnnnnnnnnnnnnnnnnnnnnnnnnnnnnnnnnnnnnnnnnnnnnnnnnnnnnnnnnnnnnnnnnnnnnnnnnnnnnnnnnnnnnnnnnnnnnnnnnnnnnnnnnnnnnnnnnnnnnnnnnnnnnnnnnnnnnnnnnnnnnnnnnnnnnnnnnnnnnnnnnnnnnnnnnnnnnnnnnnnnnnnnnnnnnnnnnnnnnnnnnnnnnnnnnnnnnnnnnnnnnnnnnnnnnnnnnnnnnnnnnnnnnnnnnnnnnnnnnnnnnnnnnnnnnnnnnnnnnnnnnnnnnnnnnnnnnnnnnnnnnnnnnnnnnnnnnnnnnnnnnnnnnnnnnnnnnnnnnnnnnnnnnnnnnnnnnnnnnnnnnnnnnnnnnnnnnnnnnnnnnnnnnnnnnnnnnnnnnnnnnnnnnnnnnnnnnnnnnnnnnnnnnnnnnnnnnnnnnnnnnnnnnnnnnnnnnnnnnnnnnnnnnnnnnnnnnnnnnnnnnnnnnnnnnnnnnnnnnnnnnnnnnnnnnnnnnnnnnnnnnnnnnnnnnnnnnnnnnnnnnnnnnnnnnnnnnnnnnnnnnnnnnnnnnnnnnnnnnnnnnnnnnnnnnnnnnnnnnnnnnnnnnnnnnnnnnnnnnnnnnnnnnnnnnnnnnnnnnnnnnnnnnnnnnnnnnnnnnnnnnnnnnnnnnnnnnnnnnnnnnnnnnnnnnnnnnnnnnnnnnnnnnnnnnnnnnnnnnnnnnnnnnnnnnnnnnnnnnnnnnnnnnnnnnnnnnnnnnnnnnnnnnnnnnnnnnnnnnnnnnnnnnnnnnnnnnnnnnnnnnnnnnnnnnnnnnnnnnnnnnnnnnnnnnnnnnnnnnnnnnnnnnnnnnnnnnnnnnnnnnnnnnnnnnnnnnnnnnnnnnnnnnnnnnnnnnnnnnnnnnnnnnnnnnnnnnnnnnnnnnnnnnnnnnnnnnnnnnnnnnnnnnnnnnnnnnnnnnnnnnnnnnnnnnnnnnnnnnnnnnnnnnnnnnnnnnnnnnnnnnnnnnnnnnnnnnnnnnnnnnnnnnnnnnnnnnnnnnnnnnnnnnnnnnnnnnnnnnnnnnnnnnnnnnnnnnnnnnnnnnnnnnnnnnnnnnnnnnnnnnnnnnnnnnnnnnnnnnnnnnnnnnnnnnnnnnnnnnnnnnnnnnnnnnnnnnnnnnnnnnnnnnnnnnnnnnnnnnnnnnnnnnnnnnnnnnnnnnnnnnnnnnnnnnnnnnnnnnnnnnnnnnnnnnnnnnnnnnnnnnnnnnnnnnnnnnnnnnnnnnnnnnnnnnnnnnnnnnnnnnnnnnnnnnnnnnnnnnnnnnnnnnnnnnnnnnnnnnnnnnnnnnnnnnnnnnnnnnnnnnnnnnnnnnnnnnnnnnnnnnnnnnnnnnnnnnnnnnnnnnnnnnnnnnnnnnnnnnnnnnnnnnnnnnnnnnnnnnnnnnnnnnnnnnnnnnnnnnnnnnnnnnnnnnnnnnnnnnnnnnnnnnnnnnnnnnnnnnnnnnnnnnnnnnnnnnnnnnnnnnnnnnnnnnnnnnnnnnnnnnnnnnnnnnnnnnnnnnnnnnnnnnnnnnnnnnnnnnnnnnnnnnnnnnnnnnnnnnnnnnnnnnnnnnnnnnnnnnnnnnnnnnnnnnnnnnnnnnnnnnnnnnnnnnnnnnnnnnnnnnnnnnnnnnnnnnnnnnnnnnnnnnnnnnnnnnnnnnnnnnnnnnnnnnnnnnnnnnnnnnnnnnnnnnnnnnnnnnnnnnnnnnnnnnnnnnnnnnnnnnnnnnnnnnnnnnnnnnnnnnnnnnnnnnnnnnnnnnnnnnnnnnnnnnnnnnnnnnnnnnnnnnnnnnnnnnnnnnnnnnnnnnnnnnnnnnnnnnnnnnnnnnnnnnnnnnnnnnnnnnnnnnnnnnnnnnnnnnnnnnnnnnnnnnnnnnnnnnnnnnnnnnnnnnnnnnnnnnnnnnnnnnnnnnnnnnnnnnnnnnnnnnnnnnnnnnnnnnnnnnnnnnnnnnnnnnnnnnnnnnnnnnnnnnnnnnnnnnnnnnnnnnnnnnnnnnnnnnnnnnnnnnnnnnnnnnnnnnnnnnnnnnnnnnnnnnnnnnnnnnnnnnnnnnnnnnnnnnnnnnnnnnnnnnnnnnnnnnnnnnnnnnnnnnnnnnnnnnnnnnnnnnnnnnnnnnnnnnnnnnnnnnnnnnnnnnnnnnnnnnnnnnnnnnnnnnnnnnnnnnnnnnnnnnnnnnnnnnnnnnnnnnnnnnnnnnnnnnnnnnnnnnnnnnnnnnnnnnnnnnnnnnnnnnnnnnnnnnnnnnnnnnnnnnnnnnnnnnnnnnnnnnnnnnnnnnnnnnnnnnnnnnnnnnnnnnnnnnnnnnnnnnnnnnnnnnnnnnnnnnnnnnnnnnnnnnnnnnnnnnnnnnnnnnnnnnnnnnnnnnnnnnnnnnnnnnnnnnnnnnnntttgccgccccgctggatcacttggacggtggaatgataacccatgcttggcctccccgccggaagtgcggtcagaggctaatatatcatagctgtatagctaagacaagaaaatttcttaatttttcgattttcttgattttttcacagcttctttttgtcgggatgtatgcgccacagggacgatatattgttggggtgggttctacgacatgaacatctggagccccaagaagcgagacgagaaattgaatcacaggcgcgacaatcccgtcaaacgagtgctggtcaagcacccgggcgactggccgtggtcgcgctgcggcgggaggttctatttctggaatgatggttcgatcttgagcatggacaagaggctatgaaggtgtcgacatgccgaggggcgcatacatcccgacaaaaacccgtcgggacgtatgcgccacccgcgaaatcgatcgcaagattccctccgaatcggaacgccgcggaggcatcaaagcttctgcgcttagtcaacggcgcgccttgcagcctgtgaagtgtgggctaagcggacgcgataaccgttgtcgtggtcttcgggccttgcctttgccgcgtcccgggtgtataccttcgccatgattgtcctgtggtagctacgcagcggacggtccggtccccccggggcgcgacgggcctgccacccgcctcttgcccaggcaaggaggaagccgtggagtacaacctgctcgaagaaaagtggattcccgttctgtggaaagatgggcacagcggtcgcgtgggcattagtgaggcccttaggcaagcaggccggattcgccaaatcgcggccagcaacccaatggaccgcctggccatcctgcgtttcctgcttgcgttgctctattggtgcaaagggaatcccccggacgacaagaactcgatttcttcgtttccctctgattggttcaagaaactcgatgacaacaaagactgtttcaaccttcagggcgatgggaagcggttttaccaacgcaagcctaaccgacttgagaagaagctgtccgtcaactatctgatgcaagaagtgccgaccggcacaaacttctggcacttccggcatgggacagatttcagaaacggcttatgtccggcatgctgcgcaatgggcttgttgcgccttccgctctttgctacgtcggccgggcgcggcaagcccccgggcgtcaatcaaaaaccgccgatctacatcgtgccgatgggcgactgcctttccgaaaccctgcgcctctcatggcggaagacgtcggagatgaacctgggcacgcccacatgggaaaatccggacataagcctccctcaacacggcaatgttccattattgataggattaacgtgggtaccgcggcgcgtctggttagacactccggagacaccagagtccaactgcatcgcctgcgggcgcagggaggctctgatacgtcaatgtgtctttgcgggtattgggagcacaaagacaggcgaaggcagtctggcacgaatctggaacgacccgcacaccatcagcgaaggcgacgagattgtgaagcctttcagcgcgcttggcccggccgacgctgcggctgggaagtggacgaaggtcgtggcgggaatcctgtgcggggaaaagccgaaggggaacagtaagttgtgggtcgtcagctttgcgacagtgcagaacgacaaatacctggaagcagccgagcgggagattcaattcttggccgcgctcgacgacgtgaaggttcaggcgagtttgcaagaaatccaggcgtggcagaaggaaggctggaagctcgttggcagagccaaaccgcgagagacttcacgaaacagaggacaccttgaaattctctccgcagtcgccgctgttcgtccccaagccgaggcaacggtttccggaaaaatcgacgagatgatcgcagaaggcggtaaggcatgggaagaggcggcccaggaatatcgtccgttgatggccgccgtcgccaaatcgctttccccgggctacacaaccgcttccctccggaggcgacaagaaattgccgctgtaaagccggacatgcggccaaagagaaacaacaaagacgaagggggggacaagtgactccaacggagcagtacgtcgaagttctgactcgactgaaacccggtgagctcgggctcttgcgcaaccatgccgggcaagggctcgacgaatcggtagagggctttgaccttttcgcaggcctttggtggccgctgcgggcgcaaacccaacgggcgcctcgccgtgaggtggcctggcttgtcgccaaactctacgccctccggcccctcgagcattcaccccgcgagaccctcgctcgccagctcgggcgatcccggccgggcgagaaaacagcgcggcagcgtttcgagcaacgcttcgacaggatgctcacgctgccgcttgctgaaatcgaacccgccctacagtgggcaatcgacctcatagcttccaagcacctcgaactcgactgggtgcggctgacgaacgatctttccatctgggaacgcgaatccacccggctcaaatgggccgaggaatttttgaactgtccaagaggaggagagtcatgttgatccagattcacgccattcagaatcacagcccggccaacctgaaccgggatgacctgggcgcgcccaagacttgcttttttggcggagtcttgcgctcccgtatttccagccagtgccttaagcgcagcatccgcatgagtgaggagttcagacaattgctgggcggagttcgcacccgccagttggcgaaagagattgcggaaaaggtgacgggcaaagacgtcaggaagcgagcggagaacattctcaaagcctgcgggctggagcctaagaaagcaaaaaaacaggaaggagaagacgaacaggaaagtgctgagaggagcaagatgctggtttacaccacccaagaggcgattacacgcatggccgaactcctccagcagggcgacggaaaaacggacgaggccttggcagcggagttcggcaagctcatcagtgaatccgtcgccgtgccggacatggcgctgagcggcaggatgcttgaaacgggagtcctcaaagacacgacggttgaggcatcgcttcaagtcgcccatgccatttccacccatgaggcccggcccgaggtggactactatgtcgccgccgatgatgtccccggcgaggacgcgggcgcaggttacgtggatgaagccatgttcggttcggcatgtttctacaagtatttctccattcattgggaaacgctggtcaaaaacctgaagcccttcgggacgaatcacgaaaaactggcggcccataccgtcggcgccttcattcgcgccgcggccttggccaaccccacgggaaaacaaaatagttttgccgcgcacaaccctcctgacgggatgttggtggaagtcagaaacactcccatcagctacgccaacgccttcgccaaaccggcggctcctcagggcgaacgggacatcatctcgcagagcgtggcgcagcttgcccattatgtgaacgacatagatacgggatacggcaagccgacgaagcggttctggttctctccaaatctccgctatccgttgacggctaccaccacggagagcgaagacggaaaacagaaacagcgtgaggtcccgcttgccgacaaagatgttaagtctcttgacgaactgatagcggctgtactcaaggaaatcggttacgactggcaggaggccaagaaagtggtcctgaatccggaggtgccccatgagcgcaaagacgctgctacttcggcttgaaggtcctcttcaggcatggggcgatcagcaatccaagttcgtcattcggcgcacggccgaggcgccgaccaagtccggcgtcatcgggatgctttgcgcggcattgggcgtttcccggccagaggcccgcgaaggctggcttccaaggctggcccggctgcgcatgggcgtacgcgtcgatgcgccaggggtccgctggtgggattatcacacggtgggtgcggggatgccgatgcgtaccgccgaggggggaaccaagtccggagccatgctcacccgccgcgaatacctttgcgacgcctcgtttctcgtcgctcttcagggcgaaccggacctcattgaggaactggaggcggcaatcaaagcgcccaagtggacactctacctcggcagaaagtgctgccccccttgccgccctctgctggagcatccgggaggtgaattccccgacttgctttctgccctcgaatcggtcccctggcgtcggcggctgaaggacgatccccagccgcgacccgtcgattgcctgcttgattgggaacccaccaacgagcagcccgaggcgcccgatgatgcgctcgtctggtacgacgtgccgttgacattcgagccgccgtcgcaccaaccccgattcgtcatccgcaggcagttgcgcgtcggagcggacggcgacgtaacacttgcggtgcagccaccgcagagcgacacgccaccgcctccgcgcccaagagcggattacacgaacacagagtacaaaaaccgacgcaaggagcggctcgacgacgactatcacttgtgcgttttttgcaagtctcccgccagcaccgtgcagcacatcacgtaccgccgcgcgggcggcggcgaactccgggacgatttgcgctccctctgccgcctctgccacgacgccgtgaccatgatcgagtacgggctcggaatgggcttggaccgcatcaaccccgaagagccccgttggcgcgacaagatcatcgagaagcgggaagagattatcaggttccgctctctggagactcgccgcagacgccttgccgctgaggaggtggaatagccatgtacctctcctgcctcttgattgacgtcggcaccaaccccgaccgccccaggcccgggcggctctggctgcgaaacctccatcacgtccaccagcgcctttgcatggcgtttccatccaaagaccgaatatcccacgatccccacttcctcaagcctttcaaacccgcggactttgccaacaaccaggtccatgtaagacgtgacggcgactccggctttctcttccgcatcgacccgcaaccgggcgggcgggtcgtgatcctcgtccagtctaactctgccgtaaagcctgactggggctacgccttccacaacgcccgttttcttctgaatcctctagccgctccccctcaggtgcaggaattcgacccccgctttgagaagggtcagcggcttcgcttccgtatccgcgccaatctgagtaagaagataaaaaccagcacagagggcgttgatcttacgaggacgcgagaggggacagataagcggggccgcccgaaggcccaaggcaaacgcgtggcgctgacctgggacaaggaccagaaccgcgacgatgtgatacgaaaatggttcgccggcaagggcggccaaggtggattccaagtggaaactttccgggtcttgcagatcgggtggggcgcaggagaccgatccgacccgaggccgacgggcggccgcatgaaatttcgctcggcgttattggaggggacgcttacggttgaggacgcggacagcttcagagaaaccatcgtgggcggcgttgggcacggcaaagccttcggcttcggcctgctttccgtggcgccgctctcgctgtagcggcggtctccgaccgccggtacgtcgatcggagatcgacgctacaatcccttgtcgatcggggatccgtgcaacatttcttgagcggagatcgagccaatatgaaattcaaaccccgcttgcggcgactggactggctctatacgggcagcccaatctactatctcacgctgtgtacgcaggaccgcaaacgctcgttggcaaatcctgcgattcaccgggaattcacgagattctccgaacgggcgagcgattttcttgtttgggtcgggttcttcatgatcatgcctgatcacatccatcttttcgccggcttttgtcgtgagtccccacctttagggaaatggatcaaggcgctgcgcggggatttatccaaagtcctccgggaagatgagggcgagggcacacattgggagaaagactttttcgatcacgtcctgagatcgcaagaatcctatcgggagaaatatgaatatgtccggcagaatccggtccgggccggtttagtcaagcgcccggaagattggccgtaccagggtgagatccatcgcctggttttgtagcggcggtctccgaccgccgtaacgtcgatcggagatcgactacaaccccggtcgatcggagatcgacgctacaaccgccgtcgatcggagatcgacgctacagcacgggctggaggctctgtgagaattcaagatctccacgttctacccaagttcagtgacgggtggagttatctgtacgtcgagcattgccacgtcgatcaggaagagcgggccattgccgtccacgatcaagccgggaaggtgccggtcccctgtgccaatctggctctcctgatgttgggtccgggcgtctcgattactcacgccgccatctccgtgttggcggaccatgggtgcctggtggcttggtgcggggaggagggagtccgcttctacgccgtgggcatgggcgagacgcgcaacgcggccaacttcctgcatcaggcgaggctgtgggcggaccagggtttccatatgcaggtggtgcgccgcctctatcagttgcgattttcggagaagttcgaccctgccctgaccctccagcaaatccgcggcatggagggcgtgcgggtgcgcgatgcctacgccaaggccgcccaggaagccggcatcacgtggtcgggccgcagctataaacgcgatgagtggagcaaggcggaccctgccaaccgagccttgtccgccgctaactcctgcctatatggaatctgccatgctgccatcgtgtcagcaggtttttcgcccgcactcgggtttatccacaccggcaagatgctgtccttcgtctacgatctcgccgacctgtacaaggctgaaattaccgttccagtggcatttcgcgccgccgccgaggggacgggacagttggaacgccgggtgcgcatcacctgccgcgatcagttcgtatccacgcggcttctggagagaatcatcccggatgtccaaagggcgttgatgctggcaaaagcgacggcctgggacactaccttcgacctggatgccgccgcccccggcttcctctgggacaatctggaaggagaggtcgaaggcggccgcctgctagcccccgaaatcggtgaaacggagcccggcgatggtggtcctgattcttgagcgcgtccccccagggttgcgaggcgagctgactcgctggtttttggaacctcaggcgggagtgttcgtgggacgcgtctccgccatggtccgtgatcggctctgggaaaaagcctgcagccaggccaagggaggcgggtgcttgattatctattcaagcgacaatgaacagggctttcgagtccgaacctggggccaaacagctcgggtcatcgatgacttcgagggcctttttctcgttcgcatgccgcagaatcaataatttagtaagtgttgtccccacgcgcgtgggggtgaaccgccggggctgaaggtttcatgggctggaaagaagttgtccccacgcgcgtgggggtgaaccgatatgctgcatgtgccggggctggcgcttgatgttgtccccacgcgcgtgggggtgaaccggtatcggcgagtggcaaggcgaatccacttaggttgtccccacgcgcgtgggggtgaaccgacctccgagggcgcggggcgcgtgctggcgatgttgtccccacgcgcgtgggggtgaaccggctggggccgacgcgcgcttgtgagactgcgggttgtccccacgcgcgtgggggtgaaccgcgggagaactttgaaggcacggtcctcgatcacgttgtccccacgcgcgtgggggtgaaccggcgcaggttaaggctgaggccaaggccgatgcgttgtccccacgcgcgtgggggtgaaccgtaatggtggcttgcaccttctgctcgaccgatgttgtccccacgcgcgtgggggtgaaccgcagcgggccgtgttggaggagaaggtcgcggagttgtccccacgcgcgtgggggtgaaccgttcccagccgcaggcaggatcaccgtaccccagttgtccccacgcgcgtgggggtgaaccgcaaaacaatatcaagaccaagcacttggatgtgttgtccccacgcgcgtgggggtgaaccgcatcgggcagcacagcggccttataccccaaagttgtccccacgcgcgtgggggtgaaccggcagctcgcggcgattcgcattgccgctgaaagttgtccccacgcgcgtgggggtgaaccggggagtcgtgagtgtagttacaggcagggttcgttgtccccacgcgcgtgggggtgaaccgcttctgcatcttataaagaacgccagtttgaagttgtccccacgcgcgtgggggtgaaccggtacggttcccaggggaattatttcttggggtgttgtccccacgcgcgtgggggtgaaccgatgtagcttgatatgggtgtggtgtcgcagaagttgtccccacgcgcgtgggggtgaaccggcggcgcgcacattccaacctcgtccgtatccgttgtccccacgcgcgtgggggtgaaccggcggacacggcggatgtgacgaatatggagtcgttgtccccacgcgcgtgggggtgaaccggtctctcgaaaaggaaagccaactttcagcttgttgtccccacgcgcgtgggggtgaaccgctcttggcatagagcttagtgagtttgatgaagttgtccccacgcgcgtgggggtgaaccgcctttgccctccgagacgcaacagctccattcgttgtccccacgcgcgtgggggtgaaccggcgagcgcaggtctaagcgaccgcgacaaagagttgtccccacgcgcgtgggggtgaaccggtgatggacacttcctaaaatggcattaagtcgttgtccccacgcgcgtgggggtgaaccgcagcgggtagcgcagacttcgtgcatatcgaagtctgcggcttttgccgccgtgaatcttgaaaagccgcagacctgcaaaaagcgcaggtctgcgctacccactgcctggccatcctggagaattgaaagtccctccagtaaagcggcgaagcgcaggatttccggctgcttcaatcgcttgcgacgctcaccggtcagtagcgcgttggtaatttcgagcccccatacggctggaacaacgagcgtctgcccttcagtgccaccaggaccccgtccgcgtattcgctcgcttcatccggggagcaccaggcaagcgccaccgacgcatgcaccacaacgccgctcaaaatcgccgtccctcaattatcatttcgcggacgctcatggtgtggggctttacgcgcttgcgcaacgcgcgcatgccctcgacaatctcctcgtgcgtcagctttcgatccgagtctcgaaccggcaccagcattgccgccggaacgccgtgtcttgtaatcgtgatcctttcgcaacccatcttgtccagctaaagctccgcatcagctatagtctccctctggccgtgcggcccgccccttgcggcgcaaccaaaccgaagctcaaaacgcgacatcgtcctcgtagcgcgaccggacactgaaggtaaaggttcgccacccgtctcccctgcaaaaccgggtcgcggagtactattgctttgcacagcgggggacgaccgaggcgctacggaagaggttggttcgcgaaactgagcaagagacccctcacccgtcccgctccggctggtggaagcgccggagcgggacacgctcagccccaagggagagggctatggattcagttctacgcgcggtgtccagtcaaagatgtgggacacgctcagccccaagggagagggctatggattcagttctacgcgcggtgtccagtcaaagatgtgggacacgctcagccccaagggagagggctatggattcagttctacgcgcggtgtccagtcaaagatgtgggacacgctcagccccaagggagagggctatggattcagttctacgcgcggtgtccagtcaaagatgtgggacacgctcagccccaagggagagggctatggattcagttctacgcgcggtgtccagtcaaagatgtgggacacgctcagccccaagggagagggctatggattcagttctacgcgcggtgtccagtcaaagatgtgggacacgctcagccccaagggagagggctatggattcagttctactcctggtgtccagcgaaagatgtgggacacgctcagccccaagggagagggctatggattcagttctacccctggtgtccagcgaaagatgtgggacacgctcaggcccaagggagagggctatggattcagttctacccccggtgtccagcgaaagatgtgggacacgctcaggcccaagggagagggctatggattcagttctacccccggtgtccagccaaagatgtgggacacgctcagccccaagggagagggctatggattcagttctacccctggtgtgcagcgaaagatgtgggacacgctcagccccaagggagagggcagagacccaattccctgccattctccccgggaaatgggcagaggttggaggtggggccgcagtgtccagcggaagatgtgggacacgctcagccctcggaagagggctgtcctttctggcgcgcgtggcagttgccaaaaccgccctctctcttggtgagagggcggcgatctcgcagtcgcgggagagccgggtcgggggccttttcgggtgtagcgcatacacctggccactcgcgaccttgacgcactcctggccggatgcgctaccatttactttcccggcgaggtccagtagcatttgggccacgcggccacggacgccgcgtaggggcgggcgttgtgcccgctcaggtcctgatttggcgaacgcggtcgcgcatgctggtttggcgatgtaaaatcgccgctacgggcgaacggacttggcccacgcggccacgcatgccgcacaaggaggaataaccgtgttcacactcgctggtagaagattgcagaccgttgcccttatgcttttcgtccttgggggcgtccctgcggcgcgaggctccttcacgctcgaacaagtgatgagctcgccattcccaaccgagctcgtggcttcgccttcgggcgggcgggtggcttgggtgttcgatgcgcgcggccttcgcaacatctgggtggccgagcccggtgggggcggaggctatgtgtcacggcagctcacccggtacacccaagacgacggccaggagatcggagagctcacctggactcctgacggccgggcgatactctacgttcgcgggggcgacttcgagaccggcggcggctaccccaaccccgccagcgcccccgagggtgtcgaacaggacgtctgggttgtctcactcgacggtggctcgccgcgcaagctcgccgagggctattctccggcggtttctccgaagggcgatagtgtggcgtacatcttcaaggaccaggtgtggctggttaagctggccgaaggcgccaagcccgaacaattgatccacgacaagggcaaaggcagctcgctccgttggtcgcccgacgggtcgcgccttgctttcgtcagccgccgtggagatcacagcttcgtgggggtgtacgacgtggggggcaagagcctgctgtatctcgatccgagcgttgaccaggattccgagcctgtctggtcgccggacagcaggcacgtcgccttcctgcaccttccttcctcacgcgacgaccttatcttcgggccgaaacgtaccggccagccgtggtcgatccgcgtggccgacgctgccaccggtcagggtcacgaggtctggcgcgccgatgccggtcgcggcagcgtctttcgcgagattgtggccgagcatcagatcttctggggcgccggcgataacctggtgtttccctgggagcgcgacggctggactcatctttattctgttccccttgcgggcggcacggcaaagctccttacgcccggcgatttcgaagtggagttcgtttccctcagtcccgatcgccgccagttgattttcgcctcgaaccaggatgacatcgaccgccgccacctgtggcgcgagccggtcacgggtgaccacgccactccactgaccaggggtgaaggaatggagtggtcaccggtgatgatgagcgacggcgccaccgttgccctgctccattccgacgcccagcgcccagctcggccggcaattctggctaactcgggcggaattcgcgacctcgctcccgaaacgcttcccgccgactttcccgccgctgatctggtcaccccgcaacaagtgatctttcccgccgctgacgggctgcgcatccacgcgcagctttttctgcctaaggaggaggcctccgggcagcggcacccggccgtagtattctttcacggtggttcgcggcgccagatgctgctgggctggcattatatgggctactatcacaacgcctatgccttcaaccagtatctcgccagccgcggttacgtggtgctatcggtcaactaccgtagcggcatcggctatgggctggactttcgcgaggcgctcaactacgggcccagcggggcgagcgagtttaacgatgtcgagggcgtcggcctctacctgcgcctgcgccccgaggtggatccgaatcacatcggcctgtggggcggttcttacggcggatatttgacggcgctgggattggcccgagcctccgagctattcgcctgcggcgttgacttgcacggcgtgcatgactggaacctcgaaatccagaactggattccttcctacgatcccgccgcacggcctgacgcggcacgactggcgtgggagtcctcgccgctggcctccctcaagacatggcgctcgccggtgttgctggtccagggggatgatgaccgcaacgttcccttcacggagatggtccgcctggtggaggggttgcggaaacagggtgtggaattccaacaactcgtctttccggacgagattcacgatttcttgcggcagcgcacttggctggcggcctatcatgcggctgctgatttcttcgaccattacctcaaaaagagagccgtgcccgcgctggggagcccgcgctagaaaatgcgggtggcgcagagcaggctgttccactagttttcatcttcttctcgcgccgcgaagattttttctgctgtgcgtagtgtctccgtaacctccgtggtcagaagagcttcaacacggaggtcactgagaggctcagtgtgctccgtgttaaagcctgagaggcacggaggacgcagagagcctcgttttggttgcggccaccagccgcgttgtactactgttggtgaatctctttgccgcgcgcaaagattcccccttcgagggctcgttatcaccccaacttaatgcgttcaagagcctttcttgcgggcccggcgaggacgacggtccaactcgcggaaatattcatcgagggttatgtaatctccccgccggtatgcggcctcaccacggcgaatggcacgaagctcggaagacgtggggctctcttgggggagcaaacgaattgagatgtaggtgcggagcgcttcgcggacgagttcggagcgcgtccgatgctccgttttcatggcgttctcaacctgctccgccatttcgggtgggagtgaaatcgtgatagtttggcgtgttctcgtagaaatttggtgctacctggtaacaccttctctcacacatgagcacagaatctgaacaaaaaggtttttcagcgtccagttgctcggtgtacggccgcggcgcggttacgagacaggagtcgcgctctgatttgctcgagtggaagcaccgtaacccttttgtccaaatcgtaggcgtcgcggcccggatagaccacgaagagttgccgcaatcccaggtcagcaagggccacacgcatggacttggtgatgcccggggcgtcgccgtacttcacctcgaccccataacgcgagccgtccaggaaaagcaagaggtccaactccgcgcctgattgcgtcgcccaaaagtaagcgctgcgttcgccgaccaactgaaggagttcttcgatcacgaatccttcccaggaggcgccaagtttgggatgcccctctaaga

SEQ ID NO: 1006 - DNA, 103650 bp, Artificial Sequence
  Synthetic Oligonucleotide
  misc_feature (1)..(89320): n is a, c, g, or t
nnnnnnnnnnnnnnnnnnnnnnnnnnnnnnnnnnnnnnnnnnnnnnnnnnnnnnnnnnnnnnnnnnnnnnnnnnnnnnnnnnnnnnnnnnnnnnnnnnnnnnnnnnnnnnnnnnnnnnnnnnnnnnnnnnnnnnnnnnnnnnnnnnnnnnnnnnnnnnnnnnnnnnnnnnnnnnnnnnnnnnnnnnnnnnnnnnnnnnnnnnnnnnnnnnnnnnnnnnnnnnnnnnnnnnnnnnnnnnnnnnnnnnnnnnnnnnnnnnnnnnnnnnnnnnnnnnnnnnnnnnnnnnnnnnnnnnnnnnnnnnnnnnnnnnnnnnnnnnnnnnnnnnnnnnnnnnnnnnnnnnnnnnnnnnnnnnnnnnnnnnnnnnnnnnnnnnnnnnnnnnnnnnnnnnnnnnnnnnnnnnnnnnnnnnnnnnnnnnnnnnnnnnnnnnnnnnnnnnnnnnnnnnnnnnnnnnnnnnnnnnnnnnnnnnnnnnnnnnnnnnnnnnnnnnnnnnnnnnnnnnnnnnnnnnnnnnnnnnnnnnnnnnnnnnnnnnnnnnnnnnnnnnnnnnnnnnnnnnnnnnnnnnnnnnnnnnnnnnnnnnnnnnnnnnnnnnnnnnnnnnnnnnnnnnnnnnnnnnnnnnnnnnnnnnnnnnnnnnnnnnnnnnnnnnnnnnnnnnnnnnnnnnnnnnnnnnnnnnnnnnnnnnnnnnnnnnnnnnnnnnnnnnnnnnnnnnnnnnnnnnnnnnnnnnnnnnnnnnnnnnnnnnnnnnnnnnnnnnnnnnnnnnnnnnnnnnnnnnnnnnnnnnnnnnnnnnnnnnnnnnnnnnnnnnnnnnnnnnnnnnnnnnnnnnnnnnnnnnnnnnnnnnnnnnnnnnnnnnnnnnnnnnnnnnnnnnnnnnnnnnnnnnnnnnnnnnnnnnnnnnnnnnnnnnnnnnnnnnnnnnnnnnnnnnnnnnnnnnnnnnnnnnnnnnnnnnnnnnnnnnnnnnnnnnnnnnnnnnnnnnnnnnnnnnnnnnnnnnnnnnnnnnnnnnnnnnnnnnnnnnnnnnnnnnnnnnnnnnnnnnnnnnnnnnnnnnnnnnnnnnnnnnnnnnnnnnnnnnnnnnnnnnnnnnnnnnnnnnnnnnnnnnnnnnnnnnnnnnnnnnnnnnnnnnnnnnnnnnnnnnnnnnnnnnnnnnnnnnnnnnnnnnnnnnnnnnnnnnnnnnnnnnnnnnnnnnnnnnnnnnnnnnnnnnnnnnnnnnnnnnnnnnnnnnnnnnnnnnnnnnnnnnnnnnnnnnnnnnnnnnnnnnnnnnnnnnnnnnnnnnnnnnnnnnnnnnnnnnnnnnnnnnnnnnnnnnnnnnnnnnnnnnnnnnnnnnnnnnnnnnnnnnnnnnnnnnnnnnnnnnnnnnnnnnnnnnnnnnnnnnnnnnnnnnnnnnnnnnnnnnnnnnnnnnnnnnnnnnnnnnnnnnnnnnnnnnnnnnnnnnnnnnnnnnnnnnnnnnnnnnnnnnnnnnnnnnnnnnnnnnnnnnnnnnnnnnnnnnnnnnnnnnnnnnnnnnnnnnnnnnnnnnnnnnnnnnnnnnnnnnnnnnnnnnnnnnnnnnnnnnnnnnnnnnnnnnnnnnnnnnnnnnnnnnnnnnnnnnnnnnnnnnnnnnnnnnnnnnnnnnnnnnnnnnnnnnnnnnnnnnnnnnnnnnnnnnnnnnnnnnnnnnnnnnnnnnnnnnnnnnnnnnnnnnnnnnnnnnnnnnnnnnnnnnnnnnnnnnnnnnnnnnnnnnnnnnnnnnnnnnnnnnnnnnnnnnnnnnnnnnnnnnnnnnnnnnnnnnnnnnnnnnnnnnnnnnnnnnnnnnnnnnnnnnnnnnnnnnnnnnnnnnnnnnnnnnnnnnnnnnnnnnnnnnnnnnnnnnnnnnnnnnnnnnnnnnnnnnnnnnnnnnnnnnnnnnnnnnnnnnnnnnnnnnnnnnnnnnnnnnnnnnnnnnnnnnnnnnnnnnnnnnnnnnnnnnnnnnnnnnnnnnnnnnnnnnnnnnnnnnnnnnnnnnnnnnnnnnnnnnnnnnnnnnnnnnnnnnnnnnnnnnnnnnnnnnnnnnnnnnnnnnnnnnnnnnnnnnnnnnnnnnnnnnnnnnnnnnnnnnnnnnnnnnnnnnnnnnnnnnnnnnnnnnnnnnnnnnnnnnnnnnnnnnnnnnnnnnnnnnnnnnnnnnnnnnnnnnnnnnnnnnnnnnnnnnnnnnnnnnnnnnnnnnnnnnnnnnnnnnnnnnnnnnnnnnnnnnnnnnnnnnnnnnnnnnnnnnnnnnnnnnnnnnnnnnnnnnnnnnnnnnnnnnnnnnnnnnnnnnnnnnnnnnnnnnnnnnnnnnnnnnnnnnnnnnnnnnnnnnnnnnnnnnnnnnnnnnnnnnnnnnnnnnnnnnnnnnnnnnnnnnnnnnnnnnnnnnnnnnnnnnnnnnnnnnnnnnnnnnnnnnnnnnnnnnnnnnnnnnnnnnnnnnnnnnnnnnnnnnnnnnnnnnnnnnnnnnnnnnnnnnnnnnnnnnnnnnnnnnnnnnnnnnnnnnnnnnnnnnnnnnnnnnnnnnnnnnnnnnnnnnnnnnnnnnnnnnnnnnnnnnnnnnnnnnnnnnnnnnnnnnnnnnnnnnnnnnnnnnnnnnnnnnnnnnnnnnnnnnnnnnnnnnnnnnnnnnnnnnnnnnnnnnnnnnnnnnnnnnnnnnnnnnnnnnnnnnnnnnnnnnnnnnnnnnnnnnnnnnnnnnnnnnnnnnnnnnnnnnnnnnnnnnnnnnnnnnnnnnnnnnnnnnnnnnnnnnnnnnnnnnnnnnnnnnnnnnnnnnnnnnnnnnnnnnnnnnnnnnnnnnnnnnnnnnnnnnnnnnnnnnnnnnnnnnnnnnnnnnnnnnnnnnnnnnnnnnnnnnnnnnnnnnnnnnnnnnnnnnnnnnnnnnnnnnnnnnnnnnnnnnnnnnnnnnnnnnnnnnnnnnnnnnnnnnnnnnnnnnnnnnnnnnnnnnnnnnnnnnnnnnnnnnnnnnnnnnnnnnnnnnnnnnnnnnnnnnnnnnnnnnnnnnnnnnnnnnnnnnnnnnnnnnnnnnnnnnnnnnnnnnnnnnnnnnnnnnnnnnnnnnnnnnnnnnnnnnnnnnnnnnnnnnnnnnnnnnnnnnnnnnnnnnnnnnnnnnnnnnnnnnnnnnnnnnnnnnnnnnnnnnnnnnnnnnnnnnnnnnnnnnnnnnnnnnnnnnnnnnnnnnnnnnnnnnnnnnnnnnnnnnnnnnnnnnnnnnnnnnnnnnnnnnnnnnnnnnnnnnnnnnnnnnnnnnnnnnnnnnnnnnnnnnnnnnnnnnnnnnnnnnnnnnnnnnnnnnnnnnnnnnnnnnnnnnnnnnnnnnnnnnnnnnnnnnnnnnnnnnnnnnnnnnnnnnnnnnnnnnnnnnnnnnnnnnnnnnnnnnnnnnnnnnnnnnnnnnnnnnnnnnnnnnnnnnnnnnnnnnnnnnnnnnnnnnnnnnnnnnnnnnnnnnnnnnnnnnnnnnnnnnnnnnnnnnnnnnnnnnnnnnnnnnnnnnnnnnnnnnnnnnnnnnnnnnnnnnnnnnnnnnnnnnnnnnnnnnnnnnnnnnnnnnnnnnnnnnnnnnnnnnnnnnnnnnnnnnnnnnnnnnnnnnnnnnnnnnnnnnnnnnnnnnnnnnnnnnnnnnnnnnnnnnnnnnnnnnnnnnnnnnnnnnnnnnnnnnnnnnnnnnnnnnnnnnnnnnnnnnnnnnnnnnnnnnnnnnnnnnnnnnnnnnnnnnnnnnnnnnnnnnnnnnnnnnnnnnnnnnnnnnnnnnnnnnnnnnnnnnnnnnnnnnnnnnnnnnnnnnnnnnnnnnnnnnnnnnnnnnnnnnnnnnnnnnnnnnnnnnnnnnnnnnnnnnnnnnnnnnnnnnnnnnnnnnnnnnnnnnnnnnnnnnnnnnnnnnnnnnnnnnnnnnnnnnnnnnnnnnnnnnnnnnnnnnnnnnnnnnnnnnnnnnnnnnnnnnnnnnnnnnnnnnnnnnnnnnnnnnnnnnnnnnnnnnnnnnnnnnnnnnnnnnnnnnnnnnnnnnnnnnnnnnnnnnnnnnnnnnnnnnnnnnnnnnnnnnnnnnnnnnnnnnnnnnnnnnnnnnnnnnnnnnnnnnnnnnnnnnnnnnnnnnnnnnnnnnnnnnnnnnnnnnnnnnnnnnnnnnnnnnnnnnnnnnnnnnnnnnnnnnnnnnnnnnnnnnnnnnnnnnnnnnnnnnnnnnnnnnnnnnnnnnnnnnnnnnnnnnnnnnnnnnnnnnnnnnnnnnnnnnnnnnnnnnnnnnnnnnnnnnnnnnnnnnnnnnnnnnnnnnnnnnnnnnnnnnnnnnnnnnnnnnnnnnnnnnnnnnnnnnnnnnnnnnnnnnnnnnnnnnnnnnnnnnnnnnnnnnnnnnnnnnnnnnnnnnnnnnnnnnnnnnnnnnnnnnnnnnnnnnnnnnnnnnnnnnnnnnnnnnnnnnnnnnnnnnnnnnnnnnnnnnnnnnnnnnnnnnnnnnnnnnnnnnnnnnnnnnnnnnnnnnnnnnnnnnnnnnnnnnnnnnnnnnnnnnnnnnnnnnnnnnnnnnnnnnnnnnnnnnnnnnnnnnnnnnnnnnnnnnnnnnnnnnnnnnnnnnnnnnnnnnnnnnnnnnnnnnnnnnnnnnnnnnnnnnnnnnnnnnnnnnnnnnnnnnnnnnnnnnnnnnnnnnnnnnnnnnnnnnnnnnnnnnnnnnnnnnnnnnnnnnnnnnnnnnnnnnnnnnnnnnnnnnnnnnnnnnnnnnnnnnnnnnnnnnnnnnnnnnnnnnnnnnnnnnnnnnnnnnnnnnnnnnnnnnnnnnnnnnnnnnnnnnnnnnnnnnnnnnnnnnnnnnnnnnnnnnnnnnnnnnnnnnnnnnnnnnnnnnnnnnnnnnnnnnnnnnnnnnnnnnnnnnnnnnnnnnnnnnnnnnnnnnnnnnnnnnnnnnnnnnnnnnnnnnnnnnnnnnnnnnnnnnnnnnnnnnnnnnnnnnnnnnnnnnnnnnnnnnnnnnnnnnnnnnnnnnnnnnnnnnnnnnnnnnnnnnnnnnnnnnnnnnnnnnnnnnnnnnnnnnnnnnnnnnnnnnnnnnnnnnnnnnnnnnnnnnnnnnnnnnnnnnnnnnnnnnnnnnnnnnnnnnnnnnnnnnnnnnnnnnnnnnnnnnnnnnnnnnnnnnnnnnnnnnnnnnnnnnnnnnnnnnnnnnnnnnnnnnnnnnnnnnnnnnnnnnnnnnnnnnnnnnnnnnnnnnnnnnnnnnnnnnnnnnnnnnnnnnnnnnnnnnnnnnnnnnnnnnnnnnnnnnnnnnnnnnnnnnnnnnnnnnnnnnnnnnnnnnnnnnnnnnnnnnnnnnnnnnnnnnnnnnnnnnnnnnnnnnnnnnnnnnnnnnnnnnnnnnnnnnnnnnnnnnnnnnnnnnnnnnnnnnnnnnnnnnnnnnnnnnnnnnnnnnnnnnnnnnnnnnnnnnnnnnnnnnnnnnnnnnnnnnnnnnnnnnnnnnnnnnnnnnnnnnnnnnnnnnnnnnnnnnnnnnnnnnnnnnnnnnnnnnnnnnnnnnnnnnnnnnnnnnnnnnnnnnnnnnnnnnnnnnnnnnnnnnnnnnnnnnnnnnnnnnnnnnnnnnnnnnnnnnnnnnnnnnnnnnnnnnnnnnnnnnnnnnnnnnnnnnnnnnnnnnnnnnnnnnnnnnnnnnnnnnnnnnnnnnnnnnnnnnnnnnnnnnnnnnnnnnnnnnnnnnnnnnnnnnnnnnnnnnnnnnnnnnnnnnnnnnnnnnnnnnnnnnnnnnnnnnnnnnnnnnnnnnnnnnnnnnnnnnnnnnnnnnnnnnnnnnnnnnnnnnnnnnnnnnnnnnnnnnnnnnnnnnnnnnnnnnnnnnnnnnnnnnnnnnnnnnnnnnnnnnnnnnnnnnnnnnnnnnnnnnnnnnnnnnnnnnnnnnnnnnnnnnnnnnnnnnnnnnnnnnnnnnnnnnnnnnnnnnnnnnnnnnnnnnnnnnnnnnnnnnnnnnnnnnnnnnnnnnnnnnnnnnnnnnnnnnnnnnnnnnnnnnnnnnnnnnnnnnnnnnnnnnnnnnnnnnnnnnnnnnnnnnnnnnnnnnnnnnnnnnnnnnnnnnnnnnnnnnnnnnnnnnnnnnnnnnnnnnnnnnnnnnnnnnnnnnnnnnnnnnnnnnnnnnnnnnnnnnnnnnnnnnnnnnnnnnnnnnnnnnnnnnnnnnnnnnnnnnnnnnnnnnnnnnnnnnnnnnnnnnnnnnnnnnnnnnnnnnnnnnnnnnnnnnnnnnnnnnnnnnnnnnnnnnnnnnnnnnnnnnnnnnnnnnnnnnnnnnnnnnnnnnnnnnnnnnnnnnnnnnnnnnnnnnnnnnnnnnnnnnnnnnnnnnnnnnnnnnnnnnnnnnnnnnnnnnnnnnnnnnnnnnnnnnnnnnnnnnnnnnnnnnnnnnnnnnnnnnnnnnnnnnnnnnnnnnnnnnnnnnnnnnnnnnnnnnnnnnnnnnnnnnnnnnnnnnnnnnnnnnnnnnnnnnnnnnnnnnnnnnnnnnnnnnnnnnnnnnnnnnnnnnnnnnnnnnnnnnnnnnnnnnnnnnnnnnnnnnnnnnnnnnnnnnnnnnnnnnnnnnnnnnnnnnnnnnnnnnnnnnnnnnnnnnnnnnnnnnnnnnnnnnnnnnnnnnnnnnnnnnnnnnnnnnnnnnnnnnnnnnnnnnnnnnnnnnnnnnnnnnnnnnnnnnnnnnnnnnnnnnnnnnnnnnnnnnnnnnnnnnnnnnnnnnnnnnnnnnnnnnnnnnnnnnnnnnnnnnnnnnnnnnnnnnnnnnnnnnnnnnnnnnnnnnnnnnnnnnnnnnnnnnnnnnnnnnnnnnnnnnnnnnnnnnnnnnnnnnnnnnnnnnnnnnnnnnnnnnnnnnnnnnnnnnnnnnnnnnnnnnnnnnnnnnnnnnnnnnnnnnnnnnnnnnnnnnnnnnnnnnnnnnnnnnnnnnnnnnnnnnnnnnnnnnnnnnnnnnnnnnnnnnnnnnnnnnnnnnnnnnnnnnnnnnnnnnnnnnnnnnnnnnnnnnnnnnnnnnnnnnnnnnnnnnnnnnnnnnnnnnnnnnnnnnnnnnnnnnnnnnnnnnnnnnnnnnnnnnnnnnnnnnnnnnnnnnnnnnnnnnnnnnnnnnnnnnnnnnnnnnnnnnnnnnnnnnnnnnnnnnnnnnnnnnnnnnnnnnnnnnnnnnnnnnnnnnnnnnnnnnnnnnnnnnnnnnnnnnnnnnnnnnnnnnnnnnnnnnnnnnnnnnnnnnnnnnnnnnnnnnnnnnnnnnnnnnnnnnnnnnnnnnnnnnnnnnnnnnnnnnnnnnnnnnnnnnnnnnnnnnnnnnnnnnnnnnnnnnnnnnnnnnnnnnnnnnnnnnnnnnnnnnnnnnnnnnnnnnnnnnnnnnnnnnnnnnnnnnnnnnnnnnnnnnnnnnnnnnnnnnnnnnnnnnnnnnnnnnnnnnnnnnnnnnnnnnnnnnnnnnnnnnnnnnnnnnnnnnnnnnnnnnnnnnnnnnnnnnnnnnnnnnnnnnnnnnnnnnnnnnnnnnnnnnnnnnnnnnnnnnnnnnnnnnnnnnnnnnnnnnnnnnnnnnnnnnnnnnnnnnnnnnnnnnnnnnnnnnnnnnnnnnnnnnnnnnnnnnnnnnnnnnnnnnnnnnnnnnnnnnnnnnnnnnnnnnnnnnnnnnnnnnnnnnnnnnnnnnnnnnnnnnnnnnnnnnnnnnnnnnnnnnnnnnnnnnnnnnnnnnnnnnnnnnnnnnnnnnnnnnnnnnnnnnnnnnnnnnnnnnnnnnnnnnnnnnnnnnnnnnnnnnnnnnnnnnnnnnnnnnnnnnnnnnnnnnnnnnnnnnnnnnnnnnnnnnnnnnnnnnnnnnnnnnnnnnnnnnnnnnnnnnnnnnnnnnnnnnnnnnnnnnnnnnnnnnnnnnnnnnnnnnnnnnnnnnnnnnnnnnnnnnnnnnnnnnnnnnnnnnnnnnnnnnnnnnnnnnnnnnnnnnnnnnnnnnnnnnnnnnnnnnnnnnnnnnnnnnnnnnnnnnnnnnnnnnnnnnnnnnnnnnnnnnnnnnnnnnnnnnnnnnnnnnnnnnnnnnnnnnnnnnnnnnnnnnnnnnnnnnnnnnnnnnnnnnnnnnnnnnnnnnnnnnnnnnnnnnnnnnnnnnnnnnnnnnnnnnnnnnnnnnnnnnnnnnnnnnnnnnnnnnnnnnnnnnnnnnnnnnnnnnnnnnnnnnnnnnnnnnnnnnnnnnnnnnnnnnnnnnnnnnnnnnnnnnnnnnnnnnnnnnnnnnnnnnnnnnnnnnnnnnnnnnnnnnnnnnnnnnnnnnnnnnnnnnnnnnnnnnnnnnnnnnnnnnnnnnnnnnnnnnnnnnnnnnnnnnnnnnnnnnnnnnnnnnnnnnnnnnnnnnnnnnnnnnnnnnnnnnnnnnnnnnnnnnnnnnnnnnnnnnnnnnnnnnnnnnnnnnnnnnnnnnnnnnnnnnnnnnnnnnnnnnnnnnnnnnnnnnnnnnnnnnnnnnnnnnnnnnnnnnnnnnnnnnnnnnnnnnnnnnnnnnnnnnnnnnnnnnnnnnnnnnnnnnnnnnnnnnnnnnnnnnnnnnnnnnnnnnnnnnnnnnnnnnnnnnnnnnnnnnnnnnnnnnnnnnnnnnnnnnnnnnnnnnnnnnnnnnnnnnnnnnnnnnnnnnnnnnnnnnnnnnnnnnnnnnnnnnnnnnnnnnnnnnnnnnnnnnnnnnnnnnnnnnnnnnnnnnnnnnnnnnnnnnnnnnnnnnnnnnnnnnnnnnnnnnnnnnnnnnnnnnnnnnnnnnnnnnnnnnnnnnnnnnnnnnnnnnnnnnnnnnnnnnnnnnnnnnnnnnnnnnnnnnnnnnnnnnnnnnnnnnnnnnnnnnnnnnnnnnnnnnnnnnnnnnnnnnnnnnnnnnnnnnnnnnnnnnnnnnnnnnnnnnnnnnnnnnnnnnnnnnnnnnnnnnnnnnnnnnnnnnnnnnnnnnnnnnnnnnnnnnnnnnnnnnnnnnnnnnnnnnnnnnnnnnnnnnnnnnnnnnnnnnnnnnnnnnnnnnnnnnnnnnnnnnnnnnnnnnnnnnnnnnnnnnnnnnnnnnnnnnnnnnnnnnnnnnnnnnnnnnnnnnnnnnnnnnnnnnnnnnnnnnnnnnnnnnnnnnnnnnnnnnnnnnnnnnnnnnnnnnnnnnnnnnnnnnnnnnnnnnnnnnnnnnnnnnnnnnnnnnnnnnnnnnnnnnnnnnnnnnnnnnnnnnnnnnnnnnnnnnnnnnnnnnnnnnnnnnnnnnnnnnnnnnnnnnnnnnnnnnnnnnnnnnnnnnnnnnnnnnnnnnnnnnnnnnnnnnnnnnnnnnnnnnnnnnnnnnnnnnnnnnnnnnnnnnnnnnnnnnnnnnnnnnnnnnnnnnnnnnnnnnnnnnnnnnnnnnnnnnnnnnnnnnnnnnnnnnnnnnnnnnnnnnnnnnnnnnnnnnnnnnnnnnnnnnnnnnnnnnnnnnnnnnnnnnnnnnnnnnnnnnnnnnnnnnnnnnnnnnnnnnnnnnnnnnnnnnnnnnnnnnnnnnnnnnnnnnnnnnnnnnnnnnnnnnnnnnnnnnnnnnnnnnnnnnnnnnnnnnnnnnnnnnnnnnnnnnnnnnnnnnnnnnnnnnnnnnnnnnnnnnnnnnnnnnnnnnnnnnnnnnnnnnnnnnnnnnnnnnnnnnnnnnnnnnnnnnnnnnnnnnnnnnnnnnnnnnnnnnnnnnnnnnnnnnnnnnnnnnnnnnnnnnnnnnnnnnnnnnnnnnnnnnnnnnnnnnnnnnnnnnnnnnnnnnnnnnnnnnnnnnnnnnnnnnnnnnnnnnnnnnnnnnnnnnnnnnnnnnnnnnnnnnnnnnnnnnnnnnnnnnnnnnnnnnnnnnnnnnnnnnnnnnnnnnnnnnnnnnnnnnnnnnnnnnnnnnnnnnnnnnnnnnnnnnnnnnnnnnnnnnnnnnnnnnnnnnnnnnnnnnnnnnnnnnnnnnnnnnnnnnnnnnnnnnnnnnnnnnnnnnnnnnnnnnnnnnnnnnnnnnnnnnnnnnnnnnnnnnnnnnnnnnnnnnnnnnnnnnnnnnnnnnnnnnnnnnnnnnnnnnnnnnnnnnnnnnnnnnnnnnnnnnnnnnnnnnnnnnnnnnnnnnnnnnnnnnnnnnnnnnnnnnnnnnnnnnnnnnnnnnnnnnnnnnnnnnnnnnnnnnnnnnnnnnnnnnnnnnnnnnnnnnnnnnnnnnnnnnnnnnnnnnnnnnnnnnnnnnnnnnnnnnnnnnnnnnnnnnnnnnnnnnnnnnnnnnnnnnnnnnnnnnnnnnnnnnnnnnnnnnnnnnnnnnnnnnnnnnnnnnnnnnnnnnnnnnnnnnnnnnnnnnnnnnnnnnnnnnnnnnnnnnnnnnnnnnnnnnnnnnnnnnnnnnnnnnnnnnnnnnnnnnnnnnnnnnnnnnnnnnnnnnnnnnnnnnnnnnnnnnnnnnnnnnnnnnnnnnnnnnnnnnnnnnnnnnnnnnnnnnnnnnnnnnnnnnnnnnnnnnnnnnnnnnnnnnnnnnnnnnnnnnnnnnnnnnnnnnnnnnnnnnnnnnnnnnnnnnnnnnnnnnnnnnnnnnnnnnnnnnnnnnnnnnnnnnnnnnnnnnnnnnnnnnnnnnnnnnnnnnnnnnnnnnnnnnnnnnnnnnnnnnnnnnnnnnnnnnnnnnnnnnnnnnnnnnnnnnnnnnnnnnnnnnnnnnnnnnnnnnnnnnnnnnnnnnnnnnnnnnnnnnnnnnnnnnnnnnnnnnnnnnnnnnnnnnnnnnnnnnnnnnnnnnnnnnnnnnnnnnnnnnnnnnnnnnnnnnnnnnnnnnnnnnnnnnnnnnnnnnnnnnnnnnnnnnnnnnnnnnnnnnnnnnnnnnnnnnnnnnnnnnnnnnnnnnnnnnnnnnnnnnnnnnnnnnnnnnnnnnnnnnnnnnnnnnnnnnnnnnnnnnnnnnnnnnnnnnnnnnnnnnnnnnnnnnnnnnnnnnnnnnnnnnnnnnnnnnnnnnnnnnnnnnnnnnnnnnnnnnnnnnnnnnnnnnnnnnnnnnnnnnnnnnnnnnnnnnnnnnnnnnnnnnnnnnnnnnnnnnnnnnnnnnnnnnnnnnnnnnnnnnnnnnnnnnnnnnnnnnnnnnnnnnnnnnnnnnnnnnnnnnnnnnnnnnnnnnnnnnnnnnnnnnnnnnnnnnnnnnnnnnnnnnnnnnnnnnnnnnnnnnnnnnnnnnnnnnnnnnnnnnnnnnnnnnnnnnnnnnnnnnnnnnnnnnnnnnnnnnnnnnnnnnnnnnnnnnnnnnnnnnnnnnnnnnnnnnnnnnnnnnnnnnnnnnnnnnnnnnnnnnnnnnnnnnnnnnnnnnnnnnnnnnnnnnnnnnnnnnnnnnnnnnnnnnnnnnnnnnnnnnnnnnnnnnnnnnnnnnnnnnnnnnnnnnnnnnnnnnnnnnnnnnnnnnnnnnnnnnnnnnnnnnnnnnnnnnnnnnnnnnnnnnnnnnnnnnnnnnnnnnnnnnnnnnnnnnnnnnnnnnnnnnnnnnnnnnnnnnnnnnnnnnnnnnnnnnnnnnnnnnnnnnnnnnnnnnnnnnnnnnnnnnnnnnnnnnnnnnnnnnnnnnnnnnnnnnnnnnnnnnnnnnnnnnnnnnnnnnnnnnnnnnnnnnnnnnnnnnnnnnnnnnnnnnnnnnnnnnnnnnnnnnnnnnnnnnnnnnnnnnnnnnnnnnnnnnnnnnnnnnnnnnnnnnnnnnnnnnnnnnnnnnnnnnnnnnnnnnnnnnnnnnnnnnnnnnnnnnnnnnnnnnnnnnnnnnnnnnnnnnnnnnnnnnnnnnnnnnnnnnnnnnnnnnnnnnnnnnnnnnnnnnnnnnnnnnnnnnnnnnnnnnnnnnnnnnnnnnnnnnnnnnnnnnnnnnnnnnnnnnnnnnnnnnnnnnnnnnnnnnnnnnnnnnnnnnnnnnnnnnnnnnnnnnnnnnnnnnnnnnnnnnnnnnnnnnnnnnnnnnnnnnnnnnnnnnnnnnnnnnnnnnnnnnnnnnnnnnnnnnnnnnnnnnnnnnnnnnnnnnnnnnnnnnnnnnnnnnnnnnnnnnnnnnnnnnnnnnnnnnnnnnnnnnnnnnnnnnnnnnnnnnnnnnnnnnnnnnnnnnnnnnnnnnnnnnnnnnnnnnnnnnnnnnnnnnnnnnnnnnnnnnnnnnnnnnnnnnnnnnnnnnnnnnnnnnnnnnnnnnnnnnnnnnnnnnnnnnnnnnnnnnnnnnnnnnnnnnnnnnnnnnnnnnnnnnnnnnnnnnnnnnnnnnnnnnnnnnnnnnnnnnnnnnnnnnnnnnnnnnnnnnnnnnnnnnnnnnnnnnnnnnnnnnnnnnnnnnnnnnnnnnnnnnnnnnnnnnnnnnnnnnnnnnnnnnnnnnnnnnnnnnnnnnnnnnnnnnnnnnnnnnnnnnnnnnnnnnnnnnnnnnnnnnnnnnnnnnnnnnnnnnnnnnnnnnnnnnnnnnnnnnnnnnnnnnnnnnnnnnnnnnnnnnnnnnnnnnnnnnnnnnnnnnnnnnnnnnnnnnnnnnnnnnnnnnnnnnnnnnnnnnnnnnnnnnnnnnnnnnnnnnnnnnnnnnnnnnnnnnnnnnnnnnnnnnnnnnnnnnnnnnnnnnnnnnnnnnnnnnnnnnnnnnnnnnnnnnnnnnnnnnnnnnnnnnnnnnnnnnnnnnnnnnnnnnnnnnnnnnnnnnnnnnnnnnnnnnnnnnnnnnnnnnnnnnnnnnnnnnnnnnnnnnnnnnnnnnnnnnnnnnnnnnnnnnnnnnnnnnnnnnnnnnnnnnnnnnnnnnnnnnnnnnnnnnnnnnnnnnnnnnnnnnnnnnnnnnnnnnnnnnnnnnnnnnnnnnnnnnnnnnnnnnnnnnnnnnnnnnnnnnnnnnnnnnnnnnnnnnnnnnnnnnnnnnnnnnnnnnnnnnnnnnnnnnnnnnnnnnnnnnnnnnnnnnnnnnnnnnnnnnnnnnnnnnnnnnnnnnnnnnnnnnnnnnnnnnnnnnnnnnnnnnnnnnnnnnnnnnnnnnnnnnnnnnnnnnnnnnnnnnnnnnnnnnnnnnnnnnnnnnnnnnnnnnnnnnnnnnnnnnnnnnnnnnnnnnnnnnnnnnnnnnnnnnnnnnnnnnnnnnnnnnnnnnnnnnnnnnnnnnnnnnnnnnnnnnnnnnnnnnnnnnnnnnnnnnnnnnnnnnnnnnnnnnnnnnnnnnnnnnnnnnnnnnnnnnnnnnnnnnnnnnnnnnnnnnnnnnnnnnnnnnnnnnnnnnnnnnnnnnnnnnnnnnnnnnnnnnnnnnnnnnnnnnnnnnnnnnnnnnnnnnnnnnnnnnnnnnnnnnnnnnnnnnnnnnnnnnnnnnnnnnnnnnnnnnnnnnnnnnnnnnnnnnnnnnnnnnnnnnnnnnnnnnnnnnnnnnnnnnnnnnnnnnnnnnnnnnnnnnnnnnnnnnnnnnnnnnnnnnnnnnnnnnnnnnnnnnnnnnnnnnnnnnnnnnnnnnnnnnnnnnnnnnnnnnnnnnnnnnnnnnnnnnnnnnnnnnnnnnnnnnnnnnnnnnnnnnnnnnnnnnnnnnnnnnnnnnnnnnnnnnnnnnnnnnnnnnnnnnnnnnnnnnnnnnnnnnnnnnnnnnnnnnnnnnnnnnnnnnnnnnnnnnnnnnnnnnnnnnnnnnnnnnnnnnnnnnnnnnnnnnnnnnnnnnnnnnnnnnnnnnnnnnnnnnnnnnnnnnnnnnnnnnnnnnnnnnnnnnnnnnnnnnnnnnnnnnnnnnnnnnnnnnnnnnnnnnnnnnnnnnnnnnnnnnnnnnnnnnnnnnnnnnnnnnnnnnnnnnnnnnnnnnnnnnnnnnnnnnnnnnnnnnnnnnnnnnnnnnnnnnnnnnnnnnnnnnnnnnnnnnnnnnnnnnnnnnnnnnnnnnnnnnnnnnnnnnnnnnnnnnnnnnnnnnnnnnnnnnnnnnnnnnnnnnnnnnnnnnnnnnnnnnnnnnnnnnnnnnnnnnnnnnnnnnnnnnnnnnnnnnnnnnnnnnnnnnnnnnnnnnnnnnnnnnnnnnnnnnnnnnnnnnnnnnnnnnnnnnnnnnnnnnnnnnnnnnnnnnnnnnnnnnnnnnnnnnnnnnnnnnnnnnnnnnnnnnnnnnnnnnnnnnnnnnnnnnnnnnnnnnnnnnnnnnnnnnnnnnnnnnnnnnnnnnnnnnnnnnnnnnnnnnnnnnnnnnnnnnnnnnnnnnnnnnnnnnnnnnnnnnnnnnnnnnnnnnnnnnnnnnnnnnnnnnnnnnnnnnnnnnnnnnnnnnnnnnnnnnnnnnnnnnnnnnnnnnnnnnnnnnnnnnnnnnnnnnnnnnnnnnnnnnnnnnnnnnnnnnnnnnnnnnnnnnnnnnnnnnnnnnnnnnnnnnnnnnnnnnnnnnnnnnnnnnnnnnnnnnnnnnnnnnnnnnnnnnnnnnnnnnnnnnnnnnnnnnnnnnnnnnnnnnnnnnnnnnnnnnnnnnnnnnnnnnnnnnnnnnnnnnnnnnnnnnnnnnnnnnnnnnnnnnnnnnnnnnnnnnnnnnnnnnnnnnnnnnnnnnnnnnnnnnnnnnnnnnnnnnnnnnnnnnnnnnnnnnnnnnnnnnnnnnnnnnnnnnnnnnnnnnnnnnnnnnnnnnnnnnnnnnnnnnnnnnnnnnnnnnnnnnnnnnnnnnnnnnnnnnnnnnnnnnnnnnnnnnnnnnnnnnnnnnnnnnnnnnnnnnnnnnnnnnnnnnnnnnnnnnnnnnnnnnnnnnnnnnnnnnnnnnnnnnnnnnnnnnnnnnnnnnnnnnnnnnnnnnnnnnnnnnnnnnnnnnnnnnnnnnnnnnnnnnnnnnnnnnnnnnnnnnnnnnnnnnnnnnnnnnnnnnnnnnnnnnnnnnnnnnnnnnnnnnnnnnnnnnnnnnnnnnnnnnnnnnnnnnnnnnnnnnnnnnnnnnnnnnnnnnnnnnnnnnnnnnnnnnnnnnnnnnnnnnnnnnnnnnnnnnnnnnnnnnnnnnnnnnnnnnnnnnnnnnnnnnnnnnnnnnnnnnnnnnnnnnnnnnnnnnnnnnnnnnnnnnnnnnnnnnnnnnnnnnnnnnnnnnnnnnnnnnnnnnnnnnnnnnnnnnnnnnnnnnnnnnnnnnnnnnnnnnnnnnnnnnnnnnnnnnnnnnnnnnnnnnnnnnnnnnnnnnnnnnnnnnnnnnnnnnnnnnnnnnnnnnnnnnnnnnnnnnnnnnnnnnnnnnnnnnnnnnnnnnnnnnnnnnnnnnnnnnnnnnnnnnnnnnnnnnnnnnnnnnnnnnnnnnnnnnnnnnnnnnnnnnnnnnnnnnnnnnnnnnnnnnnnnnnnnnnnnnnnnnnnnnnnnnnnnnnnnnnnnnnnnnnnnnnnnnnnnnnnnnnnnnnnnnnnnnnnnnnnnnnnnnnnnnnnnnnnnnnnnnnnnnnnnnnnnnnnnnnnnnnnnnnnnnnnnnnnnnnnnnnnnnnnnnnnnnnnnnnnnnnnnnnnnnnnnnnnnnnnnnnnnnnnnnnnnnnnnnnnnnnnnnnnnnnnnnnnnnnnnnnnnnnnnnnnnnnnnnnnnnnnnnnnnnnnnnnnnnnnnnnnnnnnnnnnnnnnnnnnnnnnnnnnnnnnnnnnnnnnnnnnnnnnnnnnnnnnnnnnnnnnnnnnnnnnnnnnnnnnnnnnnnnnnnnnnnnnnnnnnnnnnnnnnnnnnnnnnnnnnnnnnnnnnnnnnnnnnnnnnnnnnnnnnnnnnnnnnnnnnnnnnnnnnnnnnnnnnnnnnnnnnnnnnnnnnnnnnnnnnnnnnnnnnnnnnnnnnnnnnnnnnnnnnnnnnnnnnnnnnnnnnnnnnnnnnnnnnnnnnnnnnnnnnnnnnnnnnnnnnnnnnnnnnnnnnnnnnnnnnnnnnnnnnnnnnnnnnnnnnnnnnnnnnnnnnnnnnnnnnnnnnnnnnnnnnnnnnnnnnnnnnnnnnnnnnnnnnnnnnnnnnnnnnnnnnnnnnnnnnnnnnnnnnnnnnnnnnnnnnnnnnnnnnnnnnnnnnnnnnnnnnnnnnnnnnnnnnnnnnnnnnnnnnnnnnnnnnnnnnnnnnnnnnnnnnnnnnnnnnnnnnnnnnnnnnnnnnnnnnnnnnnnnnnnnnnnnnnnnnnnnnnnnnnnnnnnnnnnnnnnnnnnnnnnnnnnnnnnnnnnnnnnnnnnnnnnnnnnnnnnnnnnnnnnnnnnnnnnnnnnnnnnnnnnnnnnnnnnnnnnnnnnnnnnnnnnnnnnnnnnnnnnnnnnnnnnnnnnnnnnnnnnnnnnnnnnnnnnnnnnnnnnnnnnnnnnnnnnnnnnnnnnnnnnnnnnnnnnnnnnnnnnnnnnnnnnnnnnnnnnnnnnnnnnnnnnnnnnnnnnnnnnnnnnnnnnnnnnnnnnnnnnnnnnnnnnnnnnnnnnnnnnnnnnnnnnnnnnnnnnnnnnnnnnnnnnnnnnnnnnnnnnnnnnnnnnnnnnnnnnnnnnnnnnnnnnnnnnnnnnnnnnnnnnnnnnnnnnnnnnnnnnnnnnnnnnnnnnnnnnnnnnnnnnnnnnnnnnnnnnnnnnnnnnnnnnnnnnnnnnnnnnnnnnnnnnnnnnnnnnnnnnnnnnnnnnnnnnnnnnnnnnnnnnnnnnnnnnnnnnnnnnnnnnnnnnnnnnnnnnnnnnnnnnnnnnnnnnnnnnnnnnnnnnnnnnnnnnnnnnnnnnnnnnnnnnnnnnnnnnnnnnnnnnnnnnnnnnnnnnnnnnnnnnnnnnnnnnnnnnnnnnnnnnnnnnnnnnnnnnnnnnnnnnnnnnnnnnnnnnnnnnnnnnnnnnnnnnnnnnnnnnnnnnnnnnnnnnnnnnnnnnnnnnnnnnnnnnnnnnnnnnnnnnnnnnnnnnnnnnnnnnnnnnnnnnnnnnnnnnnnnnnnnnnnnnnnnnnnnnnnnnnnnnnnnnnnnnnnnnnnnnnnnnnnnnnnnnnnnnnnnnnnnnnnnnnnnnnnnnnnnnnnnnnnnnnnnnnnnnnnnnnnnnnnnnnnnnnnnnnnnnnnnnnnnnnnnnnnnnnnnnnnnnnnnnnnnnnnnnnnnnnnnnnnnnnnnnnnnnnnnnnnnnnnnnnnnnnnnnnnnnnnnnnnnnnnnnnnnnnnnnnnnnnnnnnnnnnnnnnnnnnnnnnnnnnnnnnnnnnnnnnnnnnnnnnnnnnnnnnnnnnnnnnnnnnnnnnnnnnnnnnnnnnnnnnnnnnnnnnnnnnnnnnnnnnnnnnnnnnnnnnnnnnnnnnnnnnnnnnnnnnnnnnnnnnnnnnnnnnnnnnnnnnnnnnnnnnnnnnnnnnnnnnnnnnnnnnnnnnnnnnnnnnnnnnnnnnnnnnnnnnnnnnnnnnnnnnnnnnnnnnnnnnnnnnnnnnnnnnnnnnnnnnnnnnnnnnnnnnnnnnnnnnnnnnnnnnnnnnnnnnnnnnnnnnnnnnnnnnnnnnnnnnnnnnnnnnnnnnnnnnnnnnnnnnnnnnnnnnnnnnnnnnnnnnnnnnnnnnnnnnnnnnnnnnnnnnnnnnnnnnnnnnnnnnnnnnnnnnnnnnnnnnnnnnnnnnnnnnnnnnnnnnnnnnnnnnnnnnnnnnnnnnnnnnnnnnnnnnnnnnnnnnnnnnnnnnnnnnnnnnnnnnnnnnnnnnnnnnnnnnnnnnnnnnnnnnnnnnnnnnnnnnnnnnnnnnnnnnnnnnnnnnnnnnnnnnnnnnnnnnnnnnnnnnnnnnnnnnnnnnnnnnnnnnnnnnnnnnnnnnnnnnnnnnnnnnnnnnnnnnnnnnnnnnnnnnnnnnnnnnnnnnnnnnnnnnnnnnnnnnnnnnnnnnnnnnnnnnnnnnnnnnnnnnnnnnnnnnnnnnnnnnnnnnnnnnnnnnnnnnnnnnnnnnnnnnnnnnnnnnnnnnnnnnnnnnnnnnnnnnnnnnnnnnnnnnnnnnnnnnnnnnnnnnnnnnnnnnnnnnnnnnnnnnnnnnnnnnnnnnnnnnnnnnnnnnnnnnnnnnnnnnnnnnnnnnnnnnnnnnnnnnnnnnnnnnnnnnnnnnnnnnnnnnnnnnnnnnnnnnnnnnnnnnnnnnnnnnnnnnnnnnnnnnnnnnnnnnnnnnnnnnnnnnnnnnnnnnnnnnnnnnnnnnnnnnnnnnnnnnnnnnnnnnnnnnnnnnnnnnnnnnnnnnnnnnnnnnnnnnnnnnnnnnnnnnnnnnnnnnnnnnnnnnnnnnnnnnnnnnnnnnnnnnnnnnnnnnnnnnnnnnnnnnnnnnnnnnnnnnnnnnnnnnnnnnnnnnnnnnnnnnnnnnnnnnnnnnnnnnnnnnnnnnnnnnnnnnnnnnnnnnnnnnnnnnnnnnnnnnnnnnnnnnnnnnnnnnnnnnnnnnnnnnnnnnnnnnnnnnnnnnnnnnnnnnnnnnnnnnnnnnnnnnnnnnnnnnnnnnnnnnnnnnnnnnnnnnnnnnnnnnnnnnnnnnnnnnnnnnnnnnnnnnnnnnnnnnnnnnnnnnnnnnnnnnnnnnnnnnnnnnnnnnnnnnnnnnnnnnnnnnnnnnnnnnnnnnnnnnnnnnnnnnnnnnnnnnnnnnnnnnnnnnnnnnnnnnnnnnnnnnnnnnnnnnnnnnnnnnnnnnnnnnnnnnnnnnnnnnnnnnnnnnnnnnnnnnnnnnnnnnnnnnnnnnnnnnnnnnnnnnnnnnnnnnnnnnnnnnnnnnnnnnnnnnnnnnnnnnnnnnnnnnnnnnnnnnnnnnnnnnnnnnnnnnnnnnnnnnnnnnnnnnnnnnnnnnnnnnnnnnnnnnnnnnnnnnnnnnnnnnnnnnnnnnnnnnnnnnnnnnnnnnnnnnnnnnnnnnnnnnnnnnnnnnnnnnnnnnnnnnnnnnnnnnnnnnnnnnnnnnnnnnnnnnnnnnnnnnnnnnnnnnnnnnnnnnnnnnnnnnnnnnnnnnnnnnnnnnnnnnnnnnnnnnnnnnnnnnnnnnnnnnnnnnnnnnnnnnnnnnnnnnnnnnnnnnnnnnnnnnnnnnnnnnnnnnnnnnnnnnnnnnnnnnnnnnnnnnnnnnnnnnnnnnnnnnnnnnnnnnnnnnnnnnnnnnnnnnnnnnnnnnnnnnnnnnnnnnnnnnnnnnnnnnnnnnnnnnnnnnnnnnnnnnnnnnnnnnnnnnnnnnnnnnnnnnnnnnnnnnnnnnnnnnnnnnnnnnnnnnnnnnnnnnnnnnnnnnnnnnnnnnnnnnnnnnnnnnnnnnnnnnnnnnnnnnnnnnnnnnnnnnnnnnnnnnnnnnnnnnnnnnnnnnnnnnnnnnnnnnnnnnnnnnnnnnnnnnnnnnnnnnnnnnnnnnnnnnnnnnnnnnnnnnnnnnnnnnnnnnnnnnnnnnnnnnnnnnnnnnnnnnnnnnnnnnnnnnnnnnnnnnnnnnnnnnnnnnnnnnnnnnnnnnnnnnnnnnnnnnnnnnnnnnnnnnnnnnnnnnnnnnnnnnnnnnnnnnnnnnnnnnnnnnnnnnnnnnnnnnnnnnnnnnnnnnnnnnnnnnnnnnnnnnnnnnnnnnnnnnnnnnnnnnnnnnnnnnnnnnnnnnnnnnnnnnnnnnnnnnnnnnnnnnnnnnnnnnnnnnnnnnnnnnnnnnnnnnnnnnnnnnnnnnnnnnnnnnnnnnnnnnnnnnnnnnnnnnnnnnnnnnnnnnnnnnnnnnnnnnnnnnnnnnnnnnnnnnnnnnnnnnnnnnnnnnnnnnnnnnnnnnnnnnnnnnnnnnnnnnnnnnnnnnnnnnnnnnnnnnnnnnnnnnnnnnnnnnnnnnnnnnnnnnnnnnnnnnnnnnnnnnnnnnnnnnnnnnnnnnnnnnnnnnnnnnnnnnnnnnnnnnnnnnnnnnnnnnnnnnnnnnnnnnnnnnnnnnnnnnnnnnnnnnnnnnnnnnnnnnnnnnnnnnnnnnnnnnnnnnnnnnnnnnnnnnnnnnnnnnnnnnnnnnnnnnnnnnnnnnnnnnnnnnnnnnnnnnnnnnnnnnnnnnnnnnnnnnnnnnnnnnnnnnnnnnnnnnnnnnnnnnnnnnnnnnnnnnnnnnnnnnnnnnnnnnnnnnnnnnnnnnnnnnnnnnnnnnnnnnnnnnnnnnnnnnnnnnnnnnnnnnnnnnnnnnnnnnnnnnnnnnnnnnnnnnnnnnnnnnnnnnnnnnnnnnnnnnnnnnnnnnnnnnnnnnnnnnnnnnnnnnnnnnnnnnnnnnnnnnnnnnnnnnnnnnnnnnnnnnnnnnnnnnnnnnnnnnnnnnnnnnnnnnnnnnnnnnnnnnnnnnnnnnnnnnnnnnnnnnnnnnnnnnnnnnnnnnnnnnnnnnnnnnnnnnnnnnnnnnnnnnnnnnnnnnnnnnnnnnnnnnnnnnnnnnnnnnnnnnnnnnnnnnnnnnnnnnnnnnnnnnnnnnnnnnnnnnnnnnnnnnnnnnnnnnnnnnnnnnnnnnnnnnnnnnnnnnnnnnnnnnnnnnnnnnnnnnnnnnnnnnnnnnnnnnnnnnnnnnnnnnnnnnnnnnnnnnnnnnnnnnnnnnnnnnnnnnnnnnnnnnnnnnnnnnnnnnnnnnnnnnnnnnnnnnnnnnnnnnnnnnnnnnnnnnnnnnnnnnnnnnnnnnnnnnnnnnnnnnnnnnnnnnnnnnnnnnnnnnnnnnnnnnnnnnnnnnnnnnnnnnnnnnnnnnnnnnnnnnnnnnnnnnnnnnnnnnnnnnnnnnnnnnnnnnnnnnnnnnnnnnnnnnnnnnnnnnnnnnnnnnnnnnnnnnnnnnnnnnnnnnnnnnnnnnnnnnnnnnnnnnnnnnnnnnnnnnnnnnnnnnnnnnnnnnnnnnnnnnnnnnnnnnnnnnnnnnnnnnnnnnnnnnnnnnnnnnnnnnnnnnnnnnnnnnnnnnnnnnnnnnnnnnnnnnnnnnnnnnnnnnnnnnnnnnnnnnnnnnnnnnnnnnnnnnnnnnnnnnnnnnnnnnnnnnnnnnnnnnnnnnnnnnnnnnnnnnnnnnnnnnnnnnnnnnnnnnnnnnnnnnnnnnnnnnnnnnnnnnnnnnnnnnnnnnnnnnnnnnnnnnnnnnnnnnnnnnnnnnnnnnnnnnnnnnnnnnnnnnnnnnnnnnnnnnnnnnnnnnnnnnnnnnnnnnnnnnnnnnnnnnnnnnnnnnnnnnnnnnnnnnnnnnnnnnnnnnnnnnnnnnnnnnnnnnnnnnnnnnnnnnnnnnnnnnnnnnnnnnnnnnnnnnnnnnnnnnnnnnnnnnnnnnnnnnnnnnnnnnnnnnnnnnnnnnnnnnnnnnnnnnnnnnnnnnnnnnnnnnnnnnnnnnnnnnnnnnnnnnnnnnnnnnnnnnnnnnnnnnnnnnnnnnnnnnnnnnnnnnnnnnnnnnnnnnnnnnnnnnnnnnnnnnnnnnnnnnnnnnnnnnnnnnnnnnnnnnnnnnnnnnnnnnnnnnnnnnnnnnnnnnnnnnnnnnnnnnnnnnnnnnnnnnnnnnnnnnnnnnnnnnnnnnnnnnnnnnnnnnnnnnnnnnnnnnnnnnnnnnnnnnnnnnnnnnnnnnnnnnnnnnnnnnnnnnnnnnnnnnnnnnnnnnnnnnnnnnnnnnnnnnnnnnnnnnnnnnnnnnnnnnnnnnnnnnnnnnnnnnnnnnnnnnnnnnnnnnnnnnnnnnnnnnnnnnnnnnnnnnnnnnnnnnnnnnnnnnnnnnnnnnnnnnnnnnnnnnnnnnnnnnnnnnnnnnnnnnnnnnnnnnnnnnnnnnnnnnnnnnnnnnnnnnnnnnnnnnnnnnnnnnnnnnnnnnnnnnnnnnnnnnnnnnnnnnnnnnnnnnnnnnnnnnnnnnnnnnnnnnnnnnnnnnnnnnnnnnnnnnnnnnnnnnnnnnnnnnnnnnnnnnnnnnnnnnnnnnnnnnnnnnnnnnnnnnnnnnnnnnnnnnnnnnnnnnnnnnnnnnnnnnnnnnnnnnnnnnnnnnnnnnnnnnnnnnnnnnnnnnnnnnnnnnnnnnnnnnnnnnnnnnnnnnnnnnnnnnnnnnnnnnnnnnnnnnnnnnnnnnnnnnnnnnnnnnnnnnnnnnnnnnnnnnnnnnnnnnnnnnnnnnnnnnnnnnnnnnnnnnnnnnnnnnnnnnnnnnnnnnnnnnnnnnnnnnnnnnnnnnnnnnnnnnnnnnnnnnnnnnnnnnnnnnnnnnnnnnnnnnnnnnnnnnnnnnnnnnnnnnnnnnnnnnnnnnnnnnnnnnnnnnnnnnnnnnnnnnnnnnnnnnnnnnnnnnnnnnnnnnnnnnnnnnnnnnnnnnnnnnnnnnnnnnnnnnnnnnnnnnnnnnnnnnnnnnnnnnnnnnnnnnnnnnnnnnnnnnnnnnnnnnnnnnnnnnnnnnnnnnnnnnnnnnnnnnnnnnnnnnnnnnnnnnnnnnnnnnnnnnnnnnnnnnnnnnnnnnnnnnnnnnnnnnnnnnnnnnnnnnnnnnnnnnnnnnnnnnnnnnnnnnnnnnnnnnnnnnnnnnnnnnnnnnnnnnnnnnnnnnnnnnnnnnnnnnnnnnnnnnnnnnnnnnnnnnnnnnnnnnnnnnnnnnnnnnnnnnnnnnnnnnnnnnnnnnnnnnnnnnnnnnnnnnnnnnnnnnnnnnnnnnnnnnnnnnnnnnnnnnnnnnnnnnnnnnnnnnnnnnnnnnnnnnnnnnnnnnnnnnnnnnnnnnnnnnnnnnnnnnnnnnnnnnnnnnnnnnnnnnnnnnnnnnnnnnnnnnnnnnnnnnnnnnnnnnnnnnnnnnnnnnnnnnnnnnnnnnnnnnnnnnnnnnnnnnnnnnnnnnnnnnnnnnnnnnnnnnnnnnnnnnnnnnnnnnnnnnnnnnnnnnnnnnnnnnnnnnnnnnnnnnnnnnnnnnnnnnnnnnnnnnnnnnnnnnnnnnnnnnnnnnnnnnnnnnnnnnnnnnnnnnnnnnnnnnnnnnnnnnnnnnnnnnnnnnnnnnnnnnnnnnnnnnnnnnnnnnnnnnnnnnnnnnnnnnnnnnnnnnnnnnnnnnnnnnnnnnnnnnnnnnnnnnnnnnnnnnnnnnnnnnnnnnnnnnnnnnnnnnnnnnnnnnnnnnnnnnnnnnnnnnnnnnnnnnnnnnnnnnnnnnnnnnnnnnnnnnnnnnnnnnnnnnnnnnnnnnnnnnnnnnnnnnnnnnnnnnnnnnnnnnnnnnnnnnnnnnnnnnnnnnnnnnnnnnnnnnnnnnnnnnnnnnnnnnnnnnnnnnnnnnnnnnnnnnnnnnnnnnnnnnnnnnnnnnnnnnnnnnnnnnnnnnnnnnnnnnnnnnnnnnnnnnnnnnnnnnnnnnnnnnnnnnnnnnnnnnnnnnnnnnnnnnnnnnnnnnnnnnnnnnnnnnnnnnnnnnnnnnnnnnnnnnnnnnnnnnnnnnnnnnnnnnnnnnnnnnnnnnnnnnnnnnnnnnnnnnnnnnnnnnnnnnnnnnnnnnnnnnnnnnnnnnnnnnnnnnnnnnnnnnnnnnnnnnnnnnnnnnnnnnnnnnnnnnnnnnnnnnnnnnnnnnnnnnnnnnnnnnnnnnnnnnnnnnnnnnnnnnnnnnnnnnnnnnnnnnnnnnnnnnnnnnnnnnnnnnnnnnnnnnnnnnnnnnnnnnnnnnnnnnnnnnnnnnnnnnnnnnnnnnnnnnnnnnnnnnnnnnnnnnnnnnnnnnnnnnnnnnnnnnnnnnnnnnnnnnnnnnnnnnnnnnnnnnnnnnnnnnnnnnnnnnnnnnnnnnnnnnnnnnnnnnnnnnnnnnnnnnnnnnnnnnnnnnnnnnnnnnnnnnnnnnnnnnnnnnnnnnnnnnnnnnnnnnnnnnnnnnnnnnnnnnnnnnnnnnnnnnnnnnnnnnnnnnnnnnnnnnnnnnnnnnnnnnnnnnnnnnnnnnnnnnnnnnnnnnnnnnnnnnnnnnnnnnnnnnnnnnnnnnnnnnnnnnnnnnnnnnnnnnnnnnnnnnnnnnnnnnnnnnnnnnnnnnnnnnnnnnnnnnnnnnnnnnnnnnnnnnnnnnnnnnnnnnnnnnnnnnnnnnnnnnnnnnnnnnnnnnnnnnnnnnnnnnnnnnnnnnnnnnnnnnnnnnnnnnnnnnnnnnnnnnnnnnnnnnnnnnnnnnnnnnnnnnnnnnnnnnnnnnnnnnnnnnnnnnnnnnnnnnnnnnnnnnnnnnnnnnnnnnnnnnnnnnnnnnnnnnnnnnnnnnnnnnnnnnnnnnnnnnnnnnnnnnnnnnnnnnnnnnnnnnnnnnnnnnnnnnnnnnnnnnnnnnnnnnnnnnnnnnnnnnnnnnnnnnnnnnnnnnnnnnnnnnnnnnnnnnnnnnnnnnnnnnnnnnnnnnnnnnnnnnnnnnnnnnnnnnnnnnnnnnnnnnnnnnnnnnnnnnnnnnnnnnnnnnnnnnnnnnnnnnnnnnnnnnnnnnnnnnnnnnnnnnnnnnnnnnnnnnnnnnnnnnnnnnnnnnnnnnnnnnnnnnnnnnnnnnnnnnnnnnnnnnnnnnnnnnnnnnnnnnnnnnnnnnnnnnnnnnnnnnnnnnnnnnnnnnnnnnnnnnnnnnnnnnnnnnnnnnnnnnnnnnnnnnnnnnnnnnnnnnnnnnnnnnnnnnnnnnnnnnnnnnnnnnnnnnnnnnnnnnnnnnnnnnnnnnnnnnnnnnnnnnnnnnnnnnnnnnnnnnnnnnnnnnnnnnnnnnnnnnnnnnnnnnnnnnnnnnnnnnnnnnnnnnnnnnnnnnnnnnnnnnnnnnnnnnnnnnnnnnnnnnnnnnnnnnnnnnnnnnnnnnnnnnnnnnnnnnnnnnnnnnnnnnnnnnnnnnnnnnnnnnnnnnnnnnnnnnnnnnnnnnnnnnnnnnnnnnnnnnnnnnnnnnnnnnnnnnnnnnnnnnnnnnnnnnnnnnnnnnnnnnnnnnnnnnnnnnnnnnnnnnnnnnnnnnnnnnnnnnnnnnnnnnnnnnnnnnnnnnnnnnnnnnnnnnnnnnnnnnnnnnnnnnnnnnnnnnnnnnnnnnnnnnnnnnnnnnnnnnnnnnnnnnnnnnnnnnnnnnnnnnnnnnnnnnnnnnnnnnnnnnnnnnnnnnnnnnnnnnnnnnnnnnnnnnnnnnnnnnnnnnnnnnnnnnnnnnnnnnnnnnnnnnnnnnnnnnnnnnnnnnnnnnnnnnnnnnnnnnnnnnnnnnnnnnnnnnnnnnnnnnnnnnnnnnnnnnnnnnnnnnnnnnnnnnnnnnnnnnnnnnnnnnnnnnnnnnnnnnnnnnnnnnnnnnnnnnnnnnnnnnnnnnnnnnnnnnnnnnnnnnnnnnnnnnnnnnnnnnnnnnnnnnnnnnnnnnnnnnnnnnnnnnnnnnnnnnnnnnnnnnnnnnnnnnnnnnnnnnnnnnnnnnnnnnnnnnnnnnnnnnnnnnnnnnnnnnnnnnnnnnnnnnnnnnnnnnnnnnnnnnnnnnnnnnnnnnnnnnnnnnnnnnnnnnnnnnnnnnnnnnnnnnnnnnnnnnnnnnnnnnnnnnnnnnnnnnnnnnnnnnnnnnnnnnnnnnnnnnnnnnnnnnnnnnnnnnnnnnnnnnnnnnnnnnnnnnnnnnnnnnnnnnnnnnnnnnnnnnnnnnnnnnnnnnnnnnnnnnnnnnnnnnnnnnnnnnnnnnnnnnnnnnnnnnnnnnnnnnnnnnnnnnnnnnnnnnnnnnnnnnnnnnnnnnnnnnnnnnnnnnnnnnnnnnnnnnnnnnnnnnnnnnnnnnnnnnnnnnnnnnnnnnnnnnnnnnnnnnnnnnnnnnnnnnnnnnnnnnnnnnnnnnnnnnnnnnnnnnnnnnnnnnnnnnnnnnnnnnnnnnnnnnnnnnnnnnnnnnnnnnnnnnnnnnnnnnnnnnnnnnnnnnnnnnnnnnnnnnnnnnnnnnnnnnnnnnnnnnnnnnnnnnnnnnnnnnnnnnnnnnnnnnnnnnnnnnnnnnnnnnnnnnnnnnnnnnnnnnnnnnnnnnnnnnnnnnnnnnnnnnnnnnnnnnnnnnnnnnnnnnnnnnnnnnnnnnnnnnnnnnnnnnnnnnnnnnnnnnnnnnnnnnnnnnnnnnnnnnnnnnnnnnnnnnnnnnnnnnnnnnnnnnnnnnnnnnnnnnnnnnnnnnnnnnnnnnnnnnnnnnnnnnnnnnnnnnnnnnnnnnnnnnnnnnnnnnnnnnnnnnnnnnnnnnnnnnnnnnnnnnnnnnnnnnnnnnnnnnnnnnnnnnnnnnnnnnnnnnnnnnnnnnnnnnnnnnnnnnnnnnnnnnnnnnnnnnnnnnnnnnnnnnnnnnnnnnnnnnnnnnnnnnnnnnnnnnnnnnnnnnnnnnnnnnnnnnnnnnnnnnnnnnnnnnnnnnnnnnnnnnnnnnnnnnnnnnnnnnnnnnnnnnnnnnnnnnnnnnnnnnnnnnnnnnnnnnnnnnnnnnnnnnnnnnnnnnnnnnnnnnnnnnnnnnnnnnnnnnnnnnnnnnnnnnnnnnnnnnnnnnnnnnnnnnnnnnnnnnnnnnnnnnnnnnnnnnnnnnnnnnnnnnnnnnnnnnnnnnnnnnnnnnnnnnnnnnnnnnnnnnnnnnnnnnnnnnnnnnnnnnnnnnnnnnnnnnnnnnnnnnnnnnnnnnnnnnnnnnnnnnnnnnnnnnnnnnnnnnnnnnnnnnnnnnnnnnnnnnnnnnnnnnnnnnnnnnnnnnnnnnnnnnnnnnnnnnnnnnnnnnnnnnnnnnnnnnnnnnnnnnnnnnnnnnnnnnnnnnnnnnnnnnnnnnnnnnnnnnnnnnnnnnnnnnnnnnnnnnnnnnnnnnnnnnnnnnnnnnnnnnnnnnnnnnnnnnnnnnnnnnnnnnnnnnnnnnnnnnnnnnnnnnnnnnnnnnnnnnnnnnnnnnnnnnnnnnnnnnnnnnnnnnnnnnnnnnnnnnnnnnnnnnnnnnnnnnnnnnnnnnnnnnnnnnnnnnnnnnnnnnnnnnnnnnnnnnnnnnnnnnnnnnnnnnnnnnnnnnnnnnnnnnnnnnnnnnnnnnnnnnnnnnnnnnnnnnnnnnnnnnnnnnnnnnnnnnnnnnnnnnnnnnnnnnnnnnnnnnnnnnnnnnnnnnnnnnnnnnnnnnnnnnnnnnnnnnnnnnnnnnnnnnnnnnnnnnnnnnnnnnnnnnnnnnnnnnnnnnnnnnnnnnnnnnnnnnnnnnnnnnnnnnnnnnnnnnnnnnnnnnnnnnnnnnnnnnnnnnnnnnnnnnnnnnnnnnnnnnnnnnnnnnnnnnnnnnnnnnnnnnnnnnnnnnnnnnnnnnnnnnnnnnnnnnnnnnnnnnnnnnnnnnnnnnnnnnnnnnnnnnnnnnnnnnnnnnnnnnnnnnnnnnnnnnnnnnnnnnnnnnnnnnnnnnnnnnnnnnnnnnnnnnnnnnnnnnnnnnnnnnnnnnnnnnnnnnnnnnnnnnnnnnnnnnnnnnnnnnnnnnnnnnnnnnnnnnnnnnnnnnnnnnnnnnnnnnnnnnnnnnnnnnnnnnnnnnnnnnnnnnnnnnnnnnnnnnnnnnnnnnnnnnnnnnnnnnnnnnnnnnnnnnnnnnnnnnnnnnnnnnnnnnnnnnnnnnnnnnnnnnnnnnnnnnnnnnnnnnnnnnnnnnnnnnnnnnnnnnnnnnnnnnnnnnnnnnnnnnnnnnnnnnnnnnnnnnnnnnnnnnnnnnnnnnnnnnnnnnnnnnnnnnnnnnnnnnnnnnnnnnnnnnnnnnnnnnnnnnnnnnnnnnnnnnnnnnnnnnnnnnnnnnnnnnnnnnnnnnnnnnnnnnnnnnnnnnnnnnnnnnnnnnnnnnnnnnnnnnnnnnnnnnnnnnnnnnnnnnnnnnnnnnnnnnnnnnnnnnnnnnnnnnnnnnnnnnnnnnnnnnnnnnnnnnnnnnnnnnnnnnnnnnnnnnnnnnnnnnnnnnnnnnnnnnnnnnnnnnnnnnnnnnnnnnnnnnnnnnnnnnnnnnnnnnnnnnnnnnnnnnnnnnnnnnnnnnnnnnnnnnnnnnnnnnnnnnnnnnnnnnnnnnnnnnnnnnnnnnnnnnnnnnnnnnnnnnnnnnnnnnnnnnnnnnnnnnnnnnnnnnnnnnnnnnnnnnnnnnnnnnnnnnnnnnnnnnnnnnnnnnnnnnnnnnnnnnnnnnnnnnnnnnnnnnnnnnnnnnnnnnnnnnnnnnnnnnnnnnnnnnnnnnnnnnnnnnnnnnnnnnnnnnnnnnnnnnnnnnnnnnnnnnnnnnnnnnnnnnnnnnnnnnnnnnnnnnnnnnnnnnnnnnnnnnnnnnnnnnnnnnnnnnnnnnnnnnnnnnnnnnnnnnnnnnnnnnnnnnnnnnnnnnnnnnnnnnnnnnnnnnnnnnnnnnnnnnnnnnnnnnnnnnnnnnnnnnnnnnnnnnnnnnnnnnnnnnnnnnnnnnnnnnnnnnnnnnnnnnnnnnnnnnnnnnnnnnnnnnnnnnnnnnnnnnnnnnnnnnnnnnnnnnnnnnnnnnnnnnnnnnnnnnnnnnnnnnnnnnnnnnnnnnnnnnnnnnnnnnnnnnnnnnnnnnnnnnnnnnnnnnnnnnnnnnnnnnnnnnnnnnnnnnnnnnnnnnnnnnnnnnnnnnnnnnnnnnnnnnnnnnnnnnnnnnnnnnnnnnnnnnnnnnnnnnnnnnnnnnnnnnnnnnnnnnnnnnnnnnnnnnnnnnnnnnnnnnnnnnnnnnnnnnnnnnnnnnnnnnnnnnnnnnnnnnnnnnnnnnnnnnnnnnnnnnnnnnnnnnnnnnnnnnnnnnnnnnnnnnnnnnnnnnnnnnnnnnnnnnnnnnnnnnnnnnnnnnnnnnnnnnnnnnnnnnnnnnnnnnnnnnnnnnnnnnnnnnnnnnnnnnnnnnnnnnnnnnnnnnnnnnnnnnnnnnnnnnnnnnnnnnnnnnnnnnnnnnnnnnnnnnnnnnnnnnnnnnnnnnnnnnnnnnnnnnnnnnnnnnnnnnnnnnnnnnnnnnnnnnnnnnnnnnnnnnnnnnnnnnnnnnnnnnnnnnnnnnnnnnnnnnnnnnnnnnnnnnnnnnnnnnnnnnnnnnnnnnnnnnnnnnnnnnnnnnnnnnnnnnnnnnnnnnnnnnnnnnnnnnnnnnnnnnnnnnnnnnnnnnnnnnnnnnnnnnnnnnnnnnnnnnnnnnnnnnnnnnnnnnnnnnnnnnnnnnnnnnnnnnnnnnnnnnnnnnnnnnnnnnnnnnnnnnnnnnnnnnnnnnnnnnnnnnnnnnnnnnnnnnnnnnnnnnnnnnnnnnnnnnnnnnnnnnnnnnnnnnnnnnnnnnnnnnnnnnnnnnnnnnnnnnnnnnnnnnnnnnnnnnnnnnnnnnnnnnnnnnnnnnnnnnnnnnnnnnnnnnnnnnnnnnnnnnnnnnnnnnnnnnnnnnnnnnnnnnnnnnnnnnnnnnnnnnnnnnnnnnnnnnnnnnnnnnnnnnnnnnnnnnnnnnnnnnnnnnnnnnnnnnnnnnnnnnnnnnnnnnnnnnnnnnnnnnnnnnnnnnnnnnnnnnnnnnnnnnnnnnnnnnnnnnnnnnnnnnnnnnnnnnnnnnnnnnnnnnnnnnnnnnnnnnnnnnnnnnnnnnnnnnnnnnnnnnnnnnnnnnnnnnnnnnnnnnnnnnnnnnnnnnnnnnnnnnnnnnnnnnnnnnnnnnnnnnnnnnnnnnnnnnnnnnnnnnnnnnnnnnnnnnnnnnnnnnnnnnnnnnnnnnnnnnnnnnnnnnnnnnnnnnnnnnnnnnnnnnnnnnnnnnnnnnnnnnnnnnnnnnnnnnnnnnnnnnnnnnnnnnnnnnnnnnnnnnnnnnnnnnnnnnnnnnnnnnnnnnnnnnnnnnnnnnnnnnnnnnnnnnnnnnnnnnnnnnnnnnnnnnnnnnnnnnnnnnnnnnnnnnnnnnnnnnnnnnnnnnnnnnnnnnnnnnnnnnnnnnnnnnnnnnnnnnnnnnnnnnnnnnnnnnnnnnnnnnnnnnnnnnnnnnnnnnnnnnnnnnnnnnnnnnnnnnnnnnnnnnnnnnnnnnnnnnnnnnnnnnnnnnnnnnnnnnnnnnnnnnnnnnnnnnnnnnnnnnnnnnnnnnnnnnnnnnnnnnnnnnnnnnnnnnnnnnnnnnnnnnnnnnnnnnnnnnnnnnnnnnnnnnnnnnnnnnnnnnnnnnnnnnnnnnnnnnnnnnnnnnnnnnnnnnnnnnnnnnnnnnnnnnnnnnnnnnnnnnnnnnnnnnnnnnnnnnnnnnnnnnnnnnnnnnnnnnnnnnnnnnnnnnnnnnnnnnnnnnnnnnnnnnnnnnnnnnnnnnnnnnnnnnnnnnnnnnnnnnnnnnnnnnnnnnnnnnnnnnnnnnnnnnnnnnnnnnnnnnnnnnnnnnnnnnnnnnnnnnnnnnnnnnnnnnnnnnnnnnnnnnnnnnnnnnnnnnnnnnnnnnnnnnnnnnnnnnnnnnnnnnnnnnnnnnnnnnnnnnnnnnnnnnnnnnnnnnnnnnnnnnnnnnnnnnnnnnnnnnnnnnnnnnnnnnnnnnnnnnnnnnnnnnnnnnnnnnnnnnnnnnnnnnnnnnnnnnnnnnnnnnnnnnnnnnnnnnnnnnnnnnnnnnnnnnnnnnnnnnnnnnnnnnnnnnnnnnnnnnnnnnnnnnnnnnnnnnnnnnnnnnnnnnnnnnnnnnnnnnnnnnnnnnnnnnnnnnnnnnnnnnnnnnnnnnnnnnnnnnnnnnnnnnnnnnnnnnnnnnnnnnnnnnnnnnnnnnnnnnnnnnnnnnnnnnnnnnnnnnnnnnnnnnnnnnnnnnnnnnnnnnnnnnnnnnnnnnnnnnnnnnnnnnnnnnnnnnnnnnnnnnnnnnnnnnnnnnnnnnnnnnnnnnnnnnnnnnnnnnnnnnnnnnnnnnnnnnnnnnnnnnnnnnnnnnnnnnnnnnnnnnnnnnnnnnnnnnnnnnnnnnnnnnnnnnnnnnnnnnnnnnnnnnnnnnnnnnnnnnnnnnnnnnnnnnnnnnnnnnnnnnnnnnnnnnnnnnnnnnnnnnnnnnnnnnnnnnnnnnnnnnnnnnnnnnnnnnnnnnnnnnnnnnnnnnnnnnnnnnnnnnnnnnnnnnnnnnnnnnnnnnnnnnnnnnnnnnnnnnnnnnnnnnnnnnnnnnnnnnnnnnnnnnnnnnnnnnnnnnnnnnnnnnnnnnnnnnnnnnnnnnnnnnnnnnnnnnnnnnnnnnnnnnnnnnnnnnnnnnnnnnnnnnnnnnnnnnnnnnnnnnnnnnnnnnnnnnnnnnnnnnnnnnnnnnnnnnnnnnnnnnnnnnnnnnnnnnnnnnnnnnnnnnnnnnnnnnnnnnnnnnnnnnnnnnnnnnnnnnnnnnnnnnnnnnnnnnnnnnnnnnnnnnnnnnnnnnnnnnnnnnnnnnnnnnnnnnnnnnnnnnnnnnnnnnnnnnnnnnnnnnnnnnnnnnnnnnnnnnnnnnnnnnnnnnnnnnnnnnnnnnnnnnnnnnnnnnnnnnnnnnnnnnnnnnnnnnnnnnnnnnnnnnnnnnnnnnnnnnnnnnnnnnnnnnnnnnnnnnnnnnnnnnnnnnnnnnnnnnnnnnnnnnnnnnnnnnnnnnnnnnnnnnnnnnnnnnnnnnnnnnnnnnnnnnnnnnnnnnnnnnnnnnnnnnnnnnnnnnnnnnnnnnnnnnnnnnnnnnnnnnnnnnnnnnnnnnnnnnnnnnnnnnnnnnnnnnnnnnnnnnnnnnnnnnnnnnnnnnnnnnnnnnnnnnnnnnnnnnnnnnnnnnnnnnnnnnnnnnnnnnnnnnnnnnnnnnnnnnnnnnnnnnnnnnnnnnnnnnnnnnnnnnnnnnnnnnnnnnnnnnnnnnnnnnnnnnnnnnnnnnnnnnnnnnnnnnnnnnnnnnnnnnnnnnnnnnnnnnnnnnnnnnnnnnnnnnnnnnnnnnnnnnnnnnnnnnnnnnnnnnnnnnnnnnnnnnnnnnnnnnnnnnnnnnnnnnnnnnnnnnnnnnnnnnnnnnnnnnnnnnnnnnnnnnnnnnnnnnnnnnnnnnnnnnnnnnnnnnnnnnnnnnnnnnnnnnnnnnnnnnnnnnnnnnnnnnnnnnnnnnnnnnnnnnnnnnnnnnnnnnnnnnnnnnnnnnnnnnnnnnnnnnnnnnnnnnnnnnnnnnnnnnnnnnnnnnnnnnnnnnnnnnnnnnnnnnnnnnnnnnnnnnnnnnnnnnnnnnnnnnnnnnnnnnnnnnnnnnnnnnnnnnnnnnnnnnnnnnnnnnnnnnnnnnnnnnnnnnnnnnnnnnnnnnnnnnnnnnnnnnnnnnnnnnnnnnnnnnnnnnnnnnnnnnnnnnnnnnnnnnnnnnnnnnnnnnnnnnnnnnnnnnnnnnnnnnnnnnnnnnnnnnnnnnnnnnnnnnnnnnnnnnnnnnnnnnnnnnnnnnnnnnnnnnnnnnnnnnnnnnnnnnnnnnnnnnnnnnnnnnnnnnnnnnnnnnnnnnnnnnnnnnnnnnnnnnnnnnnnnnnnnnnnnnnnnnnnnnnnnnnnnnnnnnnnnnnnnnnnnnnnnnnnnnnnnnnnnnnnnnnnnnnnnnnnnnnnnnnnnnnnnnnnnnnnnnnnnnnnnnnnnnnnnnnnnnnnnnnnnnnnnnnnnnnnnnnnnnnnnnnnnnnnnnnnnnnnnnnnnnnnnnnnnnnnnnnnnnnnnnnnnnnnnnnnnnnnnnnnnnnnnnnnnnnnnnnnnnnnnnnnnnnnnnnnnnnnnnnnnnnnnnnnnnnnnnnnnnnnnnnnnnnnnnnnnnnnnnnnnnnnnnnnnnnnnnnnnnnnnnnnnnnnnnnnnnnnnnnnnnnnnnnnnnnnnnnnnnnnnnnnnnnnnnnnnnnnnnnnnnnnnnnnnnnnnnnnnnnnnnnnnnnnnnnnnnnnnnnnnnnnnnnnnnnnnnnnnnnnnnnnnnnnnnnnnnnnnnnnnnnnnnnnnnnnnnnnnnnnnnnnnnnnnnnnnnnnnnnnnnnnnnnnnnnnnnnnnnnnnnnnnnnnnnnnnnnnnnnnnnnnnnnnnnnnnnnnnnnnnnnnnnnnnnnnnnnnnnnnnnnnnnnnnnnnnnnnnnnnnnnnnnnnnnnnnnnnnnnnnnnnnnnnnnnnnnnnnnnnnnnnnnnnnnnnnnnnnnnnnnnnnnnnnnnnnnnnnnnnnnnnnnnnnnnnnnnnnnnnnnnnnnnnnnnnnnnnnnnnnnnnnnnnnnnnnnnnnnnnnnnnnnnnnnnnnnnnnnnnnnnnnnnnnnnnnnnnnnnnnnnnnnnnnnnnnnnnnnnnnnnnnnnnnnnnnnnnnnnnnnnnnnnnnnnnnnnnnnnnnnnnnnnnnnnnnnnnnnnnnnnnnnnnnnnnnnnnnnnnnnnnnnnnnnnnnnnnnnnnnnnnnnnnnnnnnnnnnnnnnnnnnnnnnnnnnnnnnnnnnnnnnnnnnnnnnnnnnnnnnnnnnnnnnnnnnnnnnnnnnnnnnnnnnnnnnnnnnnnnnnnnnnnnnnnnnnnnnnnnnnnnnnnnnnnnnnnnnnnnnnnnnnnnnnnnnnnnnnnnnnnnnnnnnnnnnnnnnnnnnnnnnnnnnnnnnnnnnnnnnnnnnnnnnnnnnnnnnnnnnnnnnnnnnnnnnnnnnnnnnnnnnnnnnnnnnnnnnnnnnnnnnnnnnnnnnnnnnnnnnnnnnnnnnnnnnnnnnnnnnnnnnnnnnnnnnnnnnnnnnnnnnnnnnnnnnnnnnnnnnnnnnnnnnnnnnnnnnnnnnnnnnnnnnnnnnnnnnnnnnnnnnnnnnnnnnnnnnnnnnnnnnnnnnnnnnnnnnnnnnnnnnnnnnnnnnnnnnnnnnnnnnnnnnnnnnnnnnnnnnnnnnnnnnnnnnnnnnnnnnnnnnnnnnnnnnnnnnnnnnnnnnnnnnnnnnnnnnnnnnnnnnnnnnnnnnnnnnnnnnnnnnnnnnnnnnnnnnnnnnnnnnnnnnnnnnnnnnnnnnnnnnnnnnnnnnnnnnnnnnnnnnnnnnnnnnnnnnnnnnnnnnnnnnnnnnnnnnnnnnnnnnnnnnnnnnnnnnnnnnnnnnnnnnnnnnnnnnnnnnnnnnnnnnnnnnnnnnnnnnnnnnnnnnnnnnnnnnnnnnnnnnnnnnnnnnnnnnnnnnnnnnnnnnnnnnnnnnnnnnnnnnnnnnnnnnnnnnnnnnnnnnnnnnnnnnnnnnnnnnnnnnnnnnnnnnnnnnnnnnnnnnnnnnnnnnnnnnnnnnnnnnnnnnnnnnnnnnnnnnnnnnnnnnnnnnnnnnnnnnnnnnnnnnnnnnnnnnnnnnnnnnnnnnnnnnnnnnnnnnnnnnnnnnnnnnnnnnnnnnnnnnnnnnnnnnnnnnnnnnnnnnnnnnnnnnnnnnnnnnnnnnnnnnnnnnnnnnnnnnnnnnnnnnnnnnnnnnnnnnnnnnnnnnnnnnnnnnnnnnnnnnnnnnnnnnnnnnnnnnnnnnnnnnnnnnnnnnnnnnnnnnnnnnnnnnnnnnnnnnnnnnnnnnnnnnnnnnnnnnnnnnnnnnnnnnnnnnnnnnnnnnnnnnnnnnnnnnnnnnnnnnnnnnnnnnnnnnnnnnnnnnnnnnnnnnnnnnnnnnnnnnnnnnnnnnnnnnnnnnnnnnnnnnnnnnnnnnnnnnnnnnnnnnnnnnnnnnnnnnnnnnnnnnnnnnnnnnnnnnnnnnnnnnnnnnnnnnnnnnnnnnnnnnnnnnnnnnnnnnnnnnnnnnnnnnnnnnnnnnnnnnnnnnnnnnnnnnnnnnnnnnnnnnnnnnnnnnnnnnnnnnnnnnnnnnnnnnnnnnnnnnnnnnnnnnnnnnnnnnnnnnnnnnnnnnnnnnnnnnnnnnnnnnnnnnnnnnnnnnnnnnnnnnnnnnnnnnnnnnnnnnnnnnnnnnnnnnnnnnnnnnnnnnnnnnnnnnnnnnnnnnnnnnnnnnnnnnnnnnnnnnnnnnnnnnnnnnnnnnnnnnnnnnnnnnnnnnnnnnnnnnnnnnnnnnnnnnnnnnnnnnnnnnnnnnnnnnnnnnnnnnnnnnnnnnnnnnnnnnnnnnnnnnnnnnnnnnnnnnnnnnnnnnnnnnnnnnnnnnnnnnnnnnnnnnnnnnnnnnnnnnnnnnnnnnnnnnnnnnnnnnnnnnnnnnnnnnnnnnnnnnnnnnnnnnnnnnnnnnnnnnnnnnnnnnnnnnnnnnnnnnnnnnnnnnnnnnnnnnnnnnnnnnnnnnnnnnnnnnnnnnnnnnnnnnnnnnnnnnnnnnnnnnnnnnnnnnnnnnnnnnnnnnnnnnnnnnnnnnnnnnnnnnnnnnnnnnnnnnnnnnnnnnnnnnnnnnnnnnnnnnnnnnnnnnnnnnnnnnnnnnnnnnnnnnnnnnnnnnnnnnnnnnnnnnnnnnnnnnnnnnnnnnnnnnnnnnnnnnnnnnnnnnnnnnnnnnnnnnnnnnnnnnnnnnnnnnnnnnnnnnnnnnnnnnnnnnnnnnnnnnnnnnnnnnnnnnnnnnnnnnnnnnnnnnnnnnnnnnnnnnnnnnnnnnnnnnnnnnnnnnnnnnnnnnnnnnnnnnnnnnnnnnnnnnnnnnnnnnnnnnnnnnnnnnnnnnnnnnnnnnnnnnnnnnnnnnnnnnnnnnnnnnnnnnnnnnnnnnnnnnnnnnnnnnnnnnnnnnnnnnnnnnnnnnnnnnnnnnnnnnnnnnnnnnnnnnnnnnnnnnnnnnnnnnnnnnnnnnnnnnnnnnnnnnnnnnnnnnnnnnnnnnnnnnnnnnnnnnnnnnnnnnnnnnnnnnnnnnnnnnnnnnnnnnnnnnnnnnnnnnnnnnnnnnnnnnnnnnnnnnnnnnnnnnnnnnnnnnnnnnnnnnnnnnnnnnnnnnnnnnnnnnnnnnnnnnnnnnnnnnnnnnnnnnnnnnnnnnnnnnnnnnnnnnnnnnnnnnnnnnnnnnnnnnnnnnnnnnnnnnnnnnnnnnnnnnnnnnnnnnnnnnnnnnnnnnnnnnnnnnnnnnnnnnnnnnnnnnnnnnnnnnnnnnnnnnnnnnnnnnnnnnnnnnnnnnnnnnnnnnnnnnnnnnnnnnnnnnnnnnnnnnnnnnnnnnnnnnnnnnnnnnnnnnnnnnnnnnnnnnnnnnnnnnnnnnnnnnnnnnnnnnnnnnnnnnnnnnnnnnnnnnnnnnnnnnnnnnnnnnnnnnnnnnnnnnnnnnnnnnnnnnnnnnnnnnnnnnnnnnnnnnnnnnnnnnnnnnnnnnnnnnnnnnnnnnnnnnnnnnnnnnnnnnnnnnnnnnnnnnnnnnnnnnnnnnnnnnnnnnnnnnnnnnnnnnnnnnnnnnnnnnnnnnnnnnnnnnnnnnnnnnnnnnnnnnnnnnnnnnnnnnnnnnnnnnnnnnnnnnnnnnnnnnnnnnnnnnnnnnnnnnnnnnnnnnnnnnnnnnnnnnnnnnnnnnnnnnnnnnnnnnnnnnnnnnnnnnnnnnnnnnnnnnnnnnnnnnnnnnnnnnnnnnnnnnnnnnnnnnnnnnnnnnnnnnnnnnnnnnnnnnnnnnnnnnnnnnnnnnnnnnnnnnnnnnnnnnnnnnnnnnnnnnnnnnnnnnnnnnnnnnnnnnnnnnnnnnnnnnnnnnnnnnnnnnnnnnnnnnnnnnnnnnnnnnnnnnnnnnnnnnnnnnnnnnnnnnnnnnnnnnnnnnnnnnnnnnnnnnnnnnnnnnnnnnnnnnnnnnnnnnnnnnnnnnnnnnnnnnnnnnnnnnnnnnnnnnnnnnnnnnnnnnnnnnnnnnnnnnnnnnnnnnnnnnnnnnnnnnnnnnnnnnnnnnnnnnnnnnnnnnnnnnnnnnnnnnnnnnnnnnnnnnnnnnnnnnnnnnnnnnnnnnnnnnnnnnnnnnnnnnnnnnnnnnnnnnnnnnnnnnnnnnnnnnnnnnnnnnnnnnnnnnnnnnnnnnnnnnnnnnnnnnnnnnnnnnnnnnnnnnnnnnnnnnnnnnnnnnnnnnnnnnnnnnnnnnnnnnnnnnnnnnnnnnnnnnnnnnnnnnnnnnnnnnnnnnnnnnnnnnnnnnnnnnnnnnnnnnnnnnnnnnnnnnnnnnnnnnnnnnnnnnnnnnnnnnnnnnnnnnnnnnnnnnnnnnnnnnnnnnnnnnnnnnnnnnnnnnnnnnnnnnnnnnnnnnnnnnnnnnnnnnnnnnnnnnnnnnnnnnnnnnnnnnnnnnnnnnnnnnnnnnnnnnnnnnnnnnnnnnnnnnnnnnnnnnnnnnnnnnnnnnnnnnnnnnnnnnnnnnnnnnnnnnnnnnnnnnnnnnnnnnnnnnnnnnnnnnnnnnnnnnnnnnnnnnnnnnnnnnnnnnnnnnnnnnnnnnnnnnnnnnnnnnnnnnnnnnnnnnnnnnnnnnnnnnnnnnnnnnnnnnnnnnnnnnnnnnnnnnnnnnnnnnnnnnnnnnnnnnnnnnnnnnnnnnnnnnnnnnnnnnnnnnnnnnnnnnnnnnnnnnnnnnnnnnnnnnnnnnnnnnnnnnnnnnnnnnnnnnnnnnnnnnnnnnnnnnnnnnnnnnnnnnnnnnnnnnnnnnnnnnnnnnnnnnnnnnnnnnnnnnnnnnnnnnnnnnnnnnnnnnnnnnnnnnnnnnnnnnnnnnnnnnnnnnnnnnnnnnnnnnnnnnnnnnnnnnnnnnnnnnnnnnnnnnnnnnnnnnnnnnnnnnnnnnnnnnnnnnnnnnnnnnnnnnnnnnnnnnnnnnnnnnnnnnnnnnnnnnnnnnnnnnnnnnnnnnnnnnnnnnnnnnnnnnnnnnnnnnnnnnnnnnnnnnnnnnnnnnnnnnnnnnnnnnnnnnnnnnnnnnnnnnnnnnnnnnnnnnnnnnnnnnnnnnnnnnnnnnnnnnnnnnnnnnnnnnnnnnnnnnnnnnnnnnnnnnnnnnnnnnnnnnnnnnnnnnnnnnnnnnnnnnnnnnnnnnnnnnnnnnnnnnnnnnnnnnnnnnnnnnnnnnnnnnnnnnnnnnnnnnnnnnnnnnnnnnnnnnnnnnnnnnnnnnnnnnnnnnnnnnnnnnnnnnnnnnnnnnnnnnnnnnnnnnnnnnnnnnnnnnnnnnnnnnnnnnnnnnnnnnnnnnnnnnnnnnnnnnnnnnnnnnnnnnnnnnnnnnnnnnnnnnnnnnnnnnnnnnnnnnnnnnnnnnnnnnnnnnnnnnnnnnnnnnnnnnnnnnnnnnnnnnnnnnnnnnnnnnnnnnnnnnnnnnnnnnnnnnnnnnnnnnnnnnnnnnnnnnnnnnnnnnnnnnnnnnnnnnnnnnnnnnnnnnnnnnnnnnnnnnnnnnnnnnnnnnnnnnnnnnnnnnnnnnnnnnnnnnnnnnnnnnnnnnnnnnnnnnnnnnnnnnnnnnnnnnnnnnnnnnnnnnnnnnnnnnnnnnnnnnnnnnnnnnnnnnnnnnnnnnnnnnnnnnnnnnnnnnnnnnnnnnnnnnnnnnnnnnnnnnnnnnnnnnnnnnnnnnnnnnnnnnnnnnnnnnnnnnnnnnnnnnnnnnnnnnnnnnnnnnnnnnnnnnnnnnnnnnnnnnnnnnnnnnnnnnnnnnnnnnnnnnnnnnnnnnnnnnnnnnnnnnnnnnnnnnnnnnnnnnnnnnnnnnnnnnnnnnnnnnnnnnnnnnnnnnnnnnnnnnnnnnnnnnnnnnnnnnnnnnnnnnnnnnnnnnnnnnnnnnnnnnnnnnnnnnnnnnnnnnnnnnnnnnnnnnnnnnnnnnnnnnnnnnnnnnnnnnnnnnnnnnnnnnnnnnnnnnnnnnnnnnnnnnnnnnnnnnnnnnnnnnnnnnnnnnnnnnnnnnnnnnnnnnnnnnnnnnnnnnnnnnnnnnnnnnnnnnnnnnnnnnnnnnnnnnnnnnnnnnnnnnnnnnnnnnnnnnnnnnnnnnnnnnnnnnnnnnnnnnnnnnnnnnnnnnnnnnnnnnnnnnnnnnnnnnnnnnnnnnnnnnnnnnnnnnnnnnnnnnnnnnnnnnnnnnnnnnnnnnnnnnnnnnnnnnnnnnnnnnnnnnnnnnnnnnnnnnnnnnnnnnnnnnnnnnnnnnnnnnnnnnnnnnnnnnnnnnnnnnnnnnnnnnnnnnnnnnnnnnnnnnnnnnnnnnnnnnnnnnnnnnnnnnnnnnnnnnnnnnnnnnnnnnnnnnnnnnnnnnnnnnnnnnnnnnnnnnnnnnnnnnnnnnnnnnnnnnnnnnnnnnnnnnnnnnnnnnnnnnnnnnnnnnnnnnnnnnnnnnnnnnnnnnnnnnnnnnnnnnnnnnnnnnnnnnnnnnnnnnnnnnnnnnnnnnnnnnnnnnnnnnnnnnnnnnnnnnnnnnnnnnnnnnnnnnnnnnnnnnnnnnnnnnnnnnnnnnnnnnnnnnnnnnnnnnnnnnnnnnnnnnnnnnnnnnnnnnnnnnnnnnnnnnnnnnnnnnnnnnnnnnnnnnnnnnnnnnnnnnnnnnnnnnnnnnnnnnnnnnnnnnnnnnnnnnnnnnnnnnnnnnnnnnnnnnnnnnnnnnnnnnnnnnnnnnnnnnnnnnnnnnnnnnnnnnnnnnnnnnnnnnnnnnnnnnnnnnnnnnnnnnnnnnnnnnnnnnnnnnnnnnnnnnnnnnnnnnnnnnnnnnnnnnnnnnnnnnnnnnnnnnnnnnnnnnnnnnnnnnnnnnnnnnnnnnnnnnnnnnnnnnnnnnnnnnnnnnnnnnnnnnnnnnnnnnnnnnnnnnnnnnnnnnnnnnnnnnnnnnnnnnnnnnnnnnnnnnnnnnnnnnnnnnnnnnnnnnnnnnnnnnnnnnnnnnnnnnnnnnnnnnnnnnnnnnnnnnnnnnnnnnnnnnnnnnnnnnnnnnnnnnnnnnnnnnnnnnnnnnnnnnnnnnnnnnnnnnnnnnnnnnnnnnnnnnnnnnnnnnnnnnnnnnnnnnnnnnnnnnnnnnnnnnnnnnnnnnnnnnnnnnnnnnnnnnnnnnnnnnnnnnnnnnnnnnnnnnnnnnnnnnnnnnnnnnnnnnnnnnnnnnnnnnnnnnnnnnnnnnnnnnnnnnnnnnnnnnnnnnnnnnnnnnnnnnnnnnnnnnnnnnnnnnnnnnnnnnnnnnnnnnnnnnnnnnnnnnnnnnnnnnnnnnnnnnnnnnnnnnnnnnnnnnnnnnnnnnnnnnnnnnnnnnnnnnnnnnnnnnnnnnnnnnnnnnnnnnnnnnnnnnnnnnnnnnnnnnnnnnnnnnnnnnnnnnnnnnnnnnnnnnnnnnnnnnnnnnnnnnnnnnnnnnnnnnnnnnnnnnnnnnnnnnnnnnnnnnnnnnnnnnnnnnnnnnnnnnnnnnnnnnnnnnnnnnnnnnnnnnnnnnnnnnnnnnnnnnnnnnnnnnnnnnnnnnnnnnnnnnnnnnnnnnnnnnnnnnnnnnnnnnnnnnnnnnnnnnnnnnnnnnnnnnnnnnnnnnnnnnnnnnnnnnnnnnnnnnnnnnnnnnnnnnnnnnnnnnnnnnnnnnnnnnnnnnnnnnnnnnnnnnnnnnnnnnnnnnnnnnnnnnnnnnnnnnnnnnnnnnnnnnnnnnnnnnnnnnnnnnnnnnnnnnnnnnnnnnnnnnnnnnnnnnnnnnnnnnnnnnnnnnnnnnnnnnnnnnnnnnnnnnnnnnnnnnnnnnnnnnnnnnnnnnnnnnnnnnnnnnnnnnnnnnnnnnnnnnnnnnnnnnnnnnnnnnnnnnnnnnnnnnnnnnnnnnnnnnnnnnnnnnnnnnnnnnnnnnnnnnnnnnnnnnnnnnnnnnnnnnnnnnnnnnnnnnnnnnnnnnnnnnnnnnnnnnnnnnnnnnnnnnnnnnnnnnnnnnnnnnnnnnnnnnnnnnnnnnnnnnnnnnnnnnnnnnnnnnnnnnnnnnnnnnnnnnnnnnnnnnnnnnnnnnnnnnnnnnnnnnnnnnnnnnnnnnnnnnnnnnnnnnnnnnnnnnnnnnnnnnnnnnnnnnnnnnnnnnnnnnnnnnnnnnnnnnnnnnnnnnnnnnnnnnnnnnnnnnnnnnnnnnnnnnnnnnnnnnnnnnnnnnnnnnnnnnnnnnnnnnnnnnnnnnnnnnnnnnnnnnnnnnnnnnnnnnnnnnnnnnnnnnnnnnnnnnnnnnnnnnnnnnnnnnnnnnnnnnnnnnnnnnnnnnnnnnnnnnnnnnnnnnnnnnnnnnnnnnnnnnnnnnnnnnnnnnnnnnnnnnnnnnnnnnnnnnnnnnnnnnnnnnnnnnnnnnnnnnnnnnnnnnnnnnnnnnnnnnnnnnnnnnnnnnnnnnnnnnnnnnnnnnnnnnnnnnnnnnnnnnnnnnnnnnnnnnnnnnnnnnnnnnnnnnnnnnnnnnnnnnnnnnnnnnnnnnnnnnnnnnnnnnnnnnnnnnnnnnnnnnnnnnnnnnnnnnnnnnnnnnnnnnnnnnnnnnnnnnnnnnnnnnnnnnnnnnnnnnnnnnnnnnnnnnnnnnnnnnnnnnnnnnnnnnnnnnnnnnnnnnnnnnnnnnnnnnnnnnnnnnnnnnnnnnnnnnnnnnnnnnnnnnnnnnnnnnnnnnnnnnnnnnnnnnnnnnnnnnnnnnnnnnnnnnnnnnnnnnnnnnnnnnnnnnnnnnnnnnnnnnnnnnnnnnnnnnnnnnnnnnnnnnnnnnnnnnnnnnnnnnnnnnnnnnnnnnnnnnnnnnnnnnnnnnnnnnnnnnnnnnnnnnnnnnnnnnnnnnnnnnnnnnnnnnnnnnnnnnnnnnnnnnnnnnnnnnnnnnnnnnnnnnnnnnnnnnnnnnnnnnnnnnnnnnnnnnnnnnnnnnnnnnnnnnnnnnnnnnnnnnnnnnnnnnnnnnnnnnnnnnnnnnnnnnnnnnnnnnnnnnnnnnnnnnnnnnnnnnnnnnnnnnnnnnnnnnnnnnnnnnnnnnnnnnnnnnnnnnnnnnnnnnnnnnnnnnnnnnnnnnnnnnnnnnnnnnnnnnnnnnnnnnnnnnnnnnnnnnnnnnnnnnnnnnnnnnnnnnnnnnnnnnnnnnnnnnnnnnnnnnnnnnnnnnnnnnnnnnnnnnnnnnnnnnnnnnnnnnnnnnnnnnnnnnnnnnnnnnnnnnnnnnnnnnnnnnnnnnnnnnnnnnnnnnnnnnnnnnnnnnnnnnnnnnnnnnnnnnnnnnnnnnnnnnnnnnnnnnnnnnnnnnnnnnnnnnnnnnnnnnnnnnnnnnnnnnnnnnnnnnnnnnnnnnnnnnnnnnnnnnnnnnnnnnnnnnnnnnnnnnnnnnnnnnnnnnnnnnnnnnnnnnnnnnnnnnnnnnnnnnnnnnnnnnnnnnnnnnnnnnnnnnnnnnnnnnnnnnnnnnnnnnnnnnnnnnnnnnnnnnnnnnnnnnnnnnnnnnnnnnnnnnnnnnnnnnnnnnnnnnnnnnnnnnnnnnnnnnnnnnnnnnnnnnnnnnnnnnnnnnnnnnnnnnnnnnnnnnnnnnnnnnnnnnnnnnnnnnnnnnnnnnnnnnnnnnnnnnnnnnnnnnnnnnnnnnnnnnnnnnnnnnnnnnnnnnnnnnnnnnnnnnnnnnnnnnnnnnnnnnnnnnnnnnnnnnnnnnnnnnnnnnnnnnnnnnnnnnnnnnnnnnnnnnnnnnnnnnnnnnnnnnnnnnnnnnnnnnnnnnnnnnnnnnnnnnnnnnnnnnnnnnnnnnnnnnnnnnnnnnnnnnnnnnnnnnnnnnnnnnnnnnnnnnnnnnnnnnnnnnnnnnnnnnnnnnnnnnnnnnnnnnnnnnnnnnnnnnnnnnnnnnnnnnnnnnnnnnnnnnnnnnnnnnnnnnnnnnnnnnnnnnnnnnnnnnnnnnnnnnnnnnnnnnnnnnnnnnnnnnnnnnnnnnnnnnnnnnnnnnnnnnnnnnnnnnnnnnnnnnnnnnnnnnnnnnnnnnnnnnnnnnnnnnnnnnnnnnnnnnnnnnnnnnnnnnnnnnnnnnnnnnnnnnnnnnnnnnnnnnnnnnnnnnnnnnnnnnnnnnnnnnnnnnnnnnnnnnnnnnnnnnnnnnnnnnnnnnnnnnnnnnnnnnnnnnnnnnnnnnnnnnnnnnnnnnnnnnnnnnnnnnnnnnnnnnnnnnnnnnnnnnnnnnnnnnnnnnnnnnnnnnnnnnnnnnnnnnnnnnnnnnnnnnnnnnnnnnnnnnnnnnnnnnnnnnnnnnnnnnnnnnnnnnnnnnnnnnnnnnnnnnnnnnnnnnnnnnnnnnnnnnnnnnnnnnnnnnnnnnnnnnnnnnnnnnnnnnnnnnnnnnnnnnnnnnnnnnnnnnnnnnnnnnnnnnnnnnnnnnnnnnnnnnnnnnnnnnnnnnnnnnnnnnnnnnnnnnnnnnnnnnnnnnnnnnnnnnnnnnnnnnnnnnnnnnnnnnnnnnnnnnnnnnnnnnnnnnnnnnnnnnnnnnnnnnnnnnnnnnnnnnnnnnnnnnnnnnnnnnnnnnnnnnnnnnnnnnnnnnnnnnnnnnnnnnnnnnnnnnnnnnnnnnnnnnnnnnnnnnnnnnnnnnnnnnnnnnnnnnnnnnnnnnnnnnnnnnnnnnnnnnnnnnnnnnnnnnnnnnnnnnnnnnnnnnnnnnnnnnnnnnnnnnnnnnnnnnnnnnnnnnnnnnnnnnnnnnnnnnnnnnnnnnnnnnnnnnnnnnnnnnnnnnnnnnnnnnnnnnnnnnnnnnnnnnnnnnnnnnnnnnnnnnnnnnnnnnnnnnnnnnnnnnnnnnnnnnnnnnnnnnnnnnnnnnnnnnnnnnnnnnnnnnnnnnnnnnnnnnnnnnnnnnnnnnnnnnnnnnnnnnnnnnnnnnnnnnnnnnnnnnnnnnnnnnnnnnnnnnnnnnnnnnnnnnnnnnnnnnnnnnnnnnnnnnnnnnnnnnnnnnnnnnnnnnnnnnnnnnnnnnnnnnnnnnnnnnnnnnnnnnnnnnnnnnnnnnnnnnnnnnnnnnnnnnnnnnnnnnnnnnnnnnnnnnnnnnnnnnnnnnnnnnnnnnnnnnnnnnnnnnnnnnnnnnnnnnnnnnnnnnnnnnnnnnnnnnnnnnnnnnnnnnnnnnnnnnnnnnnnnnnnnnnnnnnnnnnnnnnnnnnnnnnnnnnnnnnnnnnnnnnnnnnnnnnnnnnnnnnnnnnnnnnnnnnnnnnnnnnnnnnnnnnnnnnnnnnnnnnnnnnnnnnnnnnnnnnnnnnnnnnnnnnnnnnnnnnnnnnnnnnnnnnnnnnnnnnnnnnnnnnnnnnnnnnnnnnnnnnnnnnnnnnnnnnnnnnnnnnnnnnnnnnnnnnnnnnnnnnnnnnnnnnnnnnnnnnnnnnnnnnnnnnnnnnnnnnnnnnnnnnnnnnnnnnnnnnnnnnnnnnnnnnnnnnnnnnnnnnnnnnnnnnnnnnnnnnnnnnnnnnnnnnnnnnnnnnnnnnnnnnnnnnnnnnnnnnnnnnnnnnnnnnnnnnnnnnnnnnnnnnnnnnnnnnnnnnnnnnnnnnnnnnnnnnnnnnnnnnnnnnnnnnnnnnnnnnnnnnnnnnnnnnnnnnnnnnnnnnnnnnnnnnnnnnnnnnnnnnnnnnnnnnnnnnnnnnnnnnnnnnnnnnnnnnnnnnnnnnnnnnnnnnnnnnnnnnnnnnnnnnnnnnnnnnnnnnnnnnnnnnnnnnnnnnnnnnnnnnnnnnnnnnnnnnnnnnnnnnnnnnnnnnnnnnnnnnnnnnnnnnnnnnnnnnnnnnnnnnnnnnnnnnnnnnnnnnnnnnnnnnnnnnnnnnnnnnnnnnnnnnnnnnnnnnnnnnnnnnnnnnnnnnnnnnnnnnnnnnnnnnnnnnnnnnnnnnnnnnnnnnnnnnnnnnnnnnnnnnnnnnnnnnnnnnnnnnnnnnnnnnnnnnnnnnnnnnnnnnnnnnnnnnnnnnnnnnnnnnnnnnnnnnnnnnnnnnnnnnnnnnnnnnnnnnnnnnnnnnnnnnnnnnnnnnnnnnnnnnnnnnnnnnnnnnnnnnnnnnnnnnnnnnnnnnnnnnnnnnnnnnnnnnnnnnnnnnnnnnnnnnnnnnnnnnnnnnnnnnnnnnnnnnnnnnnnnnnnnnnnnnnnnnnnnnnnnnnnnnnnnnnnnnnnnnnnnnnnnnnnnnnnnnnnnnnnnnnnnnnnnnnnnnnnnnnnnnnnnnnnnnnnnnnnnnnnnnnnnnnnnnnnnnnnnnnnnnnnnnnnnnnnnnnnnnnnnnnnnnnnnnnnnnnnnnnnnnnnnnnnnnnnnnnnnnnnnnnnnnnnnnnnnnnnnnnnnnnnnnnnnnnnnnnnnnnnnnnnnnnnnnnnnnnnnnnnnnnnnnnnnnnnnnnnnnnnnnnnnnnnnnnnnnnnnnnnnnnnnnnnnnnnnnnnnnnnnnnnnnnnnnnnnnnnnnnnnnnnnnnnnnnnnnnnnnnnnnnnnnnnnnnnnnnnnnnnnnnnnnnnnnnnnnnnnnnnnnnnnnnnnnnnnnnnnnnnnnnnnnnnnnnnnnnnnnnnnnnnnnnnnnnnnnnnnnnnnnnnnnnnnnnnnnnnnnnnnnnnnnnnnnnnnnnnnnnnnnnnnnnnnnnnnnnnnnnnnnnnnnnnnnnnnnnnnnnnnnnnnnnnnnnnnnnnnnnnnnnnnnnnnnnnnnnnnnnnnnnnnnnnnnnnnnnnnnnnnnnnnnnnnnnnnnnnnnnnnnnnnnnnnnnnnnnnnnnnnnnnnnnnnnnnnnnnnnnnnnnnnnnnnnnnnnnnnnnnnnnnnnnnnnnnnnnnnnnnnnnnnnnnnnnnnnnnnnnnnnnnnnnnnnnnnnnnnnnnnnnnnnnnnnnnnnnnnnnnnnnnnnnnnnnnnnnnnnnnnnnnnnnnnnnnnnnnnnnnnnnnnnnnnnnnnnnnnnnnnnnnnnnnnnnnnnnnnnnnnnnnnnnnnnnnnnnnnnnnnnnnnnnnnnnnnnnnnnnnnnnnnnnnnnnnnnnnnnnnnnnnnnnnnnnnnnnnnnnnnnnnnnnnnnnnnnnnnnnnnnnnnnnnnnnnnnnnnnnnnnnnnnnnnnnnnnnnnnnnnnnnnnnnnnnnnnnnnnnnnnnnnnnnnnnnnnnnnnnnnnnnnnnnnnnnnnnnnnnnnnnnnnnnnnnnnnnnnnnnnnnnnnnnnnnnnnnnnnnnnnnnnnnnnnnnnnnnnnnnnnnnnnnnnnnnnnnnnnnnnnnnnnnnnnnnnnnnnnnnnnnnnnnnnnnnnnnnnnnnnnnnnnnnnnnnnnnnnnnnnnnnnnnnnnnnnnnnnnnnnnnnnnnnnnnnnnnnnnnnnnnnnnnnnnnnnnnnnnnnnnnnnnnnnnnnnnnnnnnnnnnnnnnnnnnnnnnnnnnnnnnnnnnnnnnnnnnnnnnnnnnnnnnnnnnnnnnnnnnnnnnnnnnnnnnnnnnnnnnnnnnnnnnnnnnnnnnnnnnnnnnnnnnnnnnnnnnnnnnnnnnnnnnnnnnnnnnnnnnnnnnnnnnnnnnnnnnnnnnnnnnnnnnnnnnnnnnnnnnnnnnnnnnnnnnnnnnnnnnnnnnnnnnnnnnnnnnnnnnnnnnnnnnnnnnnnnnnnnnnnnnnnnnnnnnnnnnnnnnnnnnnnnnnnnnnnnnnnnnnnnnnnnnnnnnnnnnnnnnnnnnnnnnnnnnnnnnnnnnnnnnnnnnnnnnnnnnnnnnnnnnnnnnnnnnnnnnnnnnnnnnnnnnnnnnnnnnnnnnnnnnnnnnnnnnnnnnnnnnnnnnnnnnnnnnnnnnnnnnnnnnnnnnnnnnnnnnnnnnnnnnnnnnnnnnnnnnnnnnnnnnnnnnnnnnnnnnnnnnnnnnnnnnnnnnnnnnnnnnnnnnnnnnnnnnnnnnnnnnnnnnnnnnnnnnnnnnnnnnnnnnnnnnnnnnnnnnnnnnnnnnnnnnnnnnnnnnnnnnnnnnnnnnnnnnnnnnnnnnnnnnnnnnnnnnnnnnnnnnnnnnnnnnnnnnnnnnnnnnnnnnnnnnnnnnnnnnnnnnnnnnnnnnnnnnnnnnnnnnnnnnnnnnnnnnnnnnnnnnnnnnnnnnnnnnnnnnnnnnnnnnnnnnnnnnnnnnnnnnnnnnnnnnnnnnnnnnnnnnnnnnnnnnnnnnnnnnnnnnnnnnnnnnnnnnnnnnnnnnnnnnnnnnnnnnnnnnnnnnnnnnnnnnnnnnnnnnnnnnnnnnnnnnnnnnnnnnnnnnnnnnnnnnnnnnnnnnnnnnnnnnnnnnnnnnnnnnnnnnnnnnnnnnnnnnnnnnnnnnnnnnnnnnnnnnnnnnnnnnnnnnnnnnnnnnnnnnnnnnnnnnnnnnnnnnnnnnnnnnnnnnnnnnnnnnnnnnnnnnnnnnnnnnnnnnnnnnnnnnnnnnnnnnnnnnnnnnnnnnnnnnnnnnnnnnnnnnnnnnnnnnnnnnnnnnnnnnnnnnnnnnnnnnnnnnnnnnnnnnnnnnnnnnnnnnnnnnnnnnnnnnnnnnnnnnnnnnnnnnnnnnnnnnnnnnnnnnnnnnnnnnnnnnnnnnnnnnnnnnnnnnnnnnnnnnnnnnnnnnnnnnnnnnnnnnnnnnnnnnnnnnnnnnnnnnnnnnnnnnnnnnnnnnnnnnnnnnnnnnnnnnnnnnnnnnnnnnnnnnnnnnnnnnnnnnnnnnnnnnnnnnnnnnnnnnnnnnnnnnnnnnnnnnnnnnnnnnnnnnnnnnnnnnnnnnnnnnnnnnnnnnnnnnnnnnnnnnnnnnnnnnnnnnnnnnnnnnnnnnnnnnnnnnnnnnnnnnnnnnnnnnnnnnnnnnnnnnnnnnnnnnnnnnnnnnnnnnnnnnnnnnnnnnnnnnnnnnnnnnnnnnnnnnnnnnnnnnnnnnnnnnnnnnnnnnnnnnnnnnnnnnnnnnnnnnnnnnnnnnnnnnnnnnnnnnnnnnnnnnnnnnnnnnnnnnnnnnnnnnnnnnnnnnnnnnnnnnnnnnnnnnnnnnnnnnnnnnnnnnnnnnnnnnnnnnnnnnnnnnnnnnnnnnnnnnnnnnnnnnnnnnnnnnnnnnnnnnnnnnnnnnnnnnnnnnnnnnnnnnnnnnnnnnnnnnnnnnnnnnnnnnnnnnnnnnnnnnnnnnnnnnnnnnnnnnnnnnnnnnnnnnnnnnnnnnnnnnnnnnnnnnnnnnnnnnnnnnnnnnnnnnnnnnnnnnnnnnnnnnnnnnnnnnnnnnnnnnnnnnnnnnnnnnnnnnnnnnnnnnnnnnnnnnnnnnnnnnnnnnnnnnnnnnnnnnnnnnnnnnnnnnnnnnnnnnnnnnnnnnnnnnnnnnnnnnnnnnnnnnnnnnnnnnnnnnnnnnnnnnnnnnnnnnnnnnnnnnnnnnnnnnnnnnnnnnnnnnnnnnnnnnnnnnnnnnnnnnnnnnnnnnnnnnnnnnnnnnnnnnnnnnnnnnnnnnnnnnnnnnnnnnnnnnnnnnnnnnnnnnnnnnnnnnnnnnnnnnnnnnnnnnnnnnnnnnnnnnnnnnnnnnnnnnnnnnnnnnnnnnnnnnnnnnnnnnnnnnnnnnnnnnnnnnnnnnnnnnnnnnnnnnnnnnnnnnnnnnnnnnnnnnnnnnnnnnnnnnnnnnnnnnnnnnnnnnnnnnnnnnnnnnnnnnnnnnnnnnnnnnnnnnnnnnnnnnnnnnnnnnnnnnnnnnnnnnnnnnnnnnnnnnnnnnnnnnnnnnnnnnnnnnnnnnnnnnnnnnnnnnnnnnnnnnnnnnnnnnnnnnnnnnnnnnnnnnnnnnnnnnnnnnnnnnnnnnnnnnnnnnnnnnnnnnnnnnnnnnnnnnnnnnnnnnnnnnnnnnnnnnnnnnnnnnnnnnnnnnnnnnnnnnnnnnnnnnnnnnnnnnnnnnnnnnnnnnnnnnnnnnnnnnnnnnnnnnnnnnnnnnnnnnnnnnnnnnnnnnnnnnnnnnnnnnnnnnnnnnnnnnnnnnnnnnnnnnnnnnnnnnnnnnnnnnnnnnnnnnnnnnnnnnnnnnnnnnnnnnnnnnnnnnnnnnnnnnnnnnnnnnnnnnnnnnnnnnnnnnnnnnnnnnnnnnnnnnnnnnnnnnnnnnnnnnnnnnnnnnnnnnnnnnnnnnnnnnnnnnnnnnnnnnnnnnnnnnnnnnnnnnnnnnnnnnnnnnnnnnnnnnnnnnnnnnnnnnnnnnnnnnnnnnnnnnnnnnnnnnnnnnnnnnnnnnnnnnnnnnnnnnnnnnnnnnnnnnnnnnnnnnnnnnnnnnnnnnnnnnnnnnnnnnnnnnnnnnnnnnnnnnnnnnnnnnnnnnnnnnnnnnnnnnnnnnnnnnnnnnnnnnnnnnnnnnnnnnnnnnnnnnnnnnnnnnnnnnnnnnnnnnnnnnnnnnnnnnnnnnnnnnnnnnnnnnnnnnnnnnnnnnnnnnnnnnnnnnnnnnnnnnnnnnnnnnnnnnnnnnnnnnnnnnnnnnnnnnnnnnnnnnnnnnnnnnnnnnnnnnnnnnnnnnnnnnnnnnnnnnnnnnnnnnnnnnnnnnnnnnnnnnnnnnnnnnnnnnnnnnnnnnnnnnnnnnnnnnnnnnnnnnnnnnnnnnnnnnnnnnnnnnnnnnnnnnnnnnnnnnnnnnnnnnnnnnnnnnnnnnnnnnnnnnnnnnnnnnnnnnnnnnnnnnnnnnnnnnnnnnnnnnnnnnnnnnnnnnnnnnnnnnnnnnnnnnnnnnnnnnnnnnnnnnnnnnnnnnnnnnnnnnnnnnnnnnnnnnnnnnnnnnnnnnnnnnnnnnnnnnnnnnnnnnnnnnnnnnnnnnnnnnnnnnnnnnnnnnnnnnnnnnnnnnnnnnnnnnnnnnnnnnnnnnnnnnnnnnnnnnnnnnnnnnnnnnnnnnnnnnnnnnnnnnnnnnnnnnnnnnnnnnnnnnnnnnnnnnnnnnnnnnnnnnnnnnnnnnnnnnnnnnnnnnnnnnnnnnnnnnnnnnnnnnnnnnnnnnnnnnnnnnnnnnnnnnnnnnnnnnnnnnnnnnnnnnnnnnnnnnnnnnnnnnnnnnnnnnnnnnnnnnnnnnnnnnnnnnnnnnnnnnnnnnnnnnnnnnnnnnnnnnnnnnnnnnnnnnnnnnnnnnnnnnnnnnnnnnnnnnnnnnnnnnnnnnnnnnnnnnnnnnnnnnnnnnnnnnnnnnnnnnnnnnnnnnnnnnnnnnnnnnnnnnnnnnnnnnnnnnnnnnnnnnnnnnnnnnnnnnnnnnnnnnnnnnnnnnnnnnnnnnnnnnnnnnnnnnnnnnnnnnnnnnnnnnnnnnnnnnnnnnnnnnnnnnnnnnnnnnnnnnnnnnnnnnnnnnnnnnnnnnnnnnnnnnnnnnnnnnnnnnnnnnnnnnnnnnnnnnnnnnnnnnnnnnnnnnnnnnnnnnnnnnnnnnnnnnnnnnnnnnnnnnnnnnnnnnnnnnnnnnnnnnnnnnnnnnnnnnnnnnnnnnnnnnnnnnnnnnnnnnnnnnnnnnnnnnnnnnnnnnnnnnnnnnnnnnnnnnnnnnnnnnnnnnnnnnnnnnnnnnnnnnnnnnnnnnnnnnnnnnnnnnnnnnnnnnnnnnnnnnnnnnnnnnnnnnnnnnnnnnnnnnnnnnnnnnnnnnnnnnnnnnnnnnnnnnnnnnnnnnnnnnnnnnnnnnnnnnnnnnnnnnnnnnnnnnnnnnnnnnnnnnnnnnnnnnnnnnnnnnnnnnnnnnnnnnnnnnnnnnnnnnnnnnnnnnnnnnnnnnnnnnnnnnnnnnnnnnnnnnnnnnnnnnnnnnnnnnnnnnnnnnnnnnnnnnnnnnnnnnnnnnnnnnnnnnnnnnnnnnnnnnnnnnnnnnnnnnnnnnnnnnnnnnnnnnnnnnnnnnnnnnnnnnnnnnnnnnnnnnnnnnnnnnnnnnnnnnnnnnnnnnnnnnnnnnnnnnnnnnnnnnnnnnnnnnnnnnnnnnnnnnnnnnnnnnnnnnnnnnnnnnnnnnnnnnnnnnnnnnnnnnnnnnnnnnnnnnnnnnnnnnnnnnnnnnnnnnnnnnnnnnnnnnnnnnnnnnnnnnnnnnnnnnnnnnnnnnnnnnnnnnnnnnnnnnnnnnnnnnnnnnnnnnnnnnnnnnnnnnnnnnnnnnnnnnnnnnnnnnnnnnnnnnnnnnnnnnnnnnnnnnnnnnnnnnnnnnnnnnnnnnnnnnnnnnnnnnnnnnnnnnnnnnnnnnnnnnnnnnnnnnnnnnnnnnnnnnnnnnnnnnnnnnnnnnnnnnnnnnnnnnnnnnnnnnnnnnnnnnnnnnnnnnnnnnnnnnnnnnnnnnnnnnnnnnnnnnnnnnnnnnnnnnnnnnnnnnnnnnnnnnnnnnnnnnnnnnnnnnnnnnnnnnnnnnnnnnnnnnnnnnnnnnnnnnnnnnnnnnnnnnnnnnnnnnnnnnnnnnnnnnnnnnnnnnnnnnnnnnnnnnnnnnnnnnnnnnnnnnnnnnnnnnnnnnnnnnnnnnnnnnnnnnnnnnnnnnnnnnnnnnnnnnnnnnnnnnnnnnnnnnnnnnnnnnnnnnnnnnnnnnnnnnnnnnnnnnnnnnnnnnnnnnnnnnnnnnnnnnnnnnnnnnnnnnnnnnnnnnnnnnnnnnnnnnnnnnnnnnnnnnnnnnnnnnnnnnnnnnnnnnnnnnnnnnnnnnnnnnnnnnnnnnnnnnnnnnnnnnnnnnnnnnnnnnnnnnnnnnnnnnnnnnnnnnnnnnnnnnnnnnnnnnnnnnnnnnnnnnnnnnnnnnnnnnnnnnnnnnnnnnnnnnnnnnnnnnnnnnnnnnnnnnnnnnnnnnnnnnnnnnnnnnnnnnnnnnnnnnnnnnnnnnnnnnnnnnnnnnnnnnnnnnnnnnnnnnnnnnnnnnnnnnnnnnnnnnnnnnnnnnnnnnnnnnnnnnnnnnnnnnnnnnnnnnnnnnnnnnnnnnnnnnnnnnnnnnnnnnnnnnnnnnnnnnnnnnnnnnnnnnnnnnnnnnnnnnnnnnnnnnnnnnnnnnnnnnnnnnnnnnnnnnnnnnnnnnnnnnnnnnnnnnnnnnnnnnnnnnnnnnnnnnnnnnnnnnnnnnnnnnnnnnnnnnnnnnnnnnnnnnnnnnnnnnnnnnnnnnnnnnnnnnnnnnnnnnnnnnnnnnnnnnnnnnnnnnnnnnnnnnnnnnnnnnnnnnnnnnnnnnnnnnnnnnnnnnnnnnnnnnnnnnnnnnnnnnnnnnnnnnnnnnnnnnnnnnnnnnnnnnnnnnnnnnnnnnnnnnnnnnnnnnnnnnnnnnnnnnnnnnnnnnnnnnnnnnnnnnnnnnnnnnnnnnnnnnnnnnnnnnnnnnnnnnnnnnnnnnnnnnnnnnnnnnnnnnnnnnnnnnnnnnnnnnnnnnnnnnnnnnnnnnnnnnnnnnnnnnnnnnnnnnnnnnnnnnnnnnnnnnnnnnnnnnnnnnnnnnnnnnnnnnnnnnnnnnnnnnnnnnnnnnnnnnnnnnnnnnnnnnnnnnnnnnnnnnnnnnnnnnnnnnnnnnnnnnnnnnnnnnnnnnnnnnnnnnnnnnnnnnnnnnnnnnnnnnnnnnnnnnnnnnnnnnnnnnnnnnnnnnnnnnnnnnnnnnnnnnnnnnnnnnnnnnnnnnnnnnnnnnnnnnnnnnnnnnnnnnnnnnnnnnnnnnnnnnnnnnnnnnnnnnnnnnnnnnnnnnnnnnnnnnnnnnnnnnnnnnnnnnnnnnnnnnnnnnnnnnnnnnnnnnnnnnnnnnnnnnnnnnnnnnnnnnnnnnnnnnnnnnnnnnnnnnnnnnnnnnnnnnnnnnnnnnnnnnnnnnnnnnnnnnnnnnnnnnnnnnnnnnnnnnnnnnnnnnnnnnnnnnnnnnnnnnnnnnnnnnnnnnnnnnnnnnnnnnnnnnnnnnnnnnnnnnnnnnnnnnnnnnnnnnnnnnnnnnnnnnnnnnnnnnnnnnnnnnnnnnnnnnnnnnnnnnnnnnnnnnnnnnnnnnnnnnnnnnnnnnnnnnnnnnnnnnnnnnnnnnnnnnnnnnnnnnnnnnnnnnnnnnnnnnnnnnnnnnnnnnnnnnnnnnnnnnnnnnnnnnnnnnnnnnnnnnnnnnnnnnnnnnnnnnnnnnnnnnnnnnnnnnnnnnnnnnnnnnnnnnnnnnnnnnnnnnnnnnnnnnnnnnnnnnnnnnnnnnnnnnnnnnnnnnnnnnnnnnnnnnnnnnnnnnnnnnnnnnnnnnnnnnnnnnnnnnnnnnnnnnnnnnnnnnnnnnnnnnnnnnnnnnnnnnnnnnnnnnnnnnnnnnnnnnnnnnnnnnnnnnnnnnnnnnnnnnnnnnnnnnnnnnnnnnnnnnnnnnnnnnnnnnnnnnnnnnnnnnnnnnnnnnnnnnnnnnnnnnnnnnnnnnnnnnnnnnnnnnnnnnnnnnnnnnnnnnnnnnnnnnnnnnnnnnnnnnnnnnnnnnnnnnnnnnnnnnnnnnnnnnnnnnnnnnnnnnnnnnnnnnnnnnnnnnnnnnnnnnnnnnnnnnnnnnnnnnnnnnnnnnnnnnnnnnnnnnnnnnnnnnnnnnnnnnnnnnnnnnnnnnnnnnnnnnnnnnnnnnnnnnnnnnnnnnnnnnnnnnnnnnnnnnnnnnnnnnnnnnnnnnnnnnnnnnnnnnnnnnnnnnnnnnnnnnnnnnnnnnnnnnnnnnnnnnnnnnnnnnnnnnnnnnnnnnnnnnnnnnnnnnnnnnnnnnnnnnnnnnnnnnnnnnnnnnnnnnnnnnnnnnnnnnnnnnnnnnnnnnnnnnnnnnnnnnnnnnnnnnnnnnnnnnnnnnnnnnnnnnnnnnnnnnnnnnnnnnnnnnnnnnnnnnnnnnnnnnnnnnnnnnnnnnnnnnnnnnnnnnnnnnnnnnnnnnnnnnnnnnnnnnnnnnnnnnnnnnnnnnnnnnnnnnnnnnnnnnnnnnnnnnnnnnnnnnnnnnnnnnnnnnnnnnnnnnnnnnnnnnnnnnnnnnnnnnnnnnnnnnnnnnnnnnnnnnnnnnnnnnnnnnnnnnnnnnnnnnnnnnnnnnnnnnnnnnnnnnnnnnnnnnnnnnnnnnnnnnnnnnnnnnnnnnnnnnnnnnnnnnnnnnnnnnnnnnnnnnnnnnnnnnnnnnnnnnnnnnnnnnnnnnnnnnnnnnnnnnnnnnnnnnnnnnnnnnnnnnnnnnnnnnnnnnnnnnnnnnnnnnnnnnnnnnnnnnnnnnnnnnnnnnnnnnnnnnnnnnnnnnnnnnnnnnnnnnnnnnnnnnnnnnnnnnnnnnnnnnnnnnnnnnnnnnnnnnnnnnnnnnnnnnnnnnnnnnnnnnnnnnnnnnnnnnnnnnnnnnnnnnnnnnnnnnnnnnnnnnnnnnnnnnnnnnnnnnnnnnnnnnnnnnnnnnnnnnnnnnnnnnnnnnnnnnnnnnnnnnnnnnnnnnnnnnnnnnnnnnnnnnnnnnnnnnnnnnnnnnnnnnnnnnnnnnnnnnnnnnnnnnnnnnnnnnnnnnnnnnnnnnnnnnnnnnnnnnnnnnnnnnnnnnnnnnnnnnnnnnnnnnnnnnnnnnnnnnnnnnnnnnnnnnnnnnnnnnnnnnnnnnnnnnnnnnnnnnnnnnnnnnnnnnnnnnnnnnnnnnnnnnnnnnnnnnnnnnnnnnnnnnnnnnnnnnnnnnnnnnnnnnnnnnnnnnnnnnnnnnnnnnnnnnnnnnnnnnnnnnnnnnnnnnnnnnnnnnnnnnnnnnnnnnnnnnnnnnnnnnnnnnnnnnnnnnnnnnnnnnnnnnnnnnnnnnnnnnnnnnnnnnnnnnnnnnnnnnnnnnnnnnnnnnnnnnnnnnnnnnnnnnnnnnnnnnnnnnnnnnnnnnnnnnnnnnnnnnnnnnnnnnnnnnnnnnnnnnnnnnnnnnnnnnnnnnnnnnnnnnnnnnnnnnnnnnnnnnnnnnnnnnnnnnnnnnnnnnnnnnnnnnnnnnnnnnnnnnnnnnnnnnnnnnnnnnnnnnnnnnnnnnnnnnnnnnnnnnnnnnnnnnnnnnnnnnnnnnnnnnnnnnnnnnnnnnnnnnnnnnnnnnnnnnnnnnnnnnnnnnnnnnnnnnnnnnnnnnnnnnnnnnnnnnnnnnnnnnnnnnnnnnnnnnnnnnnnnnnnnnnnnnnnnnnnnnnnnnnnnnnnnnnnnnnnnnnnnnnnnnnnnnnnnnnnnnnnnnnnnnnnnnnnnnnnnnnnnnnnnnnnnnnnnnnnnnnnnnnnnnnnnnnnnnnnnnnnnnnnnnnnnnnnnnnnnnnnnnnnnnnnnnnnnnnnnnnnnnnnnnnnnnnnnnnnnnnnnnnnnnnnnnnnnnnnnnnnnnnnnnnnnnnnnnnnnnnnnnnnnnnnnnnnnnnnnnnnnnnnnnnnnnnnnnnnnnnnnnnnnnnnnnnnnnnnnnnnnnnnnnnnnnnnnnnnnnnnnnnnnnnnnnnnnnnnnnnnnnnnnnnnnnnnnnnnnnnnnnnnnnnnnnnnnnnnnnnnnnnnnnnnnnnnnnnnnnnnnnnnnnnnnnnnnnnnnnnnnnnnnnnnnnnnnnnnnnnnnnnnnnnnnnnnnnnnnnnnnnnnnnnnnnnnnnnnnnnnnnnnnnnnnnnnnnnnnnnnnnnnnnnnnnnnnnnnnnnnnnnnnnnnnnnnnnnnnnnnnnnnnnnnnnnnnnnnnnnnnnnnnnnnnnnnnnnnnnnnnnnnnnnnnnnnnnnnnnnnnnnnnnnnnnnnnnnnnnnnnnnnnnnnnnnnnnnnnnnnnnnnnnnnnnnnnnnnnnnnnnnnnnnnnnnnnnnnnnnnnnnnnnnnnnnnnnnnnnnnnnnnnnnnnnnnnnnnnnnnnnnnnnnnnnnnnnnnnnnnnnnnnnnnnnnnnnnnnnnnnnnnnnnnnnnnnnnnnnnnnnnnnnnnnnnnnnnnnnnnnnnnnnnnnnnnnnnnnnnnnnnnnnnnnnnnnnnnnnnnnnnnnnnnnnnnnnnnnnnnnnnnnnnnnnnnnnnnnnnnnnnnnnnnnnnnnnnnnnnnnnnnnnnnnnnnnnnnnnnnnnnnnnnnnnnnnnnnnnnnnnnnnnnnnnnnnnnnnnnnnnnnnnnnnnnnnnnnnnnnnnnnnnnnnnnnnnnnnnnnnnnnnnnnnnnnnnnnnnnnnnnnnnnnnnnnnnnnnnnnnnnnnnnnnnnnnnnnnnnnnnnnnnnnnnnnnnnnnnnnnnnnnnnnnnnnnnnnnnnnnnnnnnnnnnnnnnnnnnnnnnnnnnnnnnnnnnnnnnnnnnnnnnnnnnnnnnnnnnnnnnnnnnnnnnnnnnnnnnnnnnnnnnnnnnnnnnnnnnnnnnnnnnnnnnnnnnnnnnnnnnnnnnnnnnnnnnnnnnnnnnnnnnnnnnnnnnnnnnnnnnnnnnnnnnnnnnnnnnnnnnnnnnnnnnnnnnnnnnnnnnnnnnnnnnnnnnnnnnnnnnnnnnnnnnnnnnnnnnnnnnnnnnnnnnnnnnnnnnnnnnnnnnnnnnnnnnnnnnnnnnnnnnnnnnnnnnnnnnnnnnnnnnnnnnnnnnnnnnnnnnnnnnnnnnnnnnnnnnnnnnnnnnnnnnnnnnnnnnnnnnnnnnnnnnnnnnnnnnnnnnnnnnnnnnnnnnnnnnnnnnnnnnnnnnnnnnnnnnnnnnnnnnnnnnnnnnnnnnnnnnnnnnnnnnnnnnnnnnnnnnnnnnnnnnnnnnnnnnnnnnnnnnnnnnnnnnnnnnnnnnnnnnnnnnnnnnnnnnnnnnnnnnnnnnnnnnnnnnnnnnnnnnnnnnnnnnnnnnnnnnnnnnnnnnnnnnnnnnnnnnnnnnnnnnnnnnnnnnnnnnnnnnnnnnnnnnnnnnnnnnnnnnnnnnnnnnnnnnnnnnnnnnnnnnnnnnnnnnnnnnnnnnnnnnnnnnnnnnnnnnnnnnnnnnnnnnnnnnnnnnnnnnnnnnnnnnnnnnnnnnnnnnnnnnnnnnnnnnnnnnnnnnnnnnnnnnnnnnnnnnnnnnnnnnnnnnnnnnnnnnnnnnnnnnnnnnnnnnnnnnnnnnnnnnnnnnnnnnnnnnnnnnnnnnnnnnnnnnnnnnnnnnnnnnnnnnnnnnnnnnnnnnnnnnnnnnnnnnnnnnnnnnnnnnnnnnnnnnnnnnnnnnnnnnnnnnnnnnnnnnnnnnnnnnnnnnnnnnnnnnnnnnnnnnnnnnnnnnnnnnnnnnnnnnnnnnnnnnnnnnnnnnnnnnnnnnnnnnnnnnnnnnnnnnnnnnnnnnnnnnnnnnnnnnnnnnnnnnnnnnnnnnnnnnnnnnnnnnnnnnnnnnnnnnnnnnnnnnnnnnnnnnnnnnnnnnnnnnnnnnnnnnnnnnnnnnnnnnnnnnnnnnnnnnnnnnnnnnnnnnnnnnnnnnnnnnnnnnnnnnnnnnnnnnnnnnnnnnnnnnnnnnnnnnnnnnnnnnnnnnnnnnnnnnnnnnnnnnnnnnnnnnnnnnnnnnnnnnnnnnnnnnnnnnnnnnnnnnnnnnnnnnnnnnnnnnnnnnnnnnnnnnnnnnnnnnnnnnnnnnnnnnnnnnnnnnnnnnnnnnnnnnnnnnnnnnnnnnnnnnnnnnnnnnnnnnnnnnnnnnnnnnnnnnnnnnnnnnnnnnnnnnnnnnnnnnnnnnnnnnnnnnnnnnnnnnnnnnnnnnnnnnnnnnnnnnnnnnnnnnnnnnnnnnnnnnnnnnnnnnnnnnnnnnnnnnnnnnnnnnnnnnnnnnnnnnnnnnnnnnnnnnnnnnnnnnnnnnnnnnnnnnnnnnnnnnnnnnnnnnnnnnnnnnnnnnnnnnnnnnnnnnnnnnnnnnnnnnnnnnnnnnnnnnnnnnnnnnnnnnnnnnnnnnnnnnnnnnnnnnnnnnnnnnnnnnnnnnnnnnnnnnnnnnnnnnnnnnnnnnnnnnnnnnnnnnnnnnnnnnnnnnnnnnnnnnnnnnnnnnnnnnnnnnnnnnnnnnnnnnnnnnnnnnnnnnnnnnnnnnnnnnnnnnnnnnnnnnnnnnnnnnnnnnnnnnnnnnnnnnnnnnnnnnnnnnnnnnnnnnnnnnnnnnnnnnnnnnnnnnnnnnnnnnnnnnnnnnnnnnnnnnnnnnnnnnnnnnnnnnnnnnnnnnnnnnnnnnnnnnnnnnnnnnnnnnnnnnnnnnnnnnnnnnnnnnnnnnnnnnnnnnnnnnnnnnnnnnnnnnnnnnnnnnnnnnnnnnnnnnnnnnnnnnnnnnnnnnnnnnnnnnnnnnnnnnnnnnnnnnnnnnnnnnnnnnnnnnnnnnnnnnnnnnnnnnnnnnnnnnnnnnnnnnnnnnnnnnnnnnnnnnnnnnnnnnnnnnnnnnnnnnnnnnnnnnnnnnnnnnnnnnnnnnnnnnnnnnnnnnnnnnnnnnnnnnnnnnnnnnnnnnnnnnnnnnnnnnnnnnnnnnnnnnnnnnnnnnnnnnnnnnnnnnnnnnnnnnnnnnnnnnnnnnnnnnnnnnnnnnnnnnnnnnnnnnnnnnnnnnnnnnnnnnnnnnnnnnnnnnnnnnnnnnnnnnnnnnnnnnnnnnnnnnnnnnnnnnnnnnnnnnnnnnnnnnnnnnnnnnnnnnnnnnnnnnnnnnnnnnnnnnnnnnnnnnnnnnnnnnnnnnnnnnnnnnnnnnnnnnnnnnnnnnnnnnnnnnnnnnnnnnnnnnnnnnnnnnnnnnnnnnnnnnnnnnnnnnnnnnnnnnnnnnnnnnnnnnnnnnnnnnnnnnnnnnnnnnnnnnnnnnnnnnnnnnnnnnnnnnnnnnnnnnnnnnnnnnnnnnnnnnnnnnnnnnnnnnnnnnnnnnnnnnnnnnnnnnnnnnnnnnnnnnnnnnnnnnnnnnnnnnnnnnnnnnnnnnnnnnnnnnnnnnnnnnnnnnnnnnnnnnnnnnnnnnnnnnnnnnnnnnnnnnnnnnnnnnnnnnnnnnnnnnnnnnnnnnnnnnnnnnnnnnnnnnnnnnnnnnnnnnnnnnnnnnnnnnnnnnnnnnnnnnnnnnnnnnnnnnnnnnnnnnnnnnnnnnnnnnnnnnnnnnnnnnnnnnnnnnnnnnnnnnnnnnnnnnnnnnnnnnnnnnnnnnnnnnnnnnnnnnnnnnnnnnnnnnnnnnnnnnnnnnnnnnnnnnnnnnnnnnnnnnnnnnnnnnnnnnnnnnnnnnnnnnnnnnnnnnnnnnnnnnnnnnnnnnnnnnnnnnnnnnnnnnnnnnnnnnnnnnnnnnnnnnnnnnnnnnnnnnnnnnnnnnnnnnnnnnnnnnnnnnnnnnnnnnnnnnnnnnnnnnnnnnnnnnnnnnnnnnnnnnnnnnnnnnnnnnnnnnnnnnnnnnnnnnnnnnnnnnnnnnnnnnnnnnnnnnnnnnnnnnnnnnnnnnnnnnnnnnnnnnnnnnnnnnnnnnnnnnnnnnnnnnnnnnnnnnnnnnnnnnnnnnnnnnnnnnnnnnnnnnnnnnnnnnnnnnnnnnnnnnnnnnnnnnnnnnnnnnnnnnnnnnnnnnnnnnnnnnnnnnnnnnnnnnnnnnnnnnnnnnnnnnnnnnnnnnnnnnnnnnnnnnnnnnnnnnnnnnnnnnnnnnnnnnnnnnnnnnnnnnnnnnnnnnnnnnnnnnnnnnnnnnnnnnnnnnnnnnnnnnnnnnnnnnnnnnnnnnnnnnnnnnnnnnnnnnnnnnnnnnnnnnnnnnnnnnnnnnnnnnnnnnnnnnnnnnnnnnnnnnnnnnnnnnnnnnnnnnnnnnnnnnnnnnnnnnnnnnnnnnnnnnnnnnnnnnnnnnnnnnnnnnnnnnnnnnnnnnnnnnnnnnnnnnnnnnnnnnnnnnnnnnnnnnnnnnnnnnnnnnnnnnnnnnnnnnnnnnnnnnnnnnnnnnnnnnnnnnnnnnnnnnnnnnnnnnnnnnnnnnnnnnnnnnnnnnnnnnnnnnnnnnnnnnnnnnnnnnnnnnnnnnnnnnnnnnnnnnnnnnnnnnnnnnnnnnnnnnnnnnnnnnnnnnnnnnnnnnnnnnnnnnnnnnnnnnnnnnnnnnnnnnnnnnnnnnnnnnnnnnnnnnnnnnnnnnnnnnnnnnnnnnnnnnnnnnnnnnnnnnnnnnnnnnnnnnnnnnnnnnnnnnnnnnnnnnnnnnnnnnnnnnnnnnnnnnnnnnnnnnnnnnnnnnnnnnnnnnnnnnnnnnnnnnnnnnnnnnnnnnnnnnnnnnnnnnnnnnnnnnnnnnnnnnnnnnnnnnnnnnnnnnnnnnnnnnnnnnnnnnnnnnnnnnnnnnnnnnnnnnnnnnnnnnnnnnnnnnnnnnnnnnnnnnnnnnnnnnnnnnnnnnnnnnnnnnnnnnnnnnnnnnnnnnnnnnnnnnnnnnnnnnnnnnnnnnnnnnnnnnnnnnnnnnnnnnnnnnnnnnnnnnnnnnnnnnnnnnnnnnnnnnnnnnnnnnnnnnnnnnnnnnnnnnnnnnnnnnnnnnnnnnnnnnnnnnnnnnnnnnnnnnnnnnnnnnnnnnnnnnnnnnnnnnnnnnnnnnnnnnnnnnnnnnnnnnnnnnnnnnnnnnnnnnnnnnnnnnnnnnnnnnnnnnnnnnnnnnnnnnnnnnnnnnnnnnnnnnnnnnnnnnnnnnnnnnnnnnnnnnnnnnnnnnnnnnnnnnnnnnnnnnnnnnnnnnnnnnnnnnnnnnnnnnnnnnnnnnnnnnnnnnnnnnnnnnnnnnnnnnnnnnnnnnnnnnnnnnnnnnnnnnnnnnnnnnnnnnnnnnnnnnnnnnnnnnnnnnnnnnnnnnnnnnnnnnnnnnnnnnnnnnnnnnnnnnnnnnnnnnnnnnnnnnnnnnnnnnnnnnnnnnnnnnnnnnnnnnnnnnnnnnnnnnnnnnnnnnnnnnnnnnnnnnnnnnnnnnnnnnnnnnnnnnnnnnnnnnnnnnnnnnnnnnnnnnnnnnnnnnnnnnnnnnnnnnnnnnnnnnnnnnnnnnnnnnnnnnnnnnnnnnnnnnnnnnnnnnnnnnnnnnnnnnnnnnnnnnnnnnnnnnnnnnnnnnnnnnnnnnnnnnnnnnnnnnnnnnnnnnnnnnnnnnnnnnnnnnnnnnnnnnnnnnnnnnnnnnnnnnnnnnnnnnnnnnnnnnnnnnnnnnnnnnnnnnnnnnnnnnnnnnnnnnnnnnnnnnnnnnnnnnnnnnnnnnnnnnnnnnnnnnnnnnnnnnnnnnnnnnnnnnnnnnnnnnnnnnnnnnnnnnnnnnnnnnnnnnnnnnnnnnnnnnnnnnnnnnnnnnnnnnnnnnnnnnnnnnnnnnnnnnnnnnnnnnnnnnnnnnnnnnnnnnnnnnnnnnnnnnnnnnnnnnnnnnnnnnnnnnnnnnnnnnnnnnnnnnnnnnnnnnnnnnnnnnnnnnnnnnnnnnnnnnnnnnnnnnnnnnnnnnnnnnnnnnnnnnnnnnnnnnnnnnnnnnnnnnnnnnnnnnnnnnnnnnnnnnnnnnnnnnnnnnnnnnnnnnnnnnnnnnnnnnnnnnnnnnnnnnnnnnnnnnnnnnnnnnnnnnnnnnnnnnnnnnnnnnnnnnnnnnnnnnnnnnnnnnnnnnnnnnnnnnnnnnnnnnnnnnnnnnnnnnnnnnnnnnnnnnnnnnnnnnnnnnnnnnnnnnnnnnnnnnnnnnnnnnnnnnnnnnnnnnnnnnnnnnnnnnnnnnnnnnnnnnnnnnnnnnnnnnnnnnnnnnnnnnnnnnnnnnnnnnnnnnnnnnnnnnnnnnnnnnnnnnnnnnnnnnnnnnnnnnnnnnnnnnnnnnnnnnnnnnnnnnnnnnnnnnnnnnnnnnnnnnnnnnnnnnnnnnnnnnnnnnnnnnnnnnnnnnnnnnnnnnnnnnnnnnnnnnnnnnnnnnnnnnnnnnnnnnnnnnnnnnnnnnnnnnnnnnnnnnnnnnnnnnnnnnnnnnnnnnnnnnnnnnnnnnnnnnnnnnnnnnnnnnnnnnnnnnnnnnnnnnnnnnnnnnnnnnnnnnnnnnnnnnnnnnnnnnnnnnnnnnnnnnnnnnnnnnnnnnnnnnnnnnnnnnnnnnnnnnnnnnnnnnnnnnnnnnnnnnnnnnnnnnnnnnnnnnnnnnnnnnnnnnnnnnnnnnnnnnnnnnnnnnnnnnnnnnnnnnnnnnnnnnnnnnnnnnnnnnnnnnnnnnnnnnnnnnnnnnnnnnnnnnnnnnnnnnnnnnnnnnnnnnnnnnnnnnnnnnnnnnnnnnnnnnnnnnnnnnnnnnnnnnnnnnnnnnnnnnnnnnnnnnnnnnnnnnnnnnnnnnnnnnnnnnnnnnnnnnnnnnnnnnnnnnnnnnnnnnnnnnnnnnnnnnnnnnnnnnnnnnnnnnnnnnnnnnnnnnnnnnnnnnnnnnnnnnnnnnnnnnnnnnnnnnnnnnnnnnnnnnnnnnnnnnnnnnnnnnnnnnnnnnnnnnnnnnnnnnnnnnnnnnnnnnnnnnnnnnnnnnnnnnnnnnnnnnnnnnnnnnnnnnnnnnnnnnnnnnnnnnnnnnnnnnnnnnnnnnnnnnnnnnnnnnnnnnnnnnnnnnnnnnnnnnnnnnnnnnnnnnnnnnnnnnnnnnnnnnnnnnnnnnnnnnnnnnnnnnnnnnnnnnnnnnnnnnnnnnnnnnnnnnnnnnnnnnnnnnnnnnnnnnnnnnnnnnnnnnnnnnnnnnnnnnnnnnnnnnnnnnnnnnnnnnnnnnnnnnnnnnnnnnnnnnnnnnnnnnnnnnnnnnnnnnnnnnnnnnnnnnnnnnnnnnnnnnnnnnnnnnnnnnnnnnnnnnnnnnnnnnnnnnnnnnnnnnnnnnnnnnnnnnnnnnnnnnnnnnnnnnnnnnnnnnnnnnnnnnnnnnnnnnnnnnnnnnnnnnnnnnnnnnnnnnnnnnnnnnnnnnnnnnnnnnnnnnnnnnnnnnnnnnnnnnnnnnnnnnnnnnnnnnnnnnnnnnnnnnnnnnnnnnnnnnnnnnnnnnnnnnnnnnnnnnnnnnnnnnnnnnnnnnnnnnnnnnnnnnnnnnnnnnnnnnnnnnnnnnnnnnnnnnnnnnnnnnnnnnnnnnnnnnnnnnnnnnnnnnnnnnnnnnnnnnnnnnnnnnnnnnnnnnnnnnnnnnnnnnnnnnnnnnnnnnnnnnnnnnnnnnnnnnnnnnnnnnnnnnnnnnnnnnnnnnnnnnnnnnnnnnnnnnnnnnnnnnnnnnnnnnnnnnnnnnnnnnnnnnnnnnnnnnnnnnnnnnnnnnnnnnnnnnnnnnnnnnnnnnnnnnnnnnnnnnnnnnnnnnnnnnnnnnnnnnnnnnnnnnnnnnnnnnnnnnnnnnnnnnnnnnnnnnnnnnnnnnnnnnnnnnnnnnnnnnnnnnnnnnnnnnnnnnnnnnnnnnnnnnnnnnnnnnnnnnnnnnnnnnnnnnnnnnnnnnnnnnnnnnnnnnnnnnnnnnnnnnnnnnnnnnnnnnnnnnnnnnnnnnnnnnnnnnnnnnnnnnnnnnnnnnnnnnnnnnnnnnnnnnnnnnnnnnnnnnnnnnnnnnnnnnnnnnnnnnnnnnnnnnnnnnnnnnnnnnnnnnnnnnnnnnnnnnnnnnnnnnnnnnnnnnnnnnnnnnnnnnnnnnnnnnnnnnnnnnnnnnnnnnnnnnnnnnnnnnnnnnnnnnnnnnnnnnnnnnnnnnnnnnnnnnnnnnnnnnnnnnnnnnnnnnnnnnnnnnnnnnnnnnnnnnnnnnnnnnnnnnnnnnnnnnnnnnnnnnnnnnnnnnnnnnnnnnnnnnnnnnnnnnnnnnnnnnnnnnnnnnnnnnnnnnnnnnnnnnnnnnnnnnnnnnnnnnnnnnnnnnnnnnnnnnnnnnnnnnnnnnnnnnnnnnnnnnnnnnnnnnnnnnnnnnnnnnnnnnnnnnnnnnnnnnnnnnnnnnnnnnnnnnnnnnnnnnnnnnnnnnnnnnnnnnnnnnnnnnnnnnnnnnnnnnnnnnnnnnnnnnnnnnnnnnnnnnnnnnnnnnnnnnnnnnnnnnnnnnnnnnnnnnnnnnnnnnnnnnnnnnnnnnnnnnnnnnnnnnnnnnnnnnnnnnnnnnnnnnnnnnnnnnnnnnnnnnnnnnnnnnnnnnnnnnnnnnnnnnnnnnnnnnnnnnnnnnnnnnnnnnnnnnnnnnnnnnnnnnnnnnnnnnnnnnnnnnnnnnnnnnnnnnnnnnnnnnnnnnnnnnnnnnnnnnnnnnnnnnnnnnnnnnnnnnnnnnnnnnnnnnnnnnnnnnnnnnnnnnnnnnnnnnnnnnnnnnnnnnnnnnnnnnnnnnnnnnnnnnnnnnnnnnnnnnnnnnnnnnnnnnnnnnnnnnnnnnnnnnnnnnnnnnnnnnnnnnnnnnnnnnnnnnnnnnnnnnnnnnnnnnnnnnnnnnnnnnnnnnnnnnnnnnnnnnnnnnnnnnnnnnnnnnnnnnnnnnnnnnnnnnnnnnnnnnnnnnnnnnnnnnnnnnnnnnnnnnnnnnnnnnnnnnnnnnnnnnnnnnnnnnnnnnnnnnnnnnnnnnnnnnnnnnnnnnnnnnnnnnnnnnnnnnnnnnnnnnnnnnnnnnnnnnnnnnnnnnnnnnnnnnnnnnnnnnnnnnnnnnnnnnnnnnnnnnnnnnnnnnnnnnnnnnnnnnnnnnnnnnnnnnnnnnnnnnnnnnnnnnnnnnnnnnnnnnnnnnnnnnnnnnnnnnnnnnnnnnnnnnnnnnnnnnnnnnnnnnnnnnnnnnnnnnnnnnnnnnnnnnnnnnnnnnnnnnnnnnnnnnnnnnnnnnnnnnnnnnnnnnnnnnnnnnnnnnnnnnnnnnnnnnnnnnnnnnnnnnnnnnnnnnnnnnnnnnnnnnnnnnnnnnnnnnnnnnnnnnnnnnnnnnnnnnnnnnnnnnnnnnnnnnnnnnnnnnnnnnnnnnnnnnnnnnnnnnnnnnnnnnnnnnnnnnnnnnnnnnnnnnnnnnnnnnnnnnnnnnnnnnnnnnnnnnnnnnnnnnnnnnnnnnnnnnnnnnnnnnnnnnnnnnnnnnnnnnnnnnnnnnnnnnnnnnnnnnnnnnnnnnnnnnnnnnnnnnnnnnnnnnnnnnnnnnnnnnnnnnnnnnnnnnnnnnnnnnnnnnnnnnnnnnnnnnnnnnnnnnnnnnnnnnnnnnnnnnnnnnnnnnnnnnnnnnnnnnnnnnnnnnnnnnnnnnnnnnnnnnnnnnnnnnnnnnnnnnnnnnnnnnnnnnnnnnnnnnnnnnnnnnnnnnnnnnnnnnnnnnnnnnnnnnnnnnnnnnnnnnnnnnnnnnnnnnnnnnnnnnnnnnnnnnnnnnnnnnnnnnnnnnnnnnnnnnnnnnnnnnnnnnnnnnnnnnnnnnnnnnnnnnnnnnnnnnnnnnnnnnnnnnnnnnnnnnnnnnnnnnnnnnnnnnnnnnnnnnnnnnnnnnnnnnnnnnnnnnnnnnnnnnnnnnnnnnnnnnnnnnnnnnnnnnnnnnnnnnnnnnnnnnnnnnnnnnnnnnnnnnnnnnnnnnnnnnnnnnnnnnnnnnnnnnnnnnnnnnnnnnnnnnnnnnnnnnnnnnnnnnnnnnnnnnnnnnnnnnnnnnnnnnnnnnnnnnnnnnnnnnnnnnnnnnnnnnnnnnnnnnnnnnnnnnnnnnnnnnnnnnnnnnnnnnnnnnnnnnnnnnnnnnnnnnnnnnnnnnnnnnnnnnnnnnnnnnnnnnnnnnnnnnnnnnnnnnnnnnnnnnnnnnnnnnnnnnnnnnnnnnnnnnnnnnnnnnnnnnnnnnnnnnnnnnnnnnnnnnnnnnnnnnnnnnnnnnnnnnnnnnnnnnnnnnnnnnnnnnnnnnnnnnnnnnnnnnnnnnnnnnnnnnnnnnnnnnnnnnnnnnnnnnnnnnnnnnnnnnnnnnnnnnnnnnnnnnnnnnnnnnnnnnnnnnnnnnnnnnnnnnnnnnnnnnnnnnnnnnnnnnnnnnnnnnnnnnnnnnnnnnnnnnnnnnnnnnnnnnnnnnnnnnnnnnnnnnnnnnnnnnnnnnnnnnnnnnnnnnnnnnnnnnnnnnnnnnnnnnnnnnnnnnnnnnnnnnnnnnnnnnnnnnnnnnnnnnnnnnnnnnnnnnnnnnnnnnnnnnnnnnnnnnnnnnnnnnnnnnnnnnnnnnnnnnnnnnnnnnnnnnnnnnnnnnnnnnnnnnnnnnnnnnnnnnnnnnnnnnnnnnnnnnnnnnnnnnnnnnnnnnnnnnnnnnnnnnnnnnnnnnnnnnnnnnnnnnnnnnnnnnnnnnnnnnnnnnnnnnnnnnnnnnnnnnnnnnnnnnnnnnnnnnnnnnnnnnnnnnnnnnnnnnnnnnnnnnnnnnnnnnnnnnnnnnnnnnnnnnnnnnnnnnnnnnnnnnnnnnnnnnnnnnnnnnnnnnnnnnnnnnnnnnnnnnnnnnnnnnnnnnnnnnnnnnnnnnnnnnnnnnnnnnnnnnnnnnnnnnnnnnnnnnnnnnnnnnnnnnnnnnnnnnnnnnnnnnnnnnnnnnnnnnnnnnnnnnnnnnnnnnnnnnnnnnnnnnnnnnnnnnnnnnnnnnnnnnnnnnnnnnnnnnnnnnnnnnnnnnnnnnnnnnnnnnnnnnnnnnnnnnnnnnnnnnnnnnnnnnnnnnnnnnnnnnnnnnnnnnnnnnnnnnnnnnnnnnnnnnnnnnnnnnnnnnnnnnnnnnnnnnnnnnnnnnnnnnnnnnnnnnnnnnnnnnnnnnnnnnnnnnnnnnnnnnnnnnnnnnnnnnnnnnnnnnnnnnnnnnnnnnnnnnnnnnnnnnnnnnnnnnnnnnnnnnnnnnnnnnnnnnnnnnnnnnnnnnnnnnnnnnnnnnnnnnnnnnnnnnnnnnnnnnnnnnnnnnnnnnnnnnnnnnnnnnnnnnnnnnnnnnnnnnnnnnnnnnnnnnnnnnnnnnnnnnnnnnnnnnnnnnnnnnnnnnnnnnnnnnnnnnnnnnnnnnnnnnnnnnnnnnnnnnnnnnnnnnnnnnnnnnnnnnnnnnnnnnnnnnnnnnnnnnnnnnnnnnnnnnnnnnnnnnnnnnnnnnnnnnnnnnnnnnnnnnnnnnnnnnnnnnnnnnnnnnnnnnnnnnnnnnnnnnnnnnnnnnnnnnnnnnnnnnnnnnnnnnnnnnnnnnnnnnnnnnnnnnnnnnnnnnnnnnnnnnnnnnnnnnnnnnnnnnnnnnnnnnnnnnnnnnnnnnnnnnnnnnnnnnnnnnnnnnnnnnnnnnnnnnnnnnnnnnnnnnnnnnnnnnnnnnnnnnnnnnnnnnnnnnnnnnnnnnnnnnnnnnnnnnnnnnnnnnnnnnnnnnnnnnnnnnnnnnnnnnnnnnnnnnnnnnnnnnnnnnnnnnnnnnnnnnnnnnnnnnnnnnnnnnnnnnnnnnnnnnnnnnnnnnnnnnnnnnnnnnnnnnnnnnnnnnnnnnnnnnnnnnnnnnnnnnnnnnnnnnnnnnnnnnnnnnnnnnnnnnnnnnnnnnnnnnnnnnnnnnnnnnnnnnnnnnnnnnnnnnnnnnnnnnnnnnnnnnnnnnnnnnnnnnnnnnnnnnnnnnnnnnnnnnnnnnnnnnnnnnnnnnnnnnnnnnnnnnnnnnnnnnnnnnnnnnnnnnnnnnnnnnnnnnnnnnnnnnnnnnnnnnnnnnnnnnnnnnnnnnnnnnnnnnnnnnnnnnnnnnnnnnnnnnnnnnnnnnnnnnnnnnnnnnnnnnnnnnnnnnnnnnnnnnnnnnnnnnnnnnnnnnnnnnnnnnnnnnnnnnnnnnnnnnnnnnnnnnnnnnnnnnnnnnnnnnnnnnnnnnnnnnnnnnnnnnnnnnnnnnnnnnnnnnnnnnnnnnnnnnnnnnnnnnnnnnnnnnnnnnnnnnnnnnnnnnnnnnnnnnnnnnnnnnnnnnnnnnnnnnnnnnnnnnnnnnnnnnnnnnnnnnnnnnnnnnnnnnnnnnnnnnnnnnnnnnnnnnnnnnnnnnnnnnnnnnnnnnnnnnnnnnnnnnnnnnnnnnnnnnnnnnnnnnnnnnnnnnnnnnnnnnnnnnnnnnnnnnnnnnnnnnnnnnnnnnnnnnnnnnnnnnnnnnnnnnnnnnnnnnnnnnnnnnnnnnnnnnnnnnnnnnnnnnnnnnnnnnnnnnnnnnnnnnnnnnnnnnnnnnnnnnnnnnnnnnnnnnnnnnnnnnnnnnnnnnnnnnnnnnnnnnnnnnnnnnnnnnnnnnnnnnnnnnnnnnnnnnnnnnnnnnnnnnnnnnnnnnnnnnnnnnnnnnnnnnnnnnnnnnnnnnnnnnnnnnnnnnnnnnnnnnnnnnnnnnnnnnnnnnnnnnnnnnnnnnnnnnnnnnnnnnnnnnnnnnnnnnnnnnnnnnnnnnnnnnnnnnnnnnnnnnnnnnnnnnnnnnnnnnnnnnnnnnnnnnnnnnnnnnnnnnnnnnnnnnnnnnnnnnnnnnnnnnnnnnnnnnnnnnnnnnnnnnnnnnnnnnnnnnnnnnnnnnnnnnnnnnnnnnnnnnnnnnnnnnnnnnnnnnnnnnnnnnnnnnnnnnnnnnnnnnnnnnnnnnnnnnnnnnnnnnnnnnnnnnnnnnnnnnnnnnnnnnnnnnnnnnnnnnnnnnnnnnnnnnnnnnnnnnnnnnnnnnnnnnnnnnnnnnnnnnnnnnnnnnnnnnnnnnnnnnnnnnnnnnnnnnnnnnnnnnnnnnnnnnnnnnnnnnnnnnnnnnnnnnnnnnnnnnnnnnnnnnnnnnnnnnnnnnnnnnnnnnnnnnnnnnnnnnnnnnnnnnnnnnnnnnnnnnnnnnnnnnnnnnnnnnnnnnnnnnnnnnnnnnnnnnnnnnnnnnnnnnnnnnnnnnnnnnnnnnnnnnnnnnnnnnnnnnnnnnnnnnnnnnnnnnnnnnnnnnnnnnnnnnnnnnnnnnnnnnnnnnnnnnnnnnnnnnnnnnnnnnnnnnnnnnnnnnnnnnnnnnnnnnnnnnnnnnnnnnnnnnnnnnnnnnnnnnnnnnnnnnnnnnnnnnnnnnnnnnnnnnnnnnnnnnnnnnnnnnnnnnnnnnnnnnnnnnnnnnnnnnnnnnnnnnnnnnnnnnnnnnnnnnnnnnnnnnnnnnnnnnnnnnnnnnnnnnnnnnnnnnnnnnnnnnnnnnnnnnnnnnnnnnnnnnnnnnnnnnnnnnnnnnnnnnnnnnnnnnnnnnnnnnnnnnnnnnnnnnnnnnnnnnnnnnnnnnnnnnnnnnnnnnnnnnnnnnnnnnnnnnnnnnnnnnnnnnnnnnnnnnnnnnnnnnnnnnnnnnnnnnnnnnnnnnnnnnnnnnnnnnnnnnnnnnnnnnnnnnnnnnnnnnnnnnnnnnnnnnnnnnnnnnnnnnnnnnnnnnnnnnnnnnnnnnnnnnnnnnnnnnnnnnnnnnnnnnnnnnnnnnnnnnnnnnnnnnnnnnnnnnnnnnnnnnnnnnnnnnnnnnnnnnnnnnnnnnnnnnnnnnnnnnnnnnnnnnnnnnnnnnnnnnnnnnnnnnnnnnnnnnnnnnnnnnnnnnnnnnnnnnnnnnnnnnnnnnnnnnnnnnnnnnnnnnnnnnnnnnnnnnnnnnnnnnnnnnnnnnnnnnnnnnnnnnnnnnnnnnnnnnnnnnnnnnnnnnnnnnnnnnnnnnnnnnnnnnnnnnnnnnnnnnnnnnnnnnnnnnnnnnnnnnnnnnnnnnnnnnnnnnnnnnnnnnnnnnnnnnnnnnnnnnnnnnnnnnnnnnnnnnnnnnnnnnnnnnnnnnnnnnnnnnnnnnnnnnnnnnnnnnnnnnnnnnnnnnnnnnnnnnnnnnnnnnnnnnnnnnnnnnnnnnnnnnnnnnnnnnnnnnnnnnnnnnnnnnnnnnnnnnnnnnnnnnnnnnnnnnnnnnnnnnnnnnnnnnnnnnnnnnnnnnnnnnnnnnnnnnnnnnnnnnnnnnnnnnnnnnnnnnnnnnnnnnnnnnnnnnnnnnnnnnnnnnnnnnnnnnnnnnnnnnnnnnnnnnnnnnnnnnnnnnnnnnnnnnnnnnnnnnnnnnnnnnnnnnnnnnnnnnnnnnnnnnnnnnnnnnnnnnnnnnnnnnnnnnnnnnnnnnnnnnnnnnnnnnnnnnnnnnnnnnnnnnnnnnnnnnnnnnnnnnnnnnnnnnnnnnnnnnnnnnnnnnnnnnnnnnnnnnnnnnnnnnnnnnnnnnnnnnnnnnnnnnnnnnnnnnnnnnnnnnnnnnnnnnnnnnnnnnnnnnnnnnnnnnnnnnnnnnnnnnnnnnnnnnnnnnnnnnnnnnnnnnnnnnnnnnnnnnnnnnnnnnnnnnnnnnnnnnnnnnnnnnnnnnnnnnnnnnnnnnnnnnnnnnnnnnnnnnnnnnnnnnnnnnnnnnnnnnnnnnnnnnnnnnnnnnnnnnnnnnnnnnnnnnnnnnnnnnnnnnnnnnnnnnnnnnnnnnnnnnnnnnnnnnnnnnnnnnnnnnnnnnnnnnnnnnnnnnnnnnnnnnnnnnnnnnnnnnnnnnnnnnnnnnnnnnnnnnnnnnnnnnnnnnnnnnnnnnnnnnnnnnnnnnnnnnnnnnnnnnnnnnnnnnnnnnnnnnnnnnnnnnnnnnnnnnnnnnnnnnnnnnnnnnnnnnnnnnnnnnnnnnnnnnnnnnnnnnnnnnnnnnnnnnnnnnnnnnnnnnnnnnnnnnnnnnnnnnnnnnnnnnnnnnnnnnnnnnnnnnnnnnnnnnnnnnnnnnnnnnnnnnnnnnnnnnnnnnnnnnnnnnnnnnnnnnnnnnnnnnnnnnnnnnnnnnnnnnnnnnnnnnnnnnnnnnnnnnnnnnnnnnnnnnnnnnnnnnnnnnnnnnnnnnnnnnnnnnnnnnnnnnnnnnnnnnnnnnnnnnnnnnnnnnnnnnnnnnnnnnnnnnnnnnnnnnnnnnnnnnnnnnnnnnnnnnnnnnnnnnnnnnnnnnnnnnnnnnnnnnnnnnnnnnnnnnnnnnnnnnnnnnnnnnnnnnnnnnnnnnnnnnnnnnnnnnnnnnnnnnnnnnnnnnnnnnnnnnnnnnnnnnnnnnnnnnnnnnnnnnnnnnnnnnnnnnnnnnnnnnnnnnnnnnnnnnnnnnnnnnnnnnnnnnnnnnnnnnnnnnnnnnnnnnnnnnnnnnnnnnnnnnnnnnnnnnnnnnnnnnnnnnnnnnnnnnnnnnnnnnnnnnnnnnnnnnnnnnnnnnnnnnnnnnnnnnnnnnnnnnnnnnnnnnnnnnnnnnnnnnnnnnnnnnnnnnnnnnnnnnnnnnnnnnnnnnnnnnnnnnnnnnnnnnnnnnnnnnnnnnnnnnnnnnnnnnnnnnnnnnnnnnnnnnnnnnnnnnnnnnnnnnnnnnnnnnnnnnnnnnnnnnnnnnnnnnnnnnnnnnnnnnnnnnnnnnnnnnnnnnnnnnnnnnnnnnnnnnnnnnnnnnnnnnnnnnnnnnnnnnnnnnnnnnnnnnnnnnnnnnnnnnnnnnnnnnnnnnnnnnnnnnnnnnnnnnnnnnnnnnnnnnnnnnnnnnnnnnnnnnnnnnnnnnnnnnnnnnnnnnnnnnnnnnnnnnnnnnnnnnnnnnnnnnnnnnnnnnnnnnnnnnnnnnnnnnnnnnnnnnnnnnnnnnnnnnnnnnnnnnnnnnnnnnnnnnnnnnnnnnnnnnnnnnnnnnnnnnnnnnnnnnnnnnnnnnnnnnnnnnnnnnnnnnnnnnnnnnnnnnnnnnnnnnnnnnnnnnnnnnnnnnnnnnnnnnnnnnnnnnnnnnnnnnnnnnnnnnnnnnnnnnnnnnnnnnnnnnnnnnnnnnnnnnnnnnnnnnnnnnnnnnnnnnnnnnnnnnnnnnnnnnnnnnnnnnnnnnnnnnnnnnnnnnnnnnnnnnnnnnnnnnnnnnnnnnnnnnnnnnnnnnnnnnnnnnnnnnnnnnnnnnnnnnnnnnnnnnnnnnnnnnnnnnnnnnnnnnnnnnnnnnnnnnnnnnnnnnnnnnnnnnnnnnnnnnnnnnnnnnnnnnnnnnnnnnnnnnnnnnnnnnnnnnnnnnnnnnnnnnnnnnnnnnnnnnnnnnnnnnnnnnnnnnnnnnnnnnnnnnnnnnnnnnnnnnnnnnnnnnnnnnnnnnnnnnnnnnnnnnnnnnnnnnnnnnnnnnnnnnnnnnnnnnnnnnnnnnnnnnnnnnnnnnnnnnnnnnnnnnnnnnnnnnnnnnnnnnnnnnnnnnnnnnnnnnnnnnnnnnnnnnnnnnnnnnnnnnnnnnnnnnnnnnnnnnnnnnnnnnnnnnnnnnnnnnnnnnnnnnnnnnnnnnnnnnnnnnnnnnnnnnnnnnnnnnnnnnnnnnnnnnnnnnnnnnnnnnnnnnnnnnnnnnnnnnnnnnnnnnnnnnnnnnnnnnnnnnnnnnnnnnnnnnnnnnnnnnnnnnnnnnnnnnnnnnnnnnnnnnnnnnnnnnnnnnnnnnnnnnnnnnnnnnnnnnnnnnnnnnnnnnnnnnnnnnnnnnnnnnnnnnnnnnnnnnnnnnnnnnnnnnnnnnnnnnnnnnnnnnnnnnnnnnnnnnnnnnnnnnnnnnnnnnnnnnnnnnnnnnnnnnnnnnnnnnnnnnnnnnnnnnnnnnnnnnnnnnnnnnnnnnnnnnnnnnnnnnnnnnnnnnnnnnnnnnnnnnnnnnnnnnnnnnnnnnnnnnnnnnnnnnnnnnnnnnnnnnnnnnnnnnnnnnnnnnnnnnnnnnnnnnnnnnnnnnnnnnnnnnnnnnnnnnnnnnnnnnnnnnnnnnnnnnnnnnnnnnnnnnnnnnnnnnnnnnnnnnnnnnnnnnnnnnnnnnnnnnnnnnnnnnnnnnnnnnnnnnnnnnnnnnnnnnnnnnnnnnnnnnnnnnnnnnnnnnnnnnnnnnnnnnnnnnnnnnnnnnnnnnnnnnnnnnnnnnnnnnnnnnnnnnnnnnnnnnnnnnnnnnnnnnnnnnnnnnnnnnnnnnnnnnnnnnnnnnnnnnnnnnnnnnnnnnnnnnnnnnnnnnnnnnnnnnnnnnnnnnnnnnnnnnnnnnnnnnnnnnnnnnnnnnnnnnnnnnnnnnnnnnnnnnnnnnnnnnnnnnnnnnnnnnnnnnnnnnnnnnnnnnnnnnnnnnnnnnnnnnnnnnnnnnnnnnnnnnnnnnnnnnnnnnnnnnnnnnnnnnnnnnnnnnnnnnnnnnnnnnnnnnnnnnnnnnnnnnnnnnnnnnnnnnnnnnnnnnnnnnnnnnnnnnnnnnnnnnnnnnnnnnnnnnnnnnnnnnnnnnnnnnnnnnnnnnnnnnnnnnnnnnnnnnnnnnnnnnnnnnnnnnnnnnnnnnnnnnnnnnnnnnnnnnnnnnnnnnnnnnnnnnnnnnnnnnnnnnnnnnnnnnnnnnnnnnnnnnnnnnnnnnnnnnnnnnnnnnnnnnnnnnnnnnnnnnnnnnnnnnnnnnnnnnnnnnnnnnnnnnnnnnnnnnnnnnnnnnnnnnnnnnnnnnnnnnnnnnnnnnnnnnnnnnnnnnnnnnnnnnnnnnnnnnnnnnnnnnnnnnnnnnnnnnnnnnnnnnnnnnnnnnnnnnnnnnnnnnnnnnnnnnnnnnnnnnnnnnnnnnnnnnnnnnnnnnnnnnnnnnnnnnnnnnnnnnnnnnnnnnnnnnnnnnnnnnnnnnnnnnnnnnnnnnnnnnnnnnnnnnnnnnnnnnnnnnnnnnnnnnnnnnnnnnnnnnnnnnnnnnnnnnnnnnnnnnnnnnnnnnnnnnnnnnnnnnnnnnnnnnnnnnnnnnnnnnnnnnnnnnnnnnnnnnnnnnnnnnnnnnnnnnnnnnnnnnnnnnnnnnnnnnnnnnnnnnnnnnnnnnnnnnnnnnnnnnnnnnnnnnnnnnnnnnnnnnnnnnnnnnnnnnnnnnnnnnnnnnnnnnnnnnnnnnnnnnnnnnnnnnnnnnnnnnnnnnnnnnnnnnnnnnnnnnnnnnnnnnnnnnnnnnnnnnnnnnnnnnnnnnnnnnnnnnnnnnnnnnnnnnnnnnnnnnnnnnnnnnnnnnnnnnnnnnnnnnnnnnnnnnnnnnnnnnnnnnnnnnnnnnnnnnnnnnnnnnnnnnnnnnnnnnnnnnnnnnnnnnnnnnnnnnnnnnnnnnnnnnnnnnnnnnnnnnnnnnnnnnnnnnnnnnnnnnnnnnnnnnnnnnnnnnnnnnnnnnnnnnnnnnnnnnnnnnnnnnnnnnnnnnnnnnnnnnnnnnnnnnnnnnnnnnnnnnnnnnnnnnnnnnnnnnnnnnnnnnnnnnnnnnnnnnnnnnnnnnnnnnnnnnnnnnnnnnnnnnnnnnnnnnnnnnnnnnnnnnnnnnnnnnnnnnnnnnnnnnnnnnnnnnnnnnnnnnnnnnnnnnnnnnnnnnnnnnnnnnnnnnnnnnnnnnnnnnnnnnnnnnnnnnnnnnnnnnnnnnnnnnnnnnnnnnnnnnnnnnnnnnnnnnnnnnnnnnnnnnnnnnnnnnnnnnnnnnnnnnnnnnnnnnnnnnnnnnnnnnnnnnnnnnnnnnnnnnnnnnnnnnnnnnnnnnnnnnnnnnnnnnnnnnnnnnnnnnnnnnnnnnnnnnnnnnnnnnnnnnnnnnnnnnnnnnnnnnnnnnnnnnnnnnnnnnnnnnnnnnnnnnnnnnnnnnnnnnnnnnnnnnnnnnnnnnnnnnnnnnnnnnnnnnnnnnnnnnnnnnnnnnnnnnnnnnnnnnnnnnnnnnnnnnnnnnnnnnnnnnnnnnnnnnnnnnnnnnnnnnnnnnnnnnnnnnnnnnnnnnnnnnnnnnnnnnnnnnnnnnnnnnnnnnnnnnnnnnnnnnnnnnnnnnnnnnnnnnnnnnnnnnnnnnnnnnnnnnnnnnnnnnnnnnnnnnnnnnnnnnnnnnnnnnnnnnnnnnnnnnnnnnnnnnnnnnnnnnnnnnnnnnnnnnnnnnnnnnnnnnnnnnnnnnnnnnnnnnnnnnnnnnnnnnnnnnnnnnnnnnnnnnnnnnnnnnnnnnnnnnnnnnnnnnnnnnnnnnnnnnnnnnnnnnnnnnnnnnnnnnnnnnnnnnnnnnnnnnnnnnnnnnnnnnnnnnnnnnnnnnnnnnnnnnnnnnnnnnnnnnnnnnnnnnnnnnnnnnnnnnnnnnnnnnnnnnnnnnnnnnnnnnnnnnnnnnnnnnnnnnnnnnnnnnnnnnnnnnnnnnnnnnnnnnnnnnnnnnnnnnnnnnnnnnnnnnnnnnnnnnnnnnnnnnnnnnnnnnnnnnnnnnnnnnnnnnnnnnnnnnnnnnnnnnnnnnnnnnnnnnnnnnnnnnnnnnnnnnnnnnnnnnnnnnnnnnnnnnnnnnnnnnnnnnnnnnnnnnnnnnnnnnnnnnnnnnnnnnnnnnnnnnnnnnnnnnnnnnnnnnnnnnnnnnnnnnnnnnnnnnnnnnnnnnnnnnnnnnnnnnnnnnnnnnnnnnnnnnnnnnnnnnnnnnnnnnnnnnnnnnnnnnnnnnnnnnnnnnnnnnnnnnnnnnnnnnnnnnnnnnnnnnnnnnnnnnnnnnnnnnnnnnnnnnnnnnnnnnnnnnnnnnnnnnnnnnnnnnnnnnnnnnnnnnnnnnnnnnnnnnnnnnnnnnnnnnnnnnnnnnnnnnnnnnnnnnnnnnnnnnnnnnnnnnnnnnnnnnnnnnnnnnnnnnnnnnnnnnnnnnnnnnnnnnnnnnnnnnnnnnnnnnnnnnnnnnnnnnnnnnnnnnnnnnnnnnnnnnnnnnnnnnnnnnnnnnnnnnnnnnnnnnnnnnnnnnnnnnnnnnnnnnnnnnnnnnnnnnnnnnnnnnnnnnnnnnnnnnnnnnnnnnnnnnnnnnnnnnnnnnnnnnnnnnnnnnnnnnnnnnnnnnnnnnnnnnnnnnnnnnnnnnnnnnnnnnnnnnnnnnnnnnnnnnnnnnnnnnnnnnnnnnnnnnnnnnnnnnnnnnnnnnnnnnnnnnnnnnnnnnnnnnnnnnnnnnnnnnnnnnnnnnnnnnnnnnnnnnnnnnnnnnnnnnnnnnnnnnnnnnnnnnnnnnnnnnnnnnnnnnnnnnnnnnnnnnnnnnnnnnnnnnnnnnnnnnnnnnnnnnnnnnnnnnnnnnnnnnnnnnnnnnnnnnnnnnnnnnnnnnnnnnnnnnnnnnnnnnnnnnnnnnnnnnnnnnnnnnnnnnnnnnnnnnnnnnnnnnnnnnnnnnnnnnnnnnnnnnnnnnnnnnnnnnnnnnnnnnnnnnnnnnnnnnnnnnnnnnnnnnnnnnnnnnnnnnnnnnnnnnnnnnnnnnnnnnnnnnnnnnnnnnnnnnnnnnnnnnnnnnnnnnnnnnnnnnnnnnnnnnnnnnnnnnnnnnnnnnnnnnnnnnnnnnnnnnnnnnnnnnnnnnnnnnnnnnnnnnnnnnnnnnnnnnnnnnnnnnnnnnnnnnnnnnnnnnnnnnnnnnnnnnnnnnnnnnnnnnnnnnnnnnnnnnnnnnnnnnnnnnnnnnnnnnnnnnnnnnnnnnnnnnnnnnnnnnnnnnnnnnnnnnnnnnnnnnnnnnnnnnnnnnnnnnnnnnnnnnnnnnnnnnnnnnnnnnnnnnnnnnnnnnnnnnnnnnnnnnnnnnnnnnnnnnnnnnnnnnnnnnnnnnnnnnnnnnnnnnnnnnnnnnnnnnnnnnnnnnnnnnnnnnnnnnnnnnnnnnnnnnnnnnnnnnnnnnnnnnnnnnnnnnnnnnnnnnnnnnnnnnnnnnnnnnnnnnnnnnnnnnnnnnnnnnnnnnnnnnnnnnnnnnnnnnnnnnnnnnnnnnnnnnnnnnnnnnnnnnnnnnnnnnnnnnnnnnnnnnnnnnnnnnnnnnnnnnnnnnnnnnnnnnnnnnnnnnnnnnnnnnnnnnnnnnnnnnnnnnnnnnnnnnnnnnnnnnnnnnnnnnnnnnnnnnnnnnnnnnnnnnnnnnnnnnnnnnnnnnnnnnnnnnnnnnnnnnnnnnnnnnnnnnnnnnnnnnnnnnnnnnnnnnnnnnnnnnnnnnnnnnnnnnnnnnnnnnnnnnnnnnnnnnnnnnnnnnnnnnnnnnnnnnnnnnnnnnnnnnnnnnnnnnnnnnnnnnnnnnnnnnnnnnnnnnnnnnnnnnnnnnnnnnnnnnnnnnnnnnnnnnnnnnnnnnnnnnnnnnnnnnnnnnnnnnnnnnnnnnnnnnnnnnnnnnnnnnnnnnnnnnnnnnnnnnnnnnnnnnnnnnnnnnnnnnnnnnnnnnnnnnnnnnnnnnnnnnnnnnnnnnnnnnnnnnnnnnnnnnnnnnnnnnnnnnnnnnnnnnnnnnnnnnnnnnnnnnnnnnnnnnnnnnnnnnnnnnnnnnnnnnnnnnnnnnnnnnnnnnnnnnnnnnnnnnnnnnnnnnnnnnnnnnnnnnnnnnnnnnnnnnnnnnnnnnnnnnnnnnnnnnnnnnnnnnnnnnnnnnnnnnnnnnnnnnnnnnnnnnnnnnnnnnnnnnnnnnnnnnnnnnnnnnnnnnnnnnnnnnnnnnnnnnnnnnnnnnnnnnnnnnnnnnnnnnnnnnnnnnnnnnnnnnnnnnnnnnnnnnnnnnnnnnnnnnnnnnnnnnnnnnnnnnnnnnnnnnnnnnnnnnnnnnnnnnnnnnnnnnnnnnnnnnnnnnnnnnnnnnnnnnnnnnnnnnnnnnnnnnnnnnnnnnnnnnnnnnnnnnnnnnnnnnnnnnnnnnnnnnnnnnnnnnnnnnnnnnnnnnnnnnnnnnnnnnnnnnnnnnnnnnnnnnnnnnnnnnnnnnnnnnnnnnnnnnnnnnnnnnnnnnnnnnnnnnnnnnnnnnnnnnnnnnnnnnnnnnnnnnnnnnnnnnnnnnnnnnnnnnnnnnnnnnnnnnnnnnnnnnnnnnnnnnnnnnnnnnnnnnnnnnnnnnnnnnnnnnnnnnnnnnnnnnnnnnnnnnnnnnnnnnnnnnnnnnnnnnnnnnnnnnnnnnnnnnnnnnnnnnnnnnnnnnnnnnnnnnnnnnnnnnnnnnnnnnnnnnnnnnnnnnnnnnnnnnnnnnnnnnnnnnnnnnnnnnnnnnnnnnnnnnnnnnnnnnnnnnnnnnnnnnnnnnnnnnnnnnnnnnnnnnnnnnnnnnnnnnnnnnnnnnnnnnnnnnnnnnnnnnnnnnnnnnnnnnnnnnnnnnnnnnnnnnnnnnnnnnnnnnnnnnnnnnnnnnnnnnnnnnnnnnnnnnnnnnnnnnnnnnnnnnnnnnnnnnnnnnnnnnnnnnnnnnnnnnnnnnnnnnnnnnnnnnnnnnnnnnnnnnnnnnnnnnnnnnnnnnnnnnnnnnnnnnnnnnnnnnnnnnnnnnnnnnnnnnnnnnnnnnnnnnnnnnnnnnnnnnnnnnnnnnnnnnnnnnnnnnnnnnnnnnnnnnnnnnnnnnnnnnnnnnnnnnnnnnnnnnnnnnnnnnnnnnnnnnnnnnnnnnnnnnnnnnnnnnnnnnnnnnnnnnnnnnnnnnnnnnnnnnnnnnnnnnnnnnnnnnnnnnnnnnnnnnnnnnnnnnnnnnnnnnnnnnnnnnnnnnnnnnnnnnnnnnnnnnnnnnnnnnnnnnnnnnnnnnnnnnnnnnnnnnnnnnnnnnnnnnnnnnnnnnnnnnnnnnnnnnnnnnnnnnnnnnnnnnnnnnnnnnnnnnnnnnnnnnnnnnnnnnnnnnnnnnnnnnnnnnnnnnnnnnnnnnnnnnnnnnnnnnnnnnnnnnnnnnnnnnnnnnnnnnnnnnnnnnnnnnnnnnnnnnnnnnnnnnnnnnnnnnnnnnnnnnnnnnnnnnnnnnnnnnnnnnnnnnnnnnnnnnnnnnnnnnnnnnnnnnnnnnnnnnnnnnnnnnnnnnnnnnnnnnnnnnnnnnnnnnnnnnnnnnnnnnnnnnnnnnnnnnnnnnnnnnnnnnnnnnnnnnnnnnnnnnnnnnnnnnnnnnnnnnnnnnnnnnnnnnnnnnnnnnnnnnnnnnnnnnnnnnnnnnnnnnnnnnnnnnnnnnnnnnnnnnnnnnnnnnnnnnnnnnnnnnnnnnnnnnnnnnnnnnnnnnnnnnnnnnnnnnnnnnnnnnnnnnnnnnnnnnnnnnnnnnnnnnnnnnnnnnnnnnnnnnnnnnnnnnnnnnnnnnnnnnnnnnnnnnnnnnnnnnnnnnnnnnnnnnnnnnnnnnnnnnnnnnnnnnnnnnnnnnnnnnnnnnnnnnnnnnnnnnnnnnnnnnnnnnnnnnnnnnnnnnnnnnnnnnnnnnnnnnnnnnnnnnnnnnnnnnnnnnnnnnnnnnnnnnnnnnnnnnnnnnnnnnnnnnnnnnnnnnnnnnnnnnnnnnnnnnnnnnnnnnnnnnnnnnnnnnnnnnnnnnnnnnnnnnnnnnnnnnnnnnnnnnnnnnnnnnnnnnnnnnnnnnnnnnnnnnnnnnnnnnnnnnnnnnnnnnnnnnnnnnnnnnnnnnnnnnnnnnnnnnnnnnnnnnnnnnnnnnnnnnnnnnnnnnnnnnnnnnnnnnnnnnnnnnnnnnnnnnnnnnnnnnnnnnnnnnnnnnnnnnnnnnnnnnnnnnnnnnnnnnnnnnnnnnnnnnnnnnnnnnnnnnnnnnnnnnnnnnnnnnnnnnnnnnnnnnnnnnnnnnnnnnnnnnnnnnnnnnnnnnnnnnnnnnnnnnnnnnnnnnnnnnnnnnnnnnnnnnnnnnnnnnnnnnnnnnnnnnnnnnnnnnnnnnnnnnnnnnnnnnnnnnnnnnnnnnnnnnnnnnnnnnnnnnnnnnnnnnnnnnnnnnnnnnnnnnnnnnnnnnnnnnnnnnnnnnnnnnnnnnnnnnnnnnnnnnnnnnnnnnnnnnnnnnnnnnnnnnnnnnnnnnnnnnnnnnnnnnnnnnnnnnnnnnnnnnnnnnnnnnnnnnnnnnnnnnnnnnnnnnnnnnnnnnnnnnnnnnnnnnnnnnnnnnnnnnnnnnnnnnnnnnnnnnnnnnnnnnnnnnnnnnnnnnnnnnnnnnnnnnnnnnnnnnnnnnnnnnnnnnnnnnnnnnnnnnnnnnnnnnnnnnnnnnnnnnnnnnnnnnnnnnnnnnnnnnnnnnnnnnnnnnnnnnnnnnnnnnnnnnnnnnnnnnnnnnnnnnnnnnnnnnnnnnnnnnnnnnnnnnnnnnnnnnnnnnnnnnnnnnnnnnnnnnnnnnnnnnnnnnnnnnnnnnnnnnnnnnnnnnnnnnnnnnnnnnnnnnnnnnnnnnnnnnnnnnnnnnnnnnnnnnnnnnnnnnnnnnnnnnnnnnnnnnnnnnnnnnnnnnnnnnnnnnnnnnnnnnnnnnnnnnnnnnnnnnnnnnnnnnnnnnnnnnnnnnnnnnnnnnnnnnnnnnnnnnnnnnnnnnnnnnnnnnnnnnnnnnnnnnnnnnnnnnnnnnnnnnnnnnnnnnnnnnnnnnnnnnnnnnnnnnnnnnnnnnnnnnnnnnnnnnnnnnnnnnnnnnnnnnnnnnnnnnnnnnnnnnnnnnnnnnnnnnnnnnnnnnnnnnnnnnnnnnnnnnnnnnnnnnnnnnnnnnnnnnnnnnnnnnnnnnnnnnnnnnnnnnnnnnnnnnnnnnnnnnnnnnnnnnnnnnnnnnnnnnnnnnnnnnnnnnnnnnnnnnnnnnnnnnnnnnnnnnnnnnnnnnnnnnnnnnnnnnnnnnnnnnnnnnnnnnnnnnnnnnnnnnnnnnnnnnnnnnnnnnnnnnnnnnnnnnnnnnnnnnnnnnnnnnnnnnnnnnnnnnnnnnnnnnnnnnnnnnnnnnnnnnnnnnnnnnnnnnnnnnnnnnnnnnnnnnnnnnnnnnnnnnnnnnnnnnnnnnnnnnnnnnnnnnnnnnnnnnnnnnnnnnnnnnnnnnnnnnnnnnnnnnnnnnnnnnnnnnnnnnnnnnnnnnnnnnnnnnnnnnnnnnnnnnnnnnnnnnnnnnnnnnnnnnnnnnnnnnnnnnnnnnnnnnnnnnnnnnnnnnnnnnnnnnnnnnnnnnnnnnnnnnnnnnnnnnnnnnnnnnnnnnnnnnnnnnnnnnnnnnnnnnnnnnnnnnnnnnnnnnnnnnnnnnnnnnnnnnnnnnnnnnnnnnnnnnnnnnnnnnnnnnnnnnnnnnnnnnnnnnnnnnnnnnnnnnnnnnnnnnnnnnnnnnnnnnnnnnnnnnnnnnnnnnnnnnnnnnnnnnnnnnnnnnnnnnnnnnnnnnnnnnnnnnnnnnnnnnnnnnnnnnnnnnnnnnnnnnnnnnnnnnnnnnnnnnnnnnnnnnnnnnnnnnnnnnnnnnnnnnnnnnnnnnnnnnnnnnnnnnnnnnnnnnnnnnnnnnnnnnnnnnnnnnnnnnnnnnnnnnnnnnnnnnnnnnnnnnnnnnnnnnnnnnnnnnnnnnnnnnnnnnnnnnnnnnnnnnnnnnnnnnnnnnnnnnnnnnnnnnnnnnnnnnnnnnnnnnnnnnnnnnnnnnnnnnnnnnnnnnnnnnnnnnnnnnnnnnnnnnnnnnnnnnnnnnnnnnnnnnnnnnnnnnnnnnnnnnnnnnnnnnnnnnnnnnnnnnnnnnnnnnnnnnnnnnnnnnnnnnnnnnnnnnnnnnnnnnnnnnnnnnnnnnnnnnnnnnnnnnnnnnnnnnnnnnnnnnnnnnnnnnnnnnnnnnnnnnnnnnnnnnnnnnnnnnnnnnnnnnnnnnnnnnnnnnnnnnnnnnnnnnnnnnnnnnnnnnnnnnnnnnnnnnnnnnnnnnnnnnnnnnnnnnnnnnnnnnnnnnnnnnnnnnnnnnnnnnnnnnnnnnnnnnnnnnnnnnnnnnnnnnnnnnnnnnnnnnnnnnnnnnnnnnnnnnnnnnnnnnnnnnnnnnnnnnnnnnnnnnnnnnnnnnnnnnnnnnnnnnnnnnnnnnnnnnnnnnnnnnnnnnnnnnnnnnnnnnnnnnnnnnnnnnnnnnnnnnnnnnnnnnnnnnnnnnnnnnnnnnnnnnnnnnnnnnnnnnnnnnnnnnnnnnnnnnnnnnnnnnnnnnnnnnnnnnnnnnnnnnnnnnnnnnnnnnnnnnnnnnnnnnnnnnnnnnnnnnnnnnnnnnnnnnnnnnnnnnnnnnnnnnnnnnnnnnnnnnnnnnnnnnnnnnnnnnnnnnnnnnnnnnnnnnnnnnnnnnnnnnnnnnnnnnnnnnnnnnnnnnnnnnnnnnnnnnnnnnnnnnnnnnnnnnnnnnnnnnnnnnnnnnnnnnnnnnnnnnnnnnnnnnnnnnnnnnnnnnnnnnnnnnnnnnnnnnnnnnnnnnnnnnnnnnnnnnnnnnnnnnnnnnnnnnnnnnnnnnnnnnnnnnnnnnnnnnnnnnnnnnnnnnnnnnnnnnnnnnnnnnnnnnnnnnnnnnnnnnnnnnnnnnnnnnnnnnnnnnnnnnnnnnnnnnnnnnnnnnnnnnnnnnnnnnnnnnnnnnnnnnnnnnnnnnnnnnnnnnnnnnnnnnnnnnnnnnnnnnnnnnnnnnnnnnnnnnnnnnnnnnnnnnnnnnnnnnnnnnnnnnnnnnnnnnnnnnnnnnnnnnnnnnnnnnnnnnnnnnnnnnnnnnnnnnnnnnnnnnnnnnnnnnnnnnnnnnnnnnnnnnnnnnnnnnnnnnnnnnnnnnnnnnnnnnnnnnnnnnnnnnnnnnnnnnnnnnnnnnnnnnnnnnnnnnnnnnnnnnnnnnnnnnnnnnnnnnnnnnnnnnnnnnnnnnnnnnnnnnnnnnnnnnnnnnnnnnnnnnnnnnnnnnnnnnnnnnnnnnnnnnnnnnnnnnnnnnnnnnnnnnnnnnnnnnnnnnnnnnnnnnnnnnnnnnnnnnnnnnnnnnnnnnnnnnnnnnnnnnnnnnnnnnnnnnnnnnnnnnnnnnnnnnnnnnnnnnnnnnnnnnnnnnnnnnnnnnnnnnnnnnnnnnnnnnnnnnnnnnnnnnnnnnnnnnnnnnnnnnnnnnnnnnnnnnnnnnnnnnnnnnnnnnnnnnnnnnnnnnnnnnnnnnnnnnnnnnnnnnnnnnnnnnnnnnnnnnnnnnnnnnnnnnnnnnnnnnnnnnnnnnnnnnnnnnnnnnnnnnnnnnnnnnnnnnnnnnnnnnnnnnnnnnnnnnnnnnnnnnnnnnnnnnnnnnnnnnnnnnnnnnnnnnnnnnnnnnnnnnnnnnnnnnnnnnnnnnnnnnnnnnnnnnnnnnnnnnnnnnnnnnnnnnnnnnnnnnnnnnnnnnnnnnnnnnnnnnnnnnnnnnnnnnnnnnnnnnnnnnnnnnnnnnnnnnnnnnnnnnnnnnnnnnnnnnnnnnnnnnnnnnnnnnnnnnnnnnnnnnnnnnnnnnnnnnnnnnnnnnnnnnnnnnnnnnnnnnnnnnnnnnnnnnnnnnnnnnnnnnnnnnnnnnnnnnnnnnnnnnnnnnnnnnnnnnnnnnnnnnnnnnnnnnnnnnnnnnnnnnnnnnnnnnnnnnnnnnnnnnnnnnnnnnnnnnnnnnnnnnnnnnnnnnnnnnnnnnnnnnnnnnnnnnnnnnnnnnnnnnnnnnnnnnnnnnnnnnnnnnnnnnnnnnnnnnnnnnnnnnnnnnnnnnnnnnnnnnnnnnnnnnnnnnnnnnnnnnnnnnnnnnnnnnnnnnnnnnnnnnnnnnnnnnnnnnnnnnnnnnnnnnnnnnnnnnnnnnnnnnnnnnnnnnnnnnnnnnnnnnnnnnnnnnnnnnnnnnnnnnnnnnnnnnnnnnnnnnnnnnnnnnnnnnnnnnnnnnnnnnnnnnnnnnnnnnnnnnnnnnnnnnnnnnnnnnnnnnnnnnnnnnnnnnnnnnnnnnnnnnnnnnnnnnnnnnnnnnnnnnnnnnnnnnnnnnnnnnnnnnnnnnnnnnnnnnnnnnnnnnnnnnnnnnnnnnnnnnnnnnnnnnnnnnnnnnnnnnnnnnnnnnnnnnnnnnnnnnnnnnnnnnnnnnnnnnnnnnnnnnnnnnnnnnnnnnnnnnnnnnnnnnnnnnnnnnnnnnnnnnnnnnnnnnnnnnnnnnnnnnnnnnnnnnnnnnnnnnnnnnnnnnnnnnnnnnnnnnnnnnnnnnnnnnnnnnnnnnnnnnnnnnnnnnnnnnnnnnnnnnnnnnnnnnnnnnnnnnnnnnnnnnnnnnnnnnnnnnnnnnnnnnnnnnnnnnnnnnnnnnnnnnnnnnnnnnnnnnnnnnnnnnnnnnnnnnnnnnnnnnnnnnnnnnnnnnnnnnnnnnnnnnnnnnnnnnnnnnnnnnnnnnnnnnnnnnnnnnnnnnnnnnnnnnnnnnnnnnnnnnnnnnnnnnnnnnnnnnnnnnnnnnnnnnnnnnnnnnnnnnnnnnnnnnnnnnnnnnnnnnnnnnnnnnnnnnnnnnnnnnnnnnnnnnnnnnnnnnnnnnnnnnnnnnnnnnnnnnnnnnnnnnnnnnnnnnnnnnnnnnnnnnnnnnnnnnnnnnnnnnnnnnnnnnnnnnnnnnnnnnnnnnnnnnnnnnnnnnnnnnnnnnnnnnnnnnnnnnnnnnnnnnnnnnnnnnnnnnnnnnnnnnnnnnnnnnnnnnnnnnnnnnnnnnnnnnnnnnnnnnnnnnnnnnnnnnnnnnnnnnnnnnnnnnnnnnnnnnnnnnnnnnnnnnnnnnnnnnnnnnnnnnnnnnnnnnnnnnnnnnnnnnnnnnnnnnnnnnnnnnnnnnnnnnnnnnnnnnnnnnnnnnnnnnnnnnnnnnnnnnnnnnnnnnnnnnnnnnnnnnnnnnnnnnnnnnnnnnnnnnnnnnnnnnnnnnnnnnnnnnnnnnnnnnnnnnnnnnnnnnnnnnnnnnnnnnnnnnnnnnnnnnnnnnnnnnnnnnnnnnnnnnnnnnnnnnnnnnnnnnnnnnnnnnnnnnnnnnnnnnnnnnnnnnnnnnnnnnnnnnnnnnnnnnnnnnnnnnnnnnnnnnnnnnnnnnnnnnnnnnnnnnnnnnnnnnnnnnnnnnnnnnnnnnnnnnnnnnnnnnnnnnnnnnnnnnnnnnnnnnnnnnnnnnnnnnnnnnnnnnnnnnnnnnnnnnnnnnnnnnnnnnnnnnnnnnnnnnnnnnnnnnnnnnnnnnnnnnnnnnnnnnnnnnnnnnnnnnnnnnnnnnnnnnnnnnnnnnnnnnnnnnnnnnnnnnnnnnnnnnnnnnnnnnnnnnnnnnnnnnnnnnnnnnnnnnnnnnnnnnnnnnnnnnnnnnnnnnnnnnnnnnnnnnnnnnnnnnnnnnnnnnnnnnnnnnnnnnnnnnnnnnnnnnnnnnnnnnnnnnnnnnnnnnnnnnnnnnnnnnnnnnnnnnnnnnnnnnnnnnnnnnnnnnnnnnnnnnnnnnnnnnnnnnnnnnnnnnnnnnnnnnnnnnnnnnnnnnnnnnnnnnnnnnnnnnnnnnnnnnnnnnnnnnnnnnnnnnnnnnnnnnnnnnnnnnnnnnnnnnnnnnnnnnnnnnnnnnnnnnnnnnnnnnnnnnnnnnnnnnnnnnnnnnnnnnnnnnnnnnnnnnnnnnnnnnnnnnnnnnnnnnnnnnnnnnnnnnnnnnnnnnnnnnnnnnnnnnnnnnnnnnnnnnnnnnnnnnnnnnnnnnnnnnnnnnnnnnnnnnnnnnnnnnnnnnnnnnnnnnnnnnnnnnnnnnnnnnnnnnnnnnnnnnnnnnnnnnnnnnnnnnnnnnnnnnnnnnnnnnnnnnnnnnnnnnnnnnnnnnnnnnnnnnnnnnnnnnnnnnnnnnnnnnnnnnnnnnnnnnnnnnnnnnnnnnnnnnnnnnnnnnnnnnnnnnnnnnnnnnnnnnnnnnnnnnnnnnnnnnnnnnnnnnnnnnnnnnnnnnnnnnnnnnnnnnnnnnnnnnnnnnnnnnnnnnnnnnnnnnnnnnnnnnnnnnnnnnnnnnnnnnnnnnnnnnnnnnnnnnnnnnnnnnnnnnnnnnnnnnnnnnnnnnnnnnnnnnnnnnnnnnnnnnnnnnnnnnnnnnnnnnnnnnnnnnnnnnnnnnnnnnnnnnnnnnnnnnnnnnnnnnnnnnnnnnnnnnnnnnnnnnnnnnnnnnnnnnnnnnnnnnnnnnnnnnnnnnnnnnnnnnnnnnnnnnnnnnnnnnnnnnnnnnnnnnnnnnnnnnnnnnnnnnnnnnnnnnnnnnnnnnnnnnnnnnnnnnnnnnnnnnnnnnnnnnnnnnnnnnnnnnnnnnnnnnnnnnnnnnnnnnnnnnnnnnnnnnnnnnnnnnnnnnnnnnnnnnnnnnnnnnnnnnnnnnnnnnnnnnnnnnnnnnnnnnnnnnnnnnnnnnnnnnnnnnnnnnnnnnnnnnnnnnnnnnnnnnnnnnnnnnnnnnnnnnnnnnnnnnnnnnnnnnnnnnnnnnnnnnnnnnnnnnnnnnnnnnnnnnnnnnnnnnnnnnnnnnnnnnnnnnnnnnnnnnnnnnnnnnnnnnnnnnnnnnnnnnnnnnnnnnnnnnnnnnnnnnnnnnnnnnnnnnnnnnnnnnnnnnnnnnnnnnnnnnnnnnnnnnnnnnnnnnnnnnnnnnnnnnnnnnnnnnnnnnnnnnnnnnnnnnnnnnnnnnnnnnnnnnnnnnnnnnnnnnnnnnnnnnnnnnnnnnnnnnnnnnnnnnnnnnnnnnnnnnnnnnnnnnnnnnnnnnnnnnnnnnnnnnnnnnnnnnnnnnnnnnnnnnnnnnnnnnnnnnnnnnnnnnnnnnnnnnnnnnnnnnnnnnnnnnnnnnnnnnnnnnnnnnnnnnnnnnnnnnnnnnnnnnnnnnnnnnnnnnnnnnnnnnnnnnnnnnnnnnnnnnnnnnnnnnnnnnnnnnnnnnnnnnnnnnnnnnnnnnnnnnnnnnnnnnnnnnnnnnnnnnnnnnnnnnnnnnnnnnnnnnnnnnnnnnnnnnnnnnnnnnnnnnnnnnnnnnnnnnnnnnnnnnnnnnnnnnnnnnnnnnnnnnnnnnnnnnnnnnnnnnnnnnnnnnnnnnnnnnnnnnnnnnnnnnnnnnnnnnnnnnnnnnnnnnnnnnnnnnnnnnnnnnnnnnnnnnnnnnnnnnnnnnnnnnnnnnnnnnnnnnnnnnnnnnnnnnnnnnnnnnnnnnnnnnnnnnnnnnnnnnnnnnnnnnnnnnnnnnnnnnnnnnnnnnnnnnnnnnnnnnnnnnnnnnnnnnnnnnnnnnnnnnnnnnnnnnnnnnnnnnnnnnnnnnnnnnnnnnnnnnnnnnnnnnnnnnnnnnnnnnnnnnnnnnnnnnnnnnnnnnnnnnnnnnnnnnnnnnnnnnnnnnnnnnnnnnnnnnnnnnnnnnnnnnnnnnnnnnnnnnnnnnnnnnnnnnnnnnnnnnnnnnnnnnnnnnnnnnnnnnnnnnnnnnnnnnnnnnnnnnnnnnnnnnnnnnnnnnnnnnnnnnnnnnnnnnnnnnnnnnnnnnnnnnnnnnnnnnnnnnnnnnnnnnnnnnnnnnnnnnnnnnnnnnnnnnnnnnnnnnnnnnnnnnnnnnnnnnnnnnnnnnnnnnnnnnnnnnnnnnnnnnnnnnnnnnnnnnnnnnnnnnnnnnnnnnnnnnnnnnnnnnnnnnnnnnnnnnnnnnnnnnnnnnnnnnnnnnnnnnnnnnnnnnnnnnnnnnnnnnnnnnnnnnnnnnnnnnnnnnnnnnnnnnnnnnnnnnnnnnnnnnnnnnnnnnnnnnnnnnnnnnnnnnnnnnnnnnnnnnnnnnnnnnnnnnnnnnnnnnnnnnnnnnnnnnnnnnnnnnnnnnnnnnnnnnnnnnnnnnnnnnnnnnnnnnnnnnnnnnnnnnnnnnnnnnnnnnnnnnnnnnnnnnnnnnnnnnnnnnnnnnnnnnnnnnnnnnnnnnnnnnnnnnnnnnnnnnnnnnnnnnnnnnnnnnnnnnnnnnnnnnnnnnnnnnnnnnnnnnnnnnnnnnnnnnnnnnnnnnnnnnnnnnnnnnnnnnnnnnnnnnnnnnnnnnnnnnnnnnnnnnnnnnnnnnnnnnnnnnnnnnnnnnnnnnnnnnnnnnnnnnnnnnnnnnnnnnnnnnnnnnnnnnnnnnnnnnnnnnnnnnnnnnnnnnnnnnnnnnnnnnnnnnnnnnnnnnnnnnnnnnnnnnnnnnnnnnnnnnnnnnnnnnnnnnnnnnnnnnnnnnnnnnnnnnnnnnnnnnnnnnnnnnnnnnnnnnnnnnnnnnnnnnnnnnnnnnnnnnnnnnnnnnnnnnnnnnnnnnnnnnnnnnnnnnnnnnnnnnnnnnnnnnnnnnnnnnnnnnnnnnnnnnnnnnnnnnnnnnnnnnnnnnnnnnnnnnnnnnnnnnnnnnnnnnnnnnnnnnnnnnnnnnnnnnnnnnnnnnnnnnnnnnnnnnnnnnnnnnnnnnnnnnnnnnnnnnnnnnnnnnnnnnnnnnnnnnnnnnnnnnnnnnnnnnnnnnnnnnnnnnnnnnnnnnnnnnnnnnnnnnnnnnnnnnnnnnnnnnnnnnnnnnnnnnnnnnnnnnnnnnnnnnnnnnnnnnnnnnnnnnnnnnnnnnnnnnnnnnnnnnnnnnnnnnnnnnnnnnnnnnnnnnnnnnnnnnnnnnnnnnnnnnnnnnnnnnnnnnnnnnnnnnnnnnnnnnnnnnnnnnnnnnnnnnnnnnnnnnnnnnnnnnnnnnnnnnnnnnnnnnnnnnnnnnnnnnnnnnnnnnnnnnnnnnnnnnnnnnnnnnnnnnnnnnnnnnnnnnnnnnnnnnnnnnnnnnnnnnnnnnnnnnnnnnnnnnnnnnnnnnnnnnnnnnnnnnnnnnnnnnnnnnnnnnnnnnnnnnnnnnnnnnnnnnnnnnnnnnnnnnnnnnnnnnnnnnnnnnnnnnnnnnnnnnnnnnnnnnnnnnnnnnnnnnnnnnnnnnnnnnnnnnnnnnnnnnnnnnnnnnnnnnnnnnnnnnnnnnnnnnnnnnnnnnnnnnnnnnnnnnnnnnnnnnnnnnnnnnnnnnnnnnnnnnnnnnnnnnnnnnnnnnnnnnnnnnnnnnnnnnnnnnnnnnnnnnnnnnnnnnnnnnnnnnnnnnnnnnnnnnnnnnnnnnnnnnnnnnnnnnnnnnnnnnnnnnnnnnnnnnnnnnnnnnnnnnnnnnnnnnnnnnnnnnnnnnnnnnnnnnnnnnnnnnnnnnnnnnnnnnnnnnnnnnnnnnnnnnnnnnnnnnnnnnnnnnnnnnnnnnnnnnnnnnnnnnnnnnnnnnnnnnnnnnnnnnnnnnnnnnnnnnnnnnnnnnnnnnnnnnnnnnnnnnnnnnnnnnnnnnnnnnnnnnnnnnnnnnnnnnnnnnnnnnnnnnnnnnnnnnnnnnnnnnnnnnnnnnnnnnnnnnnnnnnnnnnnnnnnnnnnnnnnnnnnnnnnnnnnnnnnnnnnnnnnnnnnnnnnnnnnnnnnnnnnnnnnnnnnnnnnnnnnnnnnnnnnnnnnnnnnnnnnnnnnnnnnnnnnnnnnnnnnnnnnnnnnnnnnnnnnnnnnnnnnnnnnnnnnnnnnnnnnnnnnnnnnnnnnnnnnnnnnnnnnnnnnnnnnnnnnnnnnnnnnnnnnnnnnnnnnnnnnnnnnnnnnnnnnnnnnnnnnnnnnnnnnnnnnnnnnnnnnnnnnnnnnnnnnnnnnnnnnnnnnnnnnnnnnnnnnnnnnnnnnnnnnnnnnnnnnnnnnnnnnnnnnnnnnnnnnnnnnnnnnnnnnnnnnnnnnnnnnnnnnnnnnnnnnnnnnnnnnnnnnnnnnnnnnnnnnnnnnnnnnnnnnnnnnnnnnnnnnnnnnnnnnnnnnnnnnnnnnnnnnnnnnnnnnnnnnnnnnnnnnnnnnnnnnnnnnnnnnnnnnnnnnnnnnnnnnnnnnnnnnnnnnnnnnnnnnnnnnnnnnnnnnnnnnnnnnnnnnnnnnnnnnnnnnnnnnnnnnnnnnnnnnnnnnnnnnnnnnnnnnnnnnnnnnnnnnnnnnnnnnnnnnnnnnnnnnnnnnnnnnnnnnnnnnnnnnnnnnnnnnnnnnnnnnnnnnnnnnnnnnnnnnnnnnnnnnnnnnnnnnnnnnnnnnnnnnnnnnnnnnnnnnnnnnnnnnnnnnnnnnnnnnnnnnnnnnnnnnnnnnnnnnnnnnnnnnnnnnnnnnnnnnnnnnnnnnnnnnnnnnnnnnnnnnnnnnnnnnnnnnnnnnnnnnnnnnnnnnnnnnnnnnnnnnnnnnnnnnnnnnnnnnnnnnnnnnnnnnnnnnnnnnnnnnnnnnnnnnnnnnnnnnnnnnnnnnnnnnnnnnnnnnnnnnnnnnnnnnnnnnnnnnnnnnnnnnnnnnnnnnnnnnnnnnnnnnnnnnnnnnnnnnnnnnnnnnnnnnnnnnnnnnnnnnnnnnnnnnnnnnnnnnnnnnnnnnnnnnnnnnnnnnnnnnnnnnnnnnnnnnnnnnnnnnnnnnnnnnnnnnnnnnnnnnnnnnnnnnnnnnnnnnnnnnnnnnnnnnnnnnnnnnnnnnnnnnnnnnnnnnnnnnnnnnnnnnnnnnnnnnnnnnnnnnnnnnnnnnnnnnnnnnnnnnnnnnnnnnnnnnnnnnnnnnnnnnnnnnnnnnnnnnnnnnnnnnnnnnnnnnnnnnnnnnnnnnnnnnnnnnnnnnnnnnnnnnnnnnnnnnnnnnnnnnnnnnnnnnnnnnnnnnnnnnnnnnnnnnnnnnnnnnnnnnnnnnnnnnnnnnnnnnnnnnnnnnnnnnnnnnnnnnnnnnnnnnnnnnnnnnnnnnnnnnnnnnnnnnnnnnnnnnnnnnnnnnnnnnnnnnnnnnnnnnnnnnnnnnnnnnnnnnnnnnnnnnnnnnnnnnnnnnnnnnnnnnnnnnnnnnnnnnnnnnnnnnnnnnnnnnnnnnnnnnnnnnnnnnnnnnnnnnnnnnnnnnnnnnnnnnnnnnnnnnnnnnnnnnnnnnnnnnnnnnnnnnnnnnnnnnnnnnnnnnnnnnnnnnnnnnnnnnnnnnnnnnnnnnnnnnnnnnnnnnnnnnnnnnnnnnnnnnnnnnnnnnnnnnnnnnnnnnnnnnnnnnnnnnnnnnnnnnnnnnnnnnnnnnnnnnnnnnnnnnnnnnnnnnnnnnnnnnnnnnnnnnnnnnnnnnnnnnnnnnnnnnnnnnnnnnnnnnnnnnnnnnnnnnnnnnnnnnnnnnnnnnnnnnnnnnnnnnnnnnnnnnnnnnnnnnnnnnnnnnnnnnnnnnnnnnnnnnnnnnnnnnnnnnnnnnnnnnnnnnnnnnnnnnnnnnnnnnnnnnnnnnnnnnnnnnnnnnnnnnnnnnnnnnnnnnnnnnnnnnnnnnnnnnnnnnnnnnnnnnnnnnnnnnnnnnnnnnnnnnnnnnnnnnnnnnnnnnnnnnnnnnnnnnnnnnnnnnnnnnnnnnnnnnnnnnnnnnnnnnnnnnnnnnnggctggtcgagccggaggtgtactggagcagggcaagcgtgtcgggggcgatggccggttcttgccagcgcttggccaaggcgtcgggaatctcgtcggtggcgagccacgagagctgggaggaagtggccgcttgaccgcttttttccgcttccattctggcctggaactgagccgcgcccaaggtgttgctcagagcgatgcgggccccggcatcggcggcgacggcctggaagcgttcgagtatgcggtggcgatgaggcgggtaggtcggcaccgctacgcaaccggcgtacaggcaaccgaagaaggccgtaatgaagtcgaggccgggcggatagaccagcagcacgcactggccggcaacgcccatgtcctgcaaacgagccgcgatggctcgggctcgccgatcgagctgggcgtaggtcagactggcgtgatcaccctggccttcgagcagatggacgaaggccggttgtcgcgggcgttcatcggcgtggcggcgcagcgcgtggatcaggtggcctggaagctgatgcagactaacgtggttttgagcgtgaacggacataataccgggtttcctggataacttcggcccacgaccggcgcgggtccaatcgtttataactccggccgagttcgttttcaaggattttgtccgcgcccggtcatggccgtgacgggaaaatccgggttgagagtagtcagagtcgccgtaaaatggggataattctggaggcacactgatgctcaaacgaccgcgtggtcatagtcccacttgaaccagccctcaagcgcaaaatatggccccgattatagcgaacaatccgtcaatgccagaactattctaattgcccatatacttcatgattctgccccggtaataagcgagcgcaaggaaaaacgacctcgccgtagtgcccgattccacgtattatggactccctgtgaccgaacccaaaaaggtcaaactcggtttcttcctcatcggcagcttcgttgttgccgccgcagccctgttatcattcggctggctggcggaagaggtgctccaatcagagacgcaggcattcgatgatgccgtgcgggcagcaatccaccgactcgcgtcgccgggaatgaccagcgcgatgcaagttttttcatttctcggttcgggaacactcctggcggcgctgagtctcctcacgattgtaatatttttatacatccatcgccctcgatcggctcatttgatgggcattaccatggcaggtgcggtcgctcttgatctgttgttgaagcacgcattccaccgtgggcgtcccgtcccctttttcgggacggccccaagctcgtatagttttccgagcggccatgctttcggatcgctttgtttctatggggcgttggcaggaattctttccgcgcacgcttcaacaccgagggcacgattctttatctggacatgcgctacactgcttgtcgggcttatcggattttcacgcatctatctgggagtacattacccgagcgatgtcttaggcggctattgcgctgcccttgtttgggtgggagcgattagtattctgaaccgtgttcttaacaaccgtgccaggtgaggtatcgaagccccggcgaacggcgctactcactcctgcgtttggacggatctggcaggtcgcccgttcccgtaatttcgaattaacctgtaccgcctttgtatgcccaggtgatttgctcgttagttcaatagtgctctgacatgtggtcgaaattgctcagacagaggggaagcctcggtttaaagtcatattggtcgtgagccctacacactttttaagagcgggaattccgatttgccgatcaagttgtattcgaatgcgttttctgcaccagacccggaccccgtgcaacaactatgatggtccgatgagcgcagatccgcgccatgagacgctcctccgggcttggacctggcgcctcgttcggtttgtattgtcggcaatgctgctttgccaggcgcactcctatgcgcaattaggaccgcagccgccatgcggtaaggaagccgttccgccctatcctggtctggatgattcggccatcgtgaagtcatggagcaagtctgatttcggccgcgactggagaccgcccgcatgcaccggttgggctgcggtgggctttacaacgttggtgaccacagtcgcgcggtttcgtcatacctcggaaactgagggcttgcttcgccacatcggggcaatttcagaactcgcgggcatgcgctactggtcgaccactcacaagcagtggcaaacactaattgtggacgcctacgctatgaccagcttgcagcctagtcaacgccgcgaagactttacgcccgatgagatgaaggaaggcacggtactctactttgaacaggtcgataacctttctggcaaagccatctaccgaatgcatattgctgaggcttcggcggaccgtctcgtcttcgatgtcgagaacgtcagcacgatgcgctatctctttataaccatcttccaaccgggtgagatgcaatcgatctactttctggatcgcgaatcggaaaacgtctggcgatgctacggcatggtgcgcacaggaaagaacgcgaaccgcctggtcctgggaaatgagtcttccacggtcaatcgggccttcgcgttctatcgcaacttggttggaattcccaccgaccaggagccgccggcggcgcgatgaaggcaggagtttgtagctcccccagctttcgcgcgtctcggtgcttcgccggactgacgagacaatggaaaaatcaaccactgcgggttgttcggtttctcaggctgttgcttcttttctgggtcactgctgtcgctatggggagaggcagctttcttgactcctttgccgactttcttgcccccttgcctacaccctcacccaaatccttgcctgccgcgatgggttcaccttgcttcatctcgtggccgattccctcgccgccccttcccacatctttgccggcggctttgaagtcgcctcgggccgactccggccccgctcccagtttgcctgccgtttgggcatcaacgtgtcccgtggccggcaggttctccgacttctgataggtcagatggggagaagggcaaatttccttggagtttacgcatggctgctgcgttggcggtggttgccgtcgtaaaaccaagctacatgagggtcccgcgggaagaaaccttctaaaccctccccctcggttccccctcaggtggcaaacgcactgaggtggatgacgcgcccacgcgctgccaaagcagcacccgtcaggccgatattggaaaggcggatatcctccccctctccgacggccgggtactgtttcgcttcgcctcctgatattctttggaggaaagcgtccacgtcatcacgtcccgcatcaggggttggattcctccccttctctccagccgagcccgcccgatccagcgcatcgagtccgtaactgcgcatgagtttcggccagagctttctcagcgtgtcagggctgtcaaagagctcgaaaccgctcacctcgccctcgatcgtgaagactgccccaacctgcccctcctctggcggcaaggaacgaacgtattcctccagccccgccgagtgttgctcgaatatatccgccatggccgacgtgcgggaagtggcattcagccggtggaatttctcgtcgatgtcctgccagaccgctctctggttcgagtatctggtccccgtggactgcagcgatgcagaaacctgcgccatcttcctagcccgaccttcggcatattgagcacgcggtgccgcagagaaatccacggaacggcgtgcccagcggccgcgctccacacaggaaaccggaattgtgacggctttcttagccgaaatgagaatactcaaattcagcgtgcggttttgcttggcgccgatcagttcttcgccctccatcaaaaaaaccgggtggtcgctgtcgttgatgaatttcaggtccggaacactgccgccttcggacacctcggcaaccttggcagacttgttggtcagagcttcgtccaaggttatgtagtcgggcgcgatgcccttgccgaatacaggaaagatcgtgagatttcgaaatgtcttgggtttgccaagcctggtactggaaatagtatcggtaatcagttgcataatgcctcctctgggtggtggcattcggttgacccgtagtgggctgagccagccatccaagaatttgtcagccctggtttctaataatgccctttcatgctgcttgcagaacttccagcagccgcaccattgccagcgtgtcctgcctgcagtaagccaggagggcctctttaagccgccttctctcttcggttcccgcctcagcatgaaccatcttttcccaggcaaggccggcgtcgttgccttcggccacttccatcccgtcgtaggacatgtcgggcacaagggcaggcaagacgctcttcaatgaaagcggctggtggacgactttacctcgattagccgccatttgttccggtgcagtctttccaggatgtcaactctggccagaatgttgtcgtgtgtgaaagtcgcctcgaagatggcgggatgttgcctgtccgctaccgcctgctcggtttgccggagggccttgtccatctcctcgcgccccgcctcgatgagcgctccgccgggaaacatcctctgggcccatcggcccacctcgtgaccctgctcgaagaccgccatggattgttcgtcaggctccgctgccagttccggctgatgaacctccaggtacaggcgcttgaggcactgccagccggcgatgaatcttgattttgagagccccatggatcctccggtttagcaagaccacgactgcctaccagaccgcaactgtacgcgggggccgcctgccaagagcatacacccaaactgtgtcagggatggtcaccgcgatggctggtgatggatacctgggcatctctaaaagcgagttatcagcagggggccgcaatactcaaccaaagatcaaaacggggccacacacttccgtttccgttactcgctcagggcacacgccggagctttcagcgggcctgcgtcattcgagtggagccgcggcttccgttcgccgctcctggcagtcctggggaatttgccgcaaccggattccgtgaaacgcgttgctgttgacccatcgcatgttgtcgcaacctgtctgaagccgacggatgacccgtcctttggaggcaccattttgcgggtttgggaagtcggcgggaagtctgggccagtggctcttagcgttcgaggttttcggagagcaattcaaaccgacctactggaacgaaacctcagggacctccgcatggaggatggggagttcaaactcgatgtgcctggctatgggtttgccgccgtccggctgctggattaacatctgaggccaggccagcgtggacctggcacgaatgcgccttcgctaagagcgggatctgagcaatcggtaggacctcgcttggccattcgctgtgcctcgcttcactccaaacaacgccactcccaagcagcccgaatcgccccttagccaaagagtccacgggatgagtccccagccgcgagctatattccgaaatgggtcctcgcacagttgtgaacagggtactcggtactttggtgcttttgacgctttgagatggggcagcgaaactagcagtgtgaacaatcccccccagaggatgggggatcgaacaatagagtgcccaccgtgctgaccgcctaaggggtggtgctcgggggcagctcagcaggatggcagaggatcggccgtatccggttgtgccgcatatgcgaaggcagtcacgactctaacttggcgggaagaaacaatgattcggatcggggtcatcggctacggctactggggtccaaatatagtcagaaacctgcactccctcgattcgacccgggttgctgccgtttgcgacagtgacccaaaaggtcaaagccgggcaaaacaagcatatccggatgtgcaggttacctccgacgcatctgaaatcttgcattcaccatccgttgatgcagtggccatcgtcactcccgtctggacgcatttcgagctggcaatggctgccctggaaaacggcaagcacgttttccttgaaaagccccttacttcgaatgcgatccaggctgagaggctgatcgaattggcagagaagagaaacctcaagattatggtggaccacacgtttctgtttaccggagcggtgaagaagatccgccaactgatcgatcaaggtgaactgggcaacatctactatttcgactccacgagggtccaactgggccttttccaacacgaccttgacgtgatttgggatctcgcgcctcatgatttgtccataatggaccacctcatccgaaaggaacccgaggctgtcgtcgcgaccggccaggctcacttgaacgtccatgccgacgtggcatttatcactgtgtatttcccgtccaacactattgctcacatcaacgttaactggttatctcccgtgaagatccgaaccacgctggtcgggggagagaaaaagatgctggtgtggaacgacttggaagccgtcgagaaaattaaggtctacgacaggggcgtgcaaatggccagcagggaaggagtctatgaattgcttgtcagctaccgctcgggagacatgtgggcgcccaagatcgagcagacagaagcactgaaggtcgaactggagtacttcttggagtgtatcgaaaccaaccaaacgccccttaacgacggtttggctggattgcgtgttgtcaaattgctggaagcggcaacagaatcactaaagctgagaggggcgtccgtttcggtatgaacatctaccacctcctcagcagtcacgattgtcttgccacaagcggggcactttagctcttcctcttcgcccacttcgatgatcgcgggaccgctcgtttgaatcgttgaggtaatacgagatcagaagaccggtgtccgcgtagaggatcatgcgggcttagtagctctcctcgtcccgcgccagcagaactaaattgggcagaattttgtcgccacaaattcgacgccgccgagcggcagcgtcgggccagcgaatcgggcgtccccgtctagccgccggccccacttccggcgccgtttccagttcgtgaacgccttcaaagaatttccggcgctcccgaggcggcaaggccttcacgtactccaatacttcattcgcgcccatcatcgaaaaatatcacgcacggggcgcgcagcgcaagttcggcgggctgccgcagggcgagcacagctctacgattcaccgtctcgccaaaacgcagagttgcactctgcgccagccagccttttttcttcgcggcacaaaggggcgctacagttctgctcccggacttgcctttcatccctcccaggtgtataccttcgtcatgtttatcctgtggtagccacctggcgggcggccgggtcgcgatcacccaacggccccaccacccgcctcttgccccgtgaaggaggaagcagtgaagtataacctgctcgaagaaaagtggattcccgttctatacaaggacgggatcagcacacgtgtgaatgtcattgaggcgtttacggaagccggccgcatccgcgaaatcgcggccagcaaccctatggaccgcttggccatcctgcgtttcctgctcgcgcttctctattggtgcaaggggaatcctccagacgaaaccgactcgatctcttcgtttccctcggattggttcaagaggctcgatgacaataaggactgtttcaacctgctgggcgatgggaggcgtttttaccaacagaagcctaagcgtcttgagaagaaactctcggccgactatctcatgcaggaggtgcccaccggcacaaacttctggcacttccggcatgggacagatttgagagacggcttatgtccggcgtgctgtgcaatgggcctgttgcgcctgccgctctttgctacctcggccgggcgcggcaagcccccgggcgtcaatcaaaaaccgccgacctacatcgtgccgatgggcgactcgctttccgaaaccctgcgtctctcgtggcggaaaagaccggagccgaacctgggcacgcccacatgggaaaagccggacataaccctccctcaacacggcaatgttcccctattaacgggattaacgtgggtgccgcgccgcgtgtggttggacgctcccgaggaaccccagtccaactgcatcgcctgcgggcgcagagaggctctgatccgtcgatgtgtctttgcgggtatcggcagcacaagaacagacgaagggagtccggcacgagtgtggaacgacccgcacaccatcagggaaggcgacgagattgtgaagcctttcagcgcgcttggcccggccgatgctgcggctgggaagtggacgaaagtcgtggctggaatcctgtgcggggaaaagccgaaggaaaaacaaaggttgtgggtcgtcagctttgcgacagtgcagaatgacaaatacctggaagcaaccgagtgggagattccgttcctgaccgcgcttgacgacatgaaggttcaggagagtatagaaagcatcggggcgtggcagagggaaggctggaagctccctggcaaaaccaaaccgcgagagatttcccaaacaaggggacaccttgaaattctctccgccgtcgccgcggttcgtccccaagccgaaagaacggtttccggaagaattgaccaattgatcgcccaaggcggcgacgcatggcaagaagccgcccaggagtatcgtccgctgatggccgcagtcgccaaatcgctttcacccggttacacaagcgcgtctctccgaagtcggcaagaaattgccgcagtaaagccggacatgcggccgaagaaaaaccacaaaaacgaagggagggacaagtgactgcaacggagcagtacgtcgaagttctgagtcggctgaaacccggtgagctcgggctcttgcgcaaccatgccggacaagggctcgacgaatcggtggagggctttgaccttttcgcaggactctggtggccactgcgggcgcaaacccagcgggcgcctcgccgtgaggtggcgtggcttgtcgccaaactctacgccttccggcccctcgagcattcacccggggagacgctcgctcgccaactcgcgcgctcccggcccggcgacaaaacagagcgaaagcgtttcgagcaacgcttcgataggatgctgacgctgccgcttgctgaaatcgaacccgccctacaatgggcaatcgacctcatcgctgccaagcaccccaaactcgactgggtacggctgacgaacgatctttccatctgggaacgcgaatccacccggctcaaatgggccacggaattcttgagctgttcaataggaggagaatcatgttgatccagattcacgccattcaaaatcacagcccggccaacctgaaccgggatgacctgggcgcgcccaagacttgcttttttggcggagtcttgcgctcccgtatttccagccagtgtctcaagcgcagcatccgcatgagtgaggagttcagccaattgcgcggcggagtgcgcacccgccagttagcgaaagagattgccgaaaaggtgacgggcaaagacgtcaggaagcgcgccgagaacattctcaaggcctgcggcctggagcctaaaaaggcaaaaaagcaggaaggagagggtgaacaagaaagtgccgagaggagcaagatgttggtttacaccacgcaaggggcgattgtacggatggccgaactcctccagaaggaagacggaaaaacggacgaggccttagcagcggagttcgggaagctgatcagtgaatccgtcgccgtgccggacatggccctgtgcggcaggatgcttgaaacgggagtactcgaaaacaccactgtcgaggcatcgcttcaggtggcccatgcgatttccacccatgaggcccgcccggaggtggactactatgtggccgctgatgatgtccccggcgaggacgcgggcgcagcttacgtggatgaagccatgtttggctcagcatgtttttacaagtatttctccattcattgggaaacgctggtcaggaacctcgagcccttcggcgcggatcacgaaaagttggcggcccataccgtcggcgagttcattcgcgcagcggcgttggtcaaccccacgggaaaacaaaacagttttgccgcgcacaatcctcctgacggaatgttggtggaagtcagaaacactccaatcagctacgccaacgccttcgccaaaccggcggctcctcagggcgaacgggacatcatctcgcagagcgtggcggagcttgcccattatgtgaacgacatggatacgggatacggcaagcccacgaagcggttctggttctctcccaatctccgctatccgttgacggctaccaccacggaaagcgaaaacggaaaacagaaacagcgtgaggtcccgcttgccgacaaagatgtcaagtctcttgacgaactgatagcggccgtactcaaccaaatcggccacgactggcaggaggtcgagaaagtggtcctgaatccggaggtgccccgtgagcccaaacacgctgttcattcggcttgaagggcctcttcaggcttggggcgatcagcaatcgaagtttgtcatccggcggacggctgaggccccgaccaaatcgggcgtaatcggcatgctgtgcgcggccttgggcgcctcccggtcagaggccgctgaggagtggcttccaaggctaagccggctgctcatgggcgtacgcatcgacgcgcccggagtccgctggtgggattatcacaccgtgggcgccggcatgccgatgcgcactgccgagggtggaagcaagcccggggccatgctcacccgccgcgagtacctttgcgatgcgtcgttcttggttgcactccagggtgaaccgggcctgatcgctgaaattgacgccgcggtcaagtcgccccgatggactctgtacctcggcagaaagtgctgcccgccctcgcgccctttgctggagcatccgccaggggaattttccgatttgctctccgccctcgaatcggtaccttggcgcaaacggctggagggagacccacagccccaaacgctggaatgtctgctcgactggcacccaaccgcagaccagccggacgctcccgatgattcgctcgtttggtacgacgtgcctcggagtctcgacccgccctcgcacgaagctcgattcgtcattcgcaagcaattacgcgtcggggctgaaggcggcgtgaccgttgcacctctgcccgcacagagcgccacgccggcgcctccccgcccaagggcggattacaccaataccgagtacaaaaaccggcgcaaagagcggctcgacgatgaccatcacttatgcgttttttgcaagtctcccgccaccaccgtgcagcacatcacctaccgtcgcgcgggtggcggcgagttgaaggacgatttgcgctccctctgccgcctctgccacgacgccgtgaccatgcttgaatacggcctgggcatgggactcgaccgcatcaatcccgaggacccgcaatggcgtgaccggattatcgacaagcgggacgagatcgtcaggttccgctcggaggaaacccgcaggcgattgctcgccgaggaggtggaataggatgtacatttcctgtctcctaatcaacgtcggtgacaaccccgaccgtccccgccccgggcggctctggctgcgcaacctttatcacgttcatcagcgcctctgcatggcctttccctcccatccccaaaaagatccccacttcctcgcgcccttcaagcccgcggactttgacgggaagcaagtccatgtggagcgcggtgcggattccggctttctctttcgcatcgacccgcaactgggcggccgggccatgattgtggtgcagtccgccaccaaacccgattgggactatgcctttcaaaatgcgggccatcttctggtgaattccttcgccgctccccctcaggtaaaagaactcgatccctgtttcagcgccggtcagcagcttcgctttcgaatccgcgtcaacctgagcaaaaagataaagaccagcacagcgggcatcgatcttaccaggccgcgagtggggacggatccccagggccgaccgaaggcccaaagcaaacgcgtggcgctcacctgggataaggaccaggacccgcaggacgccatacgggagtggttcgctaaaaaggcccagaacggcggcttcaagctgggagccttgcgcgctctgcacatcggctggggcgctggaaatgacccggactccacgcctgccgtccaggacagccgctcgggggacaggcgcatgaaattccgctccgccttgctcgaaggaacgctcacggttgaggaccctgctaaatttcgtgaagccgtcgttcacggcatcgggcccggcaaggccttcggtttcggcctgctttcagtagcccccgaagcccgctcagcgggcggcgacgtgtagcccacggcgcaagccagacccgtggtggtgacatgcgaactcaagatctgcatattctaccgaagttcagcgacggatggagttacctgtacgtcgagcgctgcaaggtggatcaggaagaccgggccattgccctgcacaatgaagcggggaagacgcccgtgccttgcgcaaatctggccttgctcatgctgggaccgggcgtctccatcactcacgccgccatttccgtgctggcggaccatgggtgcctagtggcgtggtgcggagaagagggggtccgcttctacgccacgggcatgggcgagacgcgcaacgccgccaattttctccatcaggcgcgcctgtgggcgcacgagggttttcgcatgcaggtggtgcgccgcctctatcagttgcgttttgccgagaagttcgaccccgccttgaccctgcaacagatacgtggcatggagggcgtacgggttcgagacgcctacgcgaaggccgccaaggaggccggcatcgcctgggaaggccgaaactatcagcgccaggagtggagccaggcggaccccgctaaccgggccttgtccgccgccaattcctgcctttacggtatctgccatgcggccgtcgtctcggctgggttttcccccgccctcgggtttatccatacgggcaagatgctctcctttgtgtacgatgtggccgacttgtacaaaactgaaatcaccgttccgatggcctttcgcgccgccgccgaagcgcaagatcaactcgagcggcgggtgcgcatcacctgccgcgacaggtttgtatccacacggcttttggaaaggatcatcccggatatccaatctgccctgatgctgtcaaaagcggcggcgcccgactctgaatttgaccttgatgccgccgcccccggctccctctgggacgatttgcagggcgccgtggaaggcggccacttgcacgccgtagaagaggaagaaacggagcccaaccatggtggttctgattcttgagcgcgtcccgccagcattgcgaggcgagctcactcggtggtttctcgaacctcaggcaggggtgtttgtgggacgcgtctccgctctggttcgcgatcggttatgggaaaaggcttgcgcccaagccaaaggaggcggatgcctgattctccactcaagcgataatgagcagggattccgtgtccgaacatggggcagaacagcgcgctgcatcgatgacttcgagggcctttttctcgtgcgtatgccgcagaatcaatagcttgggaagtgttgtccccacgcgcgtgggggtgaaccggatgagtttccagggccgctcattgcagacgagttgtccccacgcgcgtgggggtgaaccgtgggatgcgtcctggctcgaggtgggtggcccgttgtccccacgcgcgtgggggtgaaccggctcaaggcgcttgccgccgagggcaagaccggttgtccccacgcgcgtgggggtgaaccggtgggatacacatcggccgggctgatcgcgatgttgtccccacgcgcgtgggggtgaaccgccctgctgaaacgacacgatctggcctaccaggttgtccccacgcgcgtgggggtgaaccggaggacccctacattcaggagcagatcaagatgttgtccccacgcgcgtgggggtgaaccgctgatcatcacccagcaccggaagaa

SEQ ID NO: 1007 - DNA, 103417 bp, Artificial Sequence
  Synthetic Oligonucleotide
  misc_feature (1)..(89381): n is a, c, g, or t
nnnnnnnnnnnnnnnnnnnnnnnnnnnnnnnnnnnnnnnnnnnnnnnnnnnnnnnnnnnnnnnnnnnnnnnnnnnnnnnnnnnnnnnnnnnnnnnnnnnnnnnnnnnnnnnnnnnnnnnnnnnnnnnnnnnnnnnnnnnnnnnnnnnnnnnnnnnnnnnnnnnnnnnnnnnnnnnnnnnnnnnnnnnnnnnnnnnnnnnnnnnnnnnnnnnnnnnnnnnnnnnnnnnnnnnnnnnnnnnnnnnnnnnnnnnnnnnnnnnnnnnnnnnnnnnnnnnnnnnnnnnnnnnnnnnnnnnnnnnnnnnnnnnnnnnnnnnnnnnnnnnnnnnnnnnnnnnnnnnnnnnnnnnnnnnnnnnnnnnnnnnnnnnnnnnnnnnnnnnnnnnnnnnnnnnnnnnnnnnnnnnnnnnnnnnnnnnnnnnnnnnnnnnnnnnnnnnnnnnnnnnnnnnnnnnnnnnnnnnnnnnnnnnnnnnnnnnnnnnnnnnnnnnnnnnnnnnnnnnnnnnnnnnnnnnnnnnnnnnnnnnnnnnnnnnnnnnnnnnnnnnnnnnnnnnnnnnnnnnnnnnnnnnnnnnnnnnnnnnnnnnnnnnnnnnnnnnnnnnnnnnnnnnnnnnnnnnnnnnnnnnnnnnnnnnnnnnnnnnnnnnnnnnnnnnnnnnnnnnnnnnnnnnnnnnnnnnnnnnnnnnnnnnnnnnnnnnnnnnnnnnnnnnnnnnnnnnnnnnnnnnnnnnnnnnnnnnnnnnnnnnnnnnnnnnnnnnnnnnnnnnnnnnnnnnnnnnnnnnnnnnnnnnnnnnnnnnnnnnnnnnnnnnnnnnnnnnnnnnnnnnnnnnnnnnnnnnnnnnnnnnnnnnnnnnnnnnnnnnnnnnnnnnnnnnnnnnnnnnnnnnnnnnnnnnnnnnnnnnnnnnnnnnnnnnnnnnnnnnnnnnnnnnnnnnnnnnnnnnnnnnnnnnnnnnnnnnnnnnnnnnnnnnnnnnnnnnnnnnnnnnnnnnnnnnnnnnnnnnnnnnnnnnnnnnnnnnnnnnnnnnnnnnnnnnnnnnnnnnnnnnnnnnnnnnnnnnnnnnnnnnnnnnnnnnnnnnnnnnnnnnnnnnnnnnnnnnnnnnnnnnnnnnnnnnnnnnnnnnnnnnnnnnnnnnnnnnnnnnnnnnnnnnnnnnnnnnnnnnnnnnnnnnnnnnnnnnnnnnnnnnnnnnnnnnnnnnnnnnnnnnnnnnnnnnnnnnnnnnnnnnnnnnnnnnnnnnnnnnnnnnnnnnnnnnnnnnnnnnnnnnnnnnnnnnnnnnnnnnnnnnnnnnnnnnnnnnnnnnnnnnnnnnnnnnnnnnnnnnnnnnnnnnnnnnnnnnnnnnnnnnnnnnnnnnnnnnnnnnnnnnnnnnnnnnnnnnnnnnnnnnnnnnnnnnnnnnnnnnnnnnnnnnnnnnnnnnnnnnnnnnnnnnnnnnnnnnnnnnnnnnnnnnnnnnnnnnnnnnnnnnnnnnnnnnnnnnnnnnnnnnnnnnnnnnnnnnnnnnnnnnnnnnnnnnnnnnnnnnnnnnnnnnnnnnnnnnnnnnnnnnnnnnnnnnnnnnnnnnnnnnnnnnnnnnnnnnnnnnnnnnnnnnnnnnnnnnnnnnnnnnnnnnnnnnnnnnnnnnnnnnnnnnnnnnnnnnnnnnnnnnnnnnnnnnnnnnnnnnnnnnnnnnnnnnnnnnnnnnnnnnnnnnnnnnnnnnnnnnnnnnnnnnnnnnnnnnnnnnnnnnnnnnnnnnnnnnnnnnnnnnnnnnnnnnnnnnnnnnnnnnnnnnnnnnnnnnnnnnnnnnnnnnnnnnnnnnnnnnnnnnnnnnnnnnnnnnnnnnnnnnnnnnnnnnnnnnnnnnnnnnnnnnnnnnnnnnnnnnnnnnnnnnnnnnnnnnnnnnnnnnnnnnnnnnnnnnnnnnnnnnnnnnnnnnnnnnnnnnnnnnnnnnnnnnnnnnnnnnnnnnnnnnnnnnnnnnnnnnnnnnnnnnnnnnnnnnnnnnnnnnnnnnnnnnnnnnnnnnnnnnnnnnnnnnnnnnnnnnnnnnnnnnnnnnnnnnnnnnnnnnnnnnnnnnnnnnnnnnnnnnnnnnnnnnnnnnnnnnnnnnnnnnnnnnnnnnnnnnnnnnnnnnnnnnnnnnnnnnnnnnnnnnnnnnnnnnnnnnnnnnnnnnnnnnnnnnnnnnnnnnnnnnnnnnnnnnnnnnnnnnnnnnnnnnnnnnnnnnnnnnnnnnnnnnnnnnnnnnnnnnnnnnnnnnnnnnnnnnnnnnnnnnnnnnnnnnnnnnnnnnnnnnnnnnnnnnnnnnnnnnnnnnnnnnnnnnnnnnnnnnnnnnnnnnnnnnnnnnnnnnnnnnnnnnnnnnnnnnnnnnnnnnnnnnnnnnnnnnnnnnnnnnnnnnnnnnnnnnnnnnnnnnnnnnnnnnnnnnnnnnnnnnnnnnnnnnnnnnnnnnnnnnnnnnnnnnnnnnnnnnnnnnnnnnnnnnnnnnnnnnnnnnnnnnnnnnnnnnnnnnnnnnnnnnnnnnnnnnnnnnnnnnnnnnnnnnnnnnnnnnnnnnnnnnnnnnnnnnnnnnnnnnnnnnnnnnnnnnnnnnnnnnnnnnnnnnnnnnnnnnnnnnnnnnnnnnnnnnnnnnnnnnnnnnnnnnnnnnnnnnnnnnnnnnnnnnnnnnnnnnnnnnnnnnnnnnnnnnnnnnnnnnnnnnnnnnnnnnnnnnnnnnnnnnnnnnnnnnnnnnnnnnnnnnnnnnnnnnnnnnnnnnnnnnnnnnnnnnnnnnnnnnnnnnnnnnnnnnnnnnnnnnnnnnnnnnnnnnnnnnnnnnnnnnnnnnnnnnnnnnnnnnnnnnnnnnnnnnnnnnnnnnnnnnnnnnnnnnnnnnnnnnnnnnnnnnnnnnnnnnnnnnnnnnnnnnnnnnnnnnnnnnnnnnnnnnnnnnnnnnnnnnnnnnnnnnnnnnnnnnnnnnnnnnnnnnnnnnnnnnnnnnnnnnnnnnnnnnnnnnnnnnnnnnnnnnnnnnnnnnnnnnnnnnnnnnnnnnnnnnnnnnnnnnnnnnnnnnnnnnnnnnnnnnnnnnnnnnnnnnnnnnnnnnnnnnnnnnnnnnnnnnnnnnnnnnnnnnnnnnnnnnnnnnnnnnnnnnnnnnnnnnnnnnnnnnnnnnnnnnnnnnnnnnnnnnnnnnnnnnnnnnnnnnnnnnnnnnnnnnnnnnnnnnnnnnnnnnnnnnnnnnnnnnnnnnnnnnnnnnnnnnnnnnnnnnnnnnnnnnnnnnnnnnnnnnnnnnnnnnnnnnnnnnnnnnnnnnnnnnnnnnnnnnnnnnnnnnnnnnnnnnnnnnnnnnnnnnnnnnnnnnnnnnnnnnnnnnnnnnnnnnnnnnnnnnnnnnnnnnnnnnnnnnnnnnnnnnnnnnnnnnnnnnnnnnnnnnnnnnnnnnnnnnnnnnnnnnnnnnnnnnnnnnnnnnnnnnnnnnnnnnnnnnnnnnnnnnnnnnnnnnnnnnnnnnnnnnnnnnnnnnnnnnnnnnnnnnnnnnnnnnnnnnnnnnnnnnnnnnnnnnnnnnnnnnnnnnnnnnnnnnnnnnnnnnnnnnnnnnnnnnnnnnnnnnnnnnnnnnnnnnnnnnnnnnnnnnnnnnnnnnnnnnnnnnnnnnnnnnnnnnnnnnnnnnnnnnnnnnnnnnnnnnnnnnnnnnnnnnnnnnnnnnnnnnnnnnnnnnnnnnnnnnnnnnnnnnnnnnnnnnnnnnnnnnnnnnnnnnnnnnnnnnnnnnnnnnnnnnnnnnnnnnnnnnnnnnnnnnnnnnnnnnnnnnnnnnnnnnnnnnnnnnnnnnnnnnnnnnnnnnnnnnnnnnnnnnnnnnnnnnnnnnnnnnnnnnnnnnnnnnnnnnnnnnnnnnnnnnnnnnnnnnnnnnnnnnnnnnnnnnnnnnnnnnnnnnnnnnnnnnnnnnnnnnnnnnnnnnnnnnnnnnnnnnnnnnnnnnnnnnnnnnnnnnnnnnnnnnnnnnnnnnnnnnnnnnnnnnnnnnnnnnnnnnnnnnnnnnnnnnnnnnnnnnnnnnnnnnnnnnnnnnnnnnnnnnnnnnnnnnnnnnnnnnnnnnnnnnnnnnnnnnnnnnnnnnnnnnnnnnnnnnnnnnnnnnnnnnnnnnnnnnnnnnnnnnnnnnnnnnnnnnnnnnnnnnnnnnnnnnnnnnnnnnnnnnnnnnnnnnnnnnnnnnnnnnnnnnnnnnnnnnnnnnnnnnnnnnnnnnnnnnnnnnnnnnnnnnnnnnnnnnnnnnnnnnnnnnnnnnnnnnnnnnnnnnnnnnnnnnnnnnnnnnnnnnnnnnnnnnnnnnnnnnnnnnnnnnnnnnnnnnnnnnnnnnnnnnnnnnnnnnnnnnnnnnnnnnnnnnnnnnnnnnnnnnnnnnnnnnnnnnnnnnnnnnnnnnnnnnnnnnnnnnnnnnnnnnnnnnnnnnnnnnnnnnnnnnnnnnnnnnnnnnnnnnnnnnnnnnnnnnnnnnnnnnnnnnnnnnnnnnnnnnnnnnnnnnnnnnnnnnnnnnnnnnnnnnnnnnnnnnnnnnnnnnnnnnnnnnnnnnnnnnnnnnnnnnnnnnnnnnnnnnnnnnnnnnnnnnnnnnnnnnnnnnnnnnnnnnnnnnnnnnnnnnnnnnnnnnnnnnnnnnnnnnnnnnnnnnnnnnnnnnnnnnnnnnnnnnnnnnnnnnnnnnnnnnnnnnnnnnnnnnnnnnnnnnnnnnnnnnnnnnnnnnnnnnnnnnnnnnnnnnnnnnnnnnnnnnnnnnnnnnnnnnnnnnnnnnnnnnnnnnnnnnnnnnnnnnnnnnnnnnnnnnnnnnnnnnnnnnnnnnnnnnnnnnnnnnnnnnnnnnnnnnnnnnnnnnnnnnnnnnnnnnnnnnnnnnnnnnnnnnnnnnnnnnnnnnnnnnnnnnnnnnnnnnnnnnnnnnnnnnnnnnnnnnnnnnnnnnnnnnnnnnnnnnnnnnnnnnnnnnnnnnnnnnnnnnnnnnnnnnnnnnnnnnnnnnnnnnnnnnnnnnnnnnnnnnnnnnnnnnnnnnnnnnnnnnnnnnnnnnnnnnnnnnnnnnnnnnnnnnnnnnnnnnnnnnnnnnnnnnnnnnnnnnnnnnnnnnnnnnnnnnnnnnnnnnnnnnnnnnnnnnnnnnnnnnnnnnnnnnnnnnnnnnnnnnnnnnnnnnnnnnnnnnnnnnnnnnnnnnnnnnnnnnnnnnnnnnnnnnnnnnnnnnnnnnnnnnnnnnnnnnnnnnnnnnnnnnnnnnnnnnnnnnnnnnnnnnnnnnnnnnnnnnnnnnnnnnnnnnnnnnnnnnnnnnnnnnnnnnnnnnnnnnnnnnnnnnnnnnnnnnnnnnnnnnnnnnnnnnnnnnnnnnnnnnnnnnnnnnnnnnnnnnnnnnnnnnnnnnnnnnnnnnnnnnnnnnnnnnnnnnnnnnnnnnnnnnnnnnnnnnnnnnnnnnnnnnnnnnnnnnnnnnnnnnnnnnnnnnnnnnnnnnnnnnnnnnnnnnnnnnnnnnnnnnnnnnnnnnnnnnnnnnnnnnnnnnnnnnnnnnnnnnnnnnnnnnnnnnnnnnnnnnnnnnnnnnnnnnnnnnnnnnnnnnnnnnnnnnnnnnnnnnnnnnnnnnnnnnnnnnnnnnnnnnnnnnnnnnnnnnnnnnnnnnnnnnnnnnnnnnnnnnnnnnnnnnnnnnnnnnnnnnnnnnnnnnnnnnnnnnnnnnnnnnnnnnnnnnnnnnnnnnnnnnnnnnnnnnnnnnnnnnnnnnnnnnnnnnnnnnnnnnnnnnnnnnnnnnnnnnnnnnnnnnnnnnnnnnnnnnnnnnnnnnnnnnnnnnnnnnnnnnnnnnnnnnnnnnnnnnnnnnnnnnnnnnnnnnnnnnnnnnnnnnnnnnnnnnnnnnnnnnnnnnnnnnnnnnnnnnnnnnnnnnnnnnnnnnnnnnnnnnnnnnnnnnnnnnnnnnnnnnnnnnnnnnnnnnnnnnnnnnnnnnnnnnnnnnnnnnnnnnnnnnnnnnnnnnnnnnnnnnnnnnnnnnnnnnnnnnnnnnnnnnnnnnnnnnnnnnnnnnnnnnnnnnnnnnnnnnnnnnnnnnnnnnnnnnnnnnnnnnnnnnnnnnnnnnnnnnnnnnnnnnnnnnnnnnnnnnnnnnnnnnnnnnnnnnnnnnnnnnnnnnnnnnnnnnnnnnnnnnnnnnnnnnnnnnnnnnnnnnnnnnnnnnnnnnnnnnnnnnnnnnnnnnnnnnnnnnnnnnnnnnnnnnnnnnnnnnnnnnnnnnnnnnnnnnnnnnnnnnnnnnnnnnnnnnnnnnnnnnnnnnnnnnnnnnnnnnnnnnnnnnnnnnnnnnnnnnnnnnnnnnnnnnnnnnnnnnnnnnnnnnnnnnnnnnnnnnnnnnnnnnnnnnnnnnnnnnnnnnnnnnnnnnnnnnnnnnnnnnnnnnnnnnnnnnnnnnnnnnnnnnnnnnnnnnnnnnnnnnnnnnnnnnnnnnnnnnnnnnnnnnnnnnnnnnnnnnnnnnnnnnnnnnnnnnnnnnnnnnnnnnnnnnnnnnnnnnnnnnnnnnnnnnnnnnnnnnnnnnnnnnnnnnnnnnnnnnnnnnnnnnnnnnnnnnnnnnnnnnnnnnnnnnnnnnnnnnnnnnnnnnnnnnnnnnnnnnnnnnnnnnnnnnnnnnnnnnnnnnnnnnnnnnnnnnnnnnnnnnnnnnnnnnnnnnnnnnnnnnnnnnnnnnnnnnnnnnnnnnnnnnnnnnnnnnnnnnnnnnnnnnnnnnnnnnnnnnnnnnnnnnnnnnnnnnnnnnnnnnnnnnnnnnnnnnnnnnnnnnnnnnnnnnnnnnnnnnnnnnnnnnnnnnnnnnnnnnnnnnnnnnnnnnnnnnnnnnnnnnnnnnnnnnnnnnnnnnnnnnnnnnnnnnnnnnnnnnnnnnnnnnnnnnnnnnnnnnnnnnnnnnnnnnnnnnnnnnnnnnnnnnnnnnnnnnnnnnnnnnnnnnnnnnnnnnnnnnnnnnnnnnnnnnnnnnnnnnnnnnnnnnnnnnnnnnnnnnnnnnnnnnnnnnnnnnnnnnnnnnnnnnnnnnnnnnnnnnnnnnnnnnnnnnnnnnnnnnnnnnnnnnnnnnnnnnnnnnnnnnnnnnnnnnnnnnnnnnnnnnnnnnnnnnnnnnnnnnnnnnnnnnnnnnnnnnnnnnnnnnnnnnnnnnnnnnnnnnnnnnnnnnnnnnnnnnnnnnnnnnnnnnnnnnnnnnnnnnnnnnnnnnnnnnnnnnnnnnnnnnnnnnnnnnnnnnnnnnnnnnnnnnnnnnnnnnnnnnnnnnnnnnnnnnnnnnnnnnnnnnnnnnnnnnnnnnnnnnnnnnnnnnnnnnnnnnnnnnnnnnnnnnnnnnnnnnnnnnnnnnnnnnnnnnnnnnnnnnnnnnnnnnnnnnnnnnnnnnnnnnnnnnnnnnnnnnnnnnnnnnnnnnnnnnnnnnnnnnnnnnnnnnnnnnnnnnnnnnnnnnnnnnnnnnnnnnnnnnnnnnnnnnnnnnnnnnnnnnnnnnnnnnnnnnnnnnnnnnnnnnnnnnnnnnnnnnnnnnnnnnnnnnnnnnnnnnnnnnnnnnnnnnnnnnnnnnnnnnnnnnnnnnnnnnnnnnnnnnnnnnnnnnnnnnnnnnnnnnnnnnnnnnnnnnnnnnnnnnnnnnnnnnnnnnnnnnnnnnnnnnnnnnnnnnnnnnnnnnnnnnnnnnnnnnnnnnnnnnnnnnnnnnnnnnnnnnnnnnnnnnnnnnnnnnnnnnnnnnnnnnnnnnnnnnnnnnnnnnnnnnnnnnnnnnnnnnnnnnnnnnnnnnnnnnnnnnnnnnnnnnnnnnnnnnnnnnnnnnnnnnnnnnnnnnnnnnnnnnnnnnnnnnnnnnnnnnnnnnnnnnnnnnnnnnnnnnnnnnnnnnnnnnnnnnnnnnnnnnnnnnnnnnnnnnnnnnnnnnnnnnnnnnnnnnnnnnnnnnnnnnnnnnnnnnnnnnnnnnnnnnnnnnnnnnnnnnnnnnnnnnnnnnnnnnnnnnnnnnnnnnnnnnnnnnnnnnnnnnnnnnnnnnnnnnnnnnnnnnnnnnnnnnnnnnnnnnnnnnnnnnnnnnnnnnnnnnnnnnnnnnnnnnnnnnnnnnnnnnnnnnnnnnnnnnnnnnnnnnnnnnnnnnnnnnnnnnnnnnnnnnnnnnnnnnnnnnnnnnnnnnnnnnnnnnnnnnnnnnnnnnnnnnnnnnnnnnnnnnnnnnnnnnnnnnnnnnnnnnnnnnnnnnnnnnnnnnnnnnnnnnnnnnnnnnnnnnnnnnnnnnnnnnnnnnnnnnnnnnnnnnnnnnnnnnnnnnnnnnnnnnnnnnnnnnnnnnnnnnnnnnnnnnnnnnnnnnnnnnnnnnnnnnnnnnnnnnnnnnnnnnnnnnnnnnnnnnnnnnnnnnnnnnnnnnnnnnnnnnnnnnnnnnnnnnnnnnnnnnnnnnnnnnnnnnnnnnnnnnnnnnnnnnnnnnnnnnnnnnnnnnnnnnnnnnnnnnnnnnnnnnnnnnnnnnnnnnnnnnnnnnnnnnnnnnnnnnnnnnnnnnnnnnnnnnnnnnnnnnnnnnnnnnnnnnnnnnnnnnnnnnnnnnnnnnnnnnnnnnnnnnnnnnnnnnnnnnnnnnnnnnnnnnnnnnnnnnnnnnnnnnnnnnnnnnnnnnnnnnnnnnnnnnnnnnnnnnnnnnnnnnnnnnnnnnnnnnnnnnnnnnnnnnnnnnnnnnnnnnnnnnnnnnnnnnnnnnnnnnnnnnnnnnnnnnnnnnnnnnnnnnnnnnnnnnnnnnnnnnnnnnnnnnnnnnnnnnnnnnnnnnnnnnnnnnnnnnnnnnnnnnnnnnnnnnnnnnnnnnnnnnnnnnnnnnnnnnnnnnnnnnnnnnnnnnnnnnnnnnnnnnnnnnnnnnnnnnnnnnnnnnnnnnnnnnnnnnnnnnnnnnnnnnnnnnnnnnnnnnnnnnnnnnnnnnnnnnnnnnnnnnnnnnnnnnnnnnnnnnnnnnnnnnnnnnnnnnnnnnnnnnnnnnnnnnnnnnnnnnnnnnnnnnnnnnnnnnnnnnnnnnnnnnnnnnnnnnnnnnnnnnnnnnnnnnnnnnnnnnnnnnnnnnnnnnnnnnnnnnnnnnnnnnnnnnnnnnnnnnnnnnnnnnnnnnnnnnnnnnnnnnnnnnnnnnnnnnnnnnnnnnnnnnnnnnnnnnnnnnnnnnnnnnnnnnnnnnnnnnnnnnnnnnnnnnnnnnnnnnnnnnnnnnnnnnnnnnnnnnnnnnnnnnnnnnnnnnnnnnnnnnnnnnnnnnnnnnnnnnnnnnnnnnnnnnnnnnnnnnnnnnnnnnnnnnnnnnnnnnnnnnnnnnnnnnnnnnnnnnnnnnnnnnnnnnnnnnnnnnnnnnnnnnnnnnnnnnnnnnnnnnnnnnnnnnnnnnnnnnnnnnnnnnnnnnnnnnnnnnnnnnnnnnnnnnnnnnnnnnnnnnnnnnnnnnnnnnnnnnnnnnnnnnnnnnnnnnnnnnnnnnnnnnnnnnnnnnnnnnnnnnnnnnnnnnnnnnnnnnnnnnnnnnnnnnnnnnnnnnnnnnnnnnnnnnnnnnnnnnnnnnnnnnnnnnnnnnnnnnnnnnnnnnnnnnnnnnnnnnnnnnnnnnnnnnnnnnnnnnnnnnnnnnnnnnnnnnnnnnnnnnnnnnnnnnnnnnnnnnnnnnnnnnnnnnnnnnnnnnnnnnnnnnnnnnnnnnnnnnnnnnnnnnnnnnnnnnnnnnnnnnnnnnnnnnnnnnnnnnnnnnnnnnnnnnnnnnnnnnnnnnnnnnnnnnnnnnnnnnnnnnnnnnnnnnnnnnnnnnnnnnnnnnnnnnnnnnnnnnnnnnnnnnnnnnnnnnnnnnnnnnnnnnnnnnnnnnnnnnnnnnnnnnnnnnnnnnnnnnnnnnnnnnnnnnnnnnnnnnnnnnnnnnnnnnnnnnnnnnnnnnnnnnnnnnnnnnnnnnnnnnnnnnnnnnnnnnnnnnnnnnnnnnnnnnnnnnnnnnnnnnnnnnnnnnnnnnnnnnnnnnnnnnnnnnnnnnnnnnnnnnnnnnnnnnnnnnnnnnnnnnnnnnnnnnnnnnnnnnnnnnnnnnnnnnnnnnnnnnnnnnnnnnnnnnnnnnnnnnnnnnnnnnnnnnnnnnnnnnnnnnnnnnnnnnnnnnnnnnnnnnnnnnnnnnnnnnnnnnnnnnnnnnnnnnnnnnnnnnnnnnnnnnnnnnnnnnnnnnnnnnnnnnnnnnnnnnnnnnnnnnnnnnnnnnnnnnnnnnnnnnnnnnnnnnnnnnnnnnnnnnnnnnnnnnnnnnnnnnnnnnnnnnnnnnnnnnnnnnnnnnnnnnnnnnnnnnnnnnnnnnnnnnnnnnnnnnnnnnnnnnnnnnnnnnnnnnnnnnnnnnnnnnnnnnnnnnnnnnnnnnnnnnnnnnnnnnnnnnnnnnnnnnnnnnnnnnnnnnnnnnnnnnnnnnnnnnnnnnnnnnnnnnnnnnnnnnnnnnnnnnnnnnnnnnnnnnnnnnnnnnnnnnnnnnnnnnnnnnnnnnnnnnnnnnnnnnnnnnnnnnnnnnnnnnnnnnnnnnnnnnnnnnnnnnnnnnnnnnnnnnnnnnnnnnnnnnnnnnnnnnnnnnnnnnnnnnnnnnnnnnnnnnnnnnnnnnnnnnnnnnnnnnnnnnnnnnnnnnnnnnnnnnnnnnnnnnnnnnnnnnnnnnnnnnnnnnnnnnnnnnnnnnnnnnnnnnnnnnnnnnnnnnnnnnnnnnnnnnnnnnnnnnnnnnnnnnnnnnnnnnnnnnnnnnnnnnnnnnnnnnnnnnnnnnnnnnnnnnnnnnnnnnnnnnnnnnnnnnnnnnnnnnnnnnnnnnnnnnnnnnnnnnnnnnnnnnnnnnnnnnnnnnnnnnnnnnnnnnnnnnnnnnnnnnnnnnnnnnnnnnnnnnnnnnnnnnnnnnnnnnnnnnnnnnnnnnnnnnnnnnnnnnnnnnnnnnnnnnnnnnnnnnnnnnnnnnnnnnnnnnnnnnnnnnnnnnnnnnnnnnnnnnnnnnnnnnnnnnnnnnnnnnnnnnnnnnnnnnnnnnnnnnnnnnnnnnnnnnnnnnnnnnnnnnnnnnnnnnnnnnnnnnnnnnnnnnnnnnnnnnnnnnnnnnnnnnnnnnnnnnnnnnnnnnnnnnnnnnnnnnnnnnnnnnnnnnnnnnnnnnnnnnnnnnnnnnnnnnnnnnnnnnnnnnnnnnnnnnnnnnnnnnnnnnnnnnnnnnnnnnnnnnnnnnnnnnnnnnnnnnnnnnnnnnnnnnnnnnnnnnnnnnnnnnnnnnnnnnnnnnnnnnnnnnnnnnnnnnnnnnnnnnnnnnnnnnnnnnnnnnnnnnnnnnnnnnnnnnnnnnnnnnnnnnnnnnnnnnnnnnnnnnnnnnnnnnnnnnnnnnnnnnnnnnnnnnnnnnnnnnnnnnnnnnnnnnnnnnnnnnnnnnnnnnnnnnnnnnnnnnnnnnnnnnnnnnnnnnnnnnnnnnnnnnnnnnnnnnnnnnnnnnnnnnnnnnnnnnnnnnnnnnnnnnnnnnnnnnnnnnnnnnnnnnnnnnnnnnnnnnnnnnnnnnnnnnnnnnnnnnnnnnnnnnnnnnnnnnnnnnnnnnnnnnnnnnnnnnnnnnnnnnnnnnnnnnnnnnnnnnnnnnnnnnnnnnnnnnnnnnnnnnnnnnnnnnnnnnnnnnnnnnnnnnnnnnnnnnnnnnnnnnnnnnnnnnnnnnnnnnnnnnnnnnnnnnnnnnnnnnnnnnnnnnnnnnnnnnnnnnnnnnnnnnnnnnnnnnnnnnnnnnnnnnnnnnnnnnnnnnnnnnnnnnnnnnnnnnnnnnnnnnnnnnnnnnnnnnnnnnnnnnnnnnnnnnnnnnnnnnnnnnnnnnnnnnnnnnnnnnnnnnnnnnnnnnnnnnnnnnnnnnnnnnnnnnnnnnnnnnnnnnnnnnnnnnnnnnnnnnnnnnnnnnnnnnnnnnnnnnnnnnnnnnnnnnnnnnnnnnnnnnnnnnnnnnnnnnnnnnnnnnnnnnnnnnnnnnnnnnnnnnnnnnnnnnnnnnnnnnnnnnnnnnnnnnnnnnnnnnnnnnnnnnnnnnnnnnnnnnnnnnnnnnnnnnnnnnnnnnnnnnnnnnnnnnnnnnnnnnnnnnnnnnnnnnnnnnnnnnnnnnnnnnnnnnnnnnnnnnnnnnnnnnnnnnnnnnnnnnnnnnnnnnnnnnnnnnnnnnnnnnnnnnnnnnnnnnnnnnnnnnnnnnnnnnnnnnnnnnnnnnnnnnnnnnnnnnnnnnnnnnnnnnnnnnnnnnnnnnnnnnnnnnnnnnnnnnnnnnnnnnnnnnnnnnnnnnnnnnnnnnnnnnnnnnnnnnnnnnnnnnnnnnnnnnnnnnnnnnnnnnnnnnnnnnnnnnnnnnnnnnnnnnnnnnnnnnnnnnnnnnnnnnnnnnnnnnnnnnnnnnnnnnnnnnnnnnnnnnnnnnnnnnnnnnnnnnnnnnnnnnnnnnnnnnnnnnnnnnnnnnnnnnnnnnnnnnnnnnnnnnnnnnnnnnnnnnnnnnnnnnnnnnnnnnnnnnnnnnnnnnnnnnnnnnnnnnnnnnnnnnnnnnnnnnnnnnnnnnnnnnnnnnnnnnnnnnnnnnnnnnnnnnnnnnnnnnnnnnnnnnnnnnnnnnnnnnnnnnnnnnnnnnnnnnnnnnnnnnnnnnnnnnnnnnnnnnnnnnnnnnnnnnnnnnnnnnnnnnnnnnnnnnnnnnnnnnnnnnnnnnnnnnnnnnnnnnnnnnnnnnnnnnnnnnnnnnnnnnnnnnnnnnnnnnnnnnnnnnnnnnnnnnnnnnnnnnnnnnnnnnnnnnnnnnnnnnnnnnnnnnnnnnnnnnnnnnnnnnnnnnnnnnnnnnnnnnnnnnnnnnnnnnnnnnnnnnnnnnnnnnnnnnnnnnnnnnnnnnnnnnnnnnnnnnnnnnnnnnnnnnnnnnnnnnnnnnnnnnnnnnnnnnnnnnnnnnnnnnnnnnnnnnnnnnnnnnnnnnnnnnnnnnnnnnnnnnnnnnnnnnnnnnnnnnnnnnnnnnnnnnnnnnnnnnnnnnnnnnnnnnnnnnnnnnnnnnnnnnnnnnnnnnnnnnnnnnnnnnnnnnnnnnnnnnnnnnnnnnnnnnnnnnnnnnnnnnnnnnnnnnnnnnnnnnnnnnnnnnnnnnnnnnnnnnnnnnnnnnnnnnnnnnnnnnnnnnnnnnnnnnnnnnnnnnnnnnnnnnnnnnnnnnnnnnnnnnnnnnnnnnnnnnnnnnnnnnnnnnnnnnnnnnnnnnnnnnnnnnnnnnnnnnnnnnnnnnnnnnnnnnnnnnnnnnnnnnnnnnnnnnnnnnnnnnnnnnnnnnnnnnnnnnnnnnnnnnnnnnnnnnnnnnnnnnnnnnnnnnnnnnnnnnnnnnnnnnnnnnnnnnnnnnnnnnnnnnnnnnnnnnnnnnnnnnnnnnnnnnnnnnnnnnnnnnnnnnnnnnnnnnnnnnnnnnnnnnnnnnnnnnnnnnnnnnnnnnnnnnnnnnnnnnnnnnnnnnnnnnnnnnnnnnnnnnnnnnnnnnnnnnnnnnnnnnnnnnnnnnnnnnnnnnnnnnnnnnnnnnnnnnnnnnnnnnnnnnnnnnnnnnnnnnnnnnnnnnnnnnnnnnnnnnnnnnnnnnnnnnnnnnnnnnnnnnnnnnnnnnnnnnnnnnnnnnnnnnnnnnnnnnnnnnnnnnnnnnnnnnnnnnnnnnnnnnnnnnnnnnnnnnnnnnnnnnnnnnnnnnnnnnnnnnnnnnnnnnnnnnnnnnnnnnnnnnnnnnnnnnnnnnnnnnnnnnnnnnnnnnnnnnnnnnnnnnnnnnnnnnnnnnnnnnnnnnnnnnnnnnnnnnnnnnnnnnnnnnnnnnnnnnnnnnnnnnnnnnnnnnnnnnnnnnnnnnnnnnnnnnnnnnnnnnnnnnnnnnnnnnnnnnnnnnnnnnnnnnnnnnnnnnnnnnnnnnnnnnnnnnnnnnnnnnnnnnnnnnnnnnnnnnnnnnnnnnnnnnnnnnnnnnnnnnnnnnnnnnnnnnnnnnnnnnnnnnnnnnnnnnnnnnnnnnnnnnnnnnnnnnnnnnnnnnnnnnnnnnnnnnnnnnnnnnnnnnnnnnnnnnnnnnnnnnnnnnnnnnnnnnnnnnnnnnnnnnnnnnnnnnnnnnnnnnnnnnnnnnnnnnnnnnnnnnnnnnnnnnnnnnnnnnnnnnnnnnnnnnnnnnnnnnnnnnnnnnnnnnnnnnnnnnnnnnnnnnnnnnnnnnnnnnnnnnnnnnnnnnnnnnnnnnnnnnnnnnnnnnnnnnnnnnnnnnnnnnnnnnnnnnnnnnnnnnnnnnnnnnnnnnnnnnnnnnnnnnnnnnnnnnnnnnnnnnnnnnnnnnnnnnnnnnnnnnnnnnnnnnnnnnnnnnnnnnnnnnnnnnnnnnnnnnnnnnnnnnnnnnnnnnnnnnnnnnnnnnnnnnnnnnnnnnnnnnnnnnnnnnnnnnnnnnnnnnnnnnnnnnnnnnnnnnnnnnnnnnnnnnnnnnnnnnnnnnnnnnnnnnnnnnnnnnnnnnnnnnnnnnnnnnnnnnnnnnnnnnnnnnnnnnnnnnnnnnnnnnnnnnnnnnnnnnnnnnnnnnnnnnnnnnnnnnnnnnnnnnnnnnnnnnnnnnnnnnnnnnnnnnnnnnnnnnnnnnnnnnnnnnnnnnnnnnnnnnnnnnnnnnnnnnnnnnnnnnnnnnnnnnnnnnnnnnnnnnnnnnnnnnnnnnnnnnnnnnnnnnnnnnnnnnnnnnnnnnnnnnnnnnnnnnnnnnnnnnnnnnnnnnnnnnnnnnnnnnnnnnnnnnnnnnnnnnnnnnnnnnnnnnnnnnnnnnnnnnnnnnnnnnnnnnnnnnnnnnnnnnnnnnnnnnnnnnnnnnnnnnnnnnnnnnnnnnnnnnnnnnnnnnnnnnnnnnnnnnnnnnnnnnnnnnnnnnnnnnnnnnnnnnnnnnnnnnnnnnnnnnnnnnnnnnnnnnnnnnnnnnnnnnnnnnnnnnnnnnnnnnnnnnnnnnnnnnnnnnnnnnnnnnnnnnnnnnnnnnnnnnnnnnnnnnnnnnnnnnnnnnnnnnnnnnnnnnnnnnnnnnnnnnnnnnnnnnnnnnnnnnnnnnnnnnnnnnnnnnnnnnnnnnnnnnnnnnnnnnnnnnnnnnnnnnnnnnnnnnnnnnnnnnnnnnnnnnnnnnnnnnnnnnnnnnnnnnnnnnnnnnnnnnnnnnnnnnnnnnnnnnnnnnnnnnnnnnnnnnnnnnnnnnnnnnnnnnnnnnnnnnnnnnnnnnnnnnnnnnnnnnnnnnnnnnnnnnnnnnnnnnnnnnnnnnnnnnnnnnnnnnnnnnnnnnnnnnnnnnnnnnnnnnnnnnnnnnnnnnnnnnnnnnnnnnnnnnnnnnnnnnnnnnnnnnnnnnnnnnnnnnnnnnnnnnnnnnnnnnnnnnnnnnnnnnnnnnnnnnnnnnnnnnnnnnnnnnnnnnnnnnnnnnnnnnnnnnnnnnnnnnnnnnnnnnnnnnnnnnnnnnnnnnnnnnnnnnnnnnnnnnnnnnnnnnnnnnnnnnnnnnnnnnnnnnnnnnnnnnnnnnnnnnnnnnnnnnnnnnnnnnnnnnnnnnnnnnnnnnnnnnnnnnnnnnnnnnnnnnnnnnnnnnnnnnnnnnnnnnnnnnnnnnnnnnnnnnnnnnnnnnnnnnnnnnnnnnnnnnnnnnnnnnnnnnnnnnnnnnnnnnnnnnnnnnnnnnnnnnnnnnnnnnnnnnnnnnnnnnnnnnnnnnnnnnnnnnnnnnnnnnnnnnnnnnnnnnnnnnnnnnnnnnnnnnnnnnnnnnnnnnnnnnnnnnnnnnnnnnnnnnnnnnnnnnnnnnnnnnnnnnnnnnnnnnnnnnnnnnnnnnnnnnnnnnnnnnnnnnnnnnnnnnnnnnnnnnnnnnnnnnnnnnnnnnnnnnnnnnnnnnnnnnnnnnnnnnnnnnnnnnnnnnnnnnnnnnnnnnnnnnnnnnnnnnnnnnnnnnnnnnnnnnnnnnnnnnnnnnnnnnnnnnnnnnnnnnnnnnnnnnnnnnnnnnnnnnnnnnnnnnnnnnnnnnnnnnnnnnnnnnnnnnnnnnnnnnnnnnnnnnnnnnnnnnnnnnnnnnnnnnnnnnnnnnnnnnnnnnnnnnnnnnnnnnnnnnnnnnnnnnnnnnnnnnnnnnnnnnnnnnnnnnnnnnnnnnnnnnnnnnnnnnnnnnnnnnnnnnnnnnnnnnnnnnnnnnnnnnnnnnnnnnnnnnnnnnnnnnnnnnnnnnnnnnnnnnnnnnnnnnnnnnnnnnnnnnnnnnnnnnnnnnnnnnnnnnnnnnnnnnnnnnnnnnnnnnnnnnnnnnnnnnnnnnnnnnnnnnnnnnnnnnnnnnnnnnnnnnnnnnnnnnnnnnnnnnnnnnnnnnnnnnnnnnnnnnnnnnnnnnnnnnnnnnnnnnnnnnnnnnnnnnnnnnnnnnnnnnnnnnnnnnnnnnnnnnnnnnnnnnnnnnnnnnnnnnnnnnnnnnnnnnnnnnnnnnnnnnnnnnnnnnnnnnnnnnnnnnnnnnnnnnnnnnnnnnnnnnnnnnnnnnnnnnnnnnnnnnnnnnnnnnnnnnnnnnnnnnnnnnnnnnnnnnnnnnnnnnnnnnnnnnnnnnnnnnnnnnnnnnnnnnnnnnnnnnnnnnnnnnnnnnnnnnnnnnnnnnnnnnnnnnnnnnnnnnnnnnnnnnnnnnnnnnnnnnnnnnnnnnnnnnnnnnnnnnnnnnnnnnnnnnnnnnnnnnnnnnnnnnnnnnnnnnnnnnnnnnnnnnnnnnnnnnnnnnnnnnnnnnnnnnnnnnnnnnnnnnnnnnnnnnnnnnnnnnnnnnnnnnnnnnnnnnnnnnnnnnnnnnnnnnnnnnnnnnnnnnnnnnnnnnnnnnnnnnnnnnnnnnnnnnnnnnnnnnnnnnnnnnnnnnnnnnnnnnnnnnnnnnnnnnnnnnnnnnnnnnnnnnnnnnnnnnnnnnnnnnnnnnnnnnnnnnnnnnnnnnnnnnnnnnnnnnnnnnnnnnnnnnnnnnnnnnnnnnnnnnnnnnnnnnnnnnnnnnnnnnnnnnnnnnnnnnnnnnnnnnnnnnnnnnnnnnnnnnnnnnnnnnnnnnnnnnnnnnnnnnnnnnnnnnnnnnnnnnnnnnnnnnnnnnnnnnnnnnnnnnnnnnnnnnnnnnnnnnnnnnnnnnnnnnnnnnnnnnnnnnnnnnnnnnnnnnnnnnnnnnnnnnnnnnnnnnnnnnnnnnnnnnnnnnnnnnnnnnnnnnnnnnnnnnnnnnnnnnnnnnnnnnnnnnnnnnnnnnnnnnnnnnnnnnnnnnnnnnnnnnnnnnnnnnnnnnnnnnnnnnnnnnnnnnnnnnnnnnnnnnnnnnnnnnnnnnnnnnnnnnnnnnnnnnnnnnnnnnnnnnnnnnnnnnnnnnnnnnnnnnnnnnnnnnnnnnnnnnnnnnnnnnnnnnnnnnnnnnnnnnnnnnnnnnnnnnnnnnnnnnnnnnnnnnnnnnnnnnnnnnnnnnnnnnnnnnnnnnnnnnnnnnnnnnnnnnnnnnnnnnnnnnnnnnnnnnnnnnnnnnnnnnnnnnnnnnnnnnnnnnnnnnnnnnnnnnnnnnnnnnnnnnnnnnnnnnnnnnnnnnnnnnnnnnnnnnnnnnnnnnnnnnnnnnnnnnnnnnnnnnnnnnnnnnnnnnnnnnnnnnnnnnnnnnnnnnnnnnnnnnnnnnnnnnnnnnnnnnnnnnnnnnnnnnnnnnnnnnnnnnnnnnnnnnnnnnnnnnnnnnnnnnnnnnnnnnnnnnnnnnnnnnnnnnnnnnnnnnnnnnnnnnnnnnnnnnnnnnnnnnnnnnnnnnnnnnnnnnnnnnnnnnnnnnnnnnnnnnnnnnnnnnnnnnnnnnnnnnnnnnnnnnnnnnnnnnnnnnnnnnnnnnnnnnnnnnnnnnnnnnnnnnnnnnnnnnnnnnnnnnnnnnnnnnnnnnnnnnnnnnnnnnnnnnnnnnnnnnnnnnnnnnnnnnnnnnnnnnnnnnnnnnnnnnnnnnnnnnnnnnnnnnnnnnnnnnnnnnnnnnnnnnnnnnnnnnnnnnnnnnnnnnnnnnnnnnnnnnnnnnnnnnnnnnnnnnnnnnnnnnnnnnnnnnnnnnnnnnnnnnnnnnnnnnnnnnnnnnnnnnnnnnnnnnnnnnnnnnnnnnnnnnnnnnnnnnnnnnnnnnnnnnnnnnnnnnnnnnnnnnnnnnnnnnnnnnnnnnnnnnnnnnnnnnnnnnnnnnnnnnnnnnnnnnnnnnnnnnnnnnnnnnnnnnnnnnnnnnnnnnnnnnnnnnnnnnnnnnnnnnnnnnnnnnnnnnnnnnnnnnnnnnnnnnnnnnnnnnnnnnnnnnnnnnnnnnnnnnnnnnnnnnnnnnnnnnnnnnnnnnnnnnnnnnnnnnnnnnnnnnnnnnnnnnnnnnnnnnnnnnnnnnnnnnnnnnnnnnnnnnnnnnnnnnnnnnnnnnnnnnnnnnnnnnnnnnnnnnnnnnnnnnnnnnnnnnnnnnnnnnnnnnnnnnnnnnnnnnnnnnnnnnnnnnnnnnnnnnnnnnnnnnnnnnnnnnnnnnnnnnnnnnnnnnnnnnnnnnnnnnnnnnnnnnnnnnnnnnnnnnnnnnnnnnnnnnnnnnnnnnnnnnnnnnnnnnnnnnnnnnnnnnnnnnnnnnnnnnnnnnnnnnnnnnnnnnnnnnnnnnnnnnnnnnnnnnnnnnnnnnnnnnnnnnnnnnnnnnnnnnnnnnnnnnnnnnnnnnnnnnnnnnnnnnnnnnnnnnnnnnnnnnnnnnnnnnnnnnnnnnnnnnnnnnnnnnnnnnnnnnnnnnnnnnnnnnnnnnnnnnnnnnnnnnnnnnnnnnnnnnnnnnnnnnnnnnnnnnnnnnnnnnnnnnnnnnnnnnnnnnnnnnnnnnnnnnnnnnnnnnnnnnnnnnnnnnnnnnnnnnnnnnnnnnnnnnnnnnnnnnnnnnnnnnnnnnnnnnnnnnnnnnnnnnnnnnnnnnnnnnnnnnnnnnnnnnnnnnnnnnnnnnnnnnnnnnnnnnnnnnnnnnnnnnnnnnnnnnnnnnnnnnnnnnnnnnnnnnnnnnnnnnnnnnnnnnnnnnnnnnnnnnnnnnnnnnnnnnnnnnnnnnnnnnnnnnnnnnnnnnnnnnnnnnnnnnnnnnnnnnnnnnnnnnnnnnnnnnnnnnnnnnnnnnnnnnnnnnnnnnnnnnnnnnnnnnnnnnnnnnnnnnnnnnnnnnnnnnnnnnnnnnnnnnnnnnnnnnnnnnnnnnnnnnnnnnnnnnnnnnnnnnnnnnnnnnnnnnnnnnnnnnnnnnnnnnnnnnnnnnnnnnnnnnnnnnnnnnnnnnnnnnnnnnnnnnnnnnnnnnnnnnnnnnnnnnnnnnnnnnnnnnnnnnnnnnnnnnnnnnnnnnnnnnnnnnnnnnnnnnnnnnnnnnnnnnnnnnnnnnnnnnnnnnnnnnnnnnnnnnnnnnnnnnnnnnnnnnnnnnnnnnnnnnnnnnnnnnnnnnnnnnnnnnnnnnnnnnnnnnnnnnnnnnnnnnnnnnnnnnnnnnnnnnnnnnnnnnnnnnnnnnnnnnnnnnnnnnnnnnnnnnnnnnnnnnnnnnnnnnnnnnnnnnnnnnnnnnnnnnnnnnnnnnnnnnnnnnnnnnnnnnnnnnnnnnnnnnnnnnnnnnnnnnnnnnnnnnnnnnnnnnnnnnnnnnnnnnnnnnnnnnnnnnnnnnnnnnnnnnnnnnnnnnnnnnnnnnnnnnnnnnnnnnnnnnnnnnnnnnnnnnnnnnnnnnnnnnnnnnnnnnnnnnnnnnnnnnnnnnnnnnnnnnnnnnnnnnnnnnnnnnnnnnnnnnnnnnnnnnnnnnnnnnnnnnnnnnnnnnnnnnnnnnnnnnnnnnnnnnnnnnnnnnnnnnnnnnnnnnnnnnnnnnnnnnnnnnnnnnnnnnnnnnnnnnnnnnnnnnnnnnnnnnnnnnnnnnnnnnnnnnnnnnnnnnnnnnnnnnnnnnnnnnnnnnnnnnnnnnnnnnnnnnnnnnnnnnnnnnnnnnnnnnnnnnnnnnnnnnnnnnnnnnnnnnnnnnnnnnnnnnnnnnnnnnnnnnnnnnnnnnnnnnnnnnnnnnnnnnnnnnnnnnnnnnnnnnnnnnnnnnnnnnnnnnnnnnnnnnnnnnnnnnnnnnnnnnnnnnnnnnnnnnnnnnnnnnnnnnnnnnnnnnnnnnnnnnnnnnnnnnnnnnnnnnnnnnnnnnnnnnnnnnnnnnnnnnnnnnnnnnnnnnnnnnnnnnnnnnnnnnnnnnnnnnnnnnnnnnnnnnnnnnnnnnnnnnnnnnnnnnnnnnnnnnnnnnnnnnnnnnnnnnnnnnnnnnnnnnnnnnnnnnnnnnnnnnnnnnnnnnnnnnnnnnnnnnnnnnnnnnnnnnnnnnnnnnnnnnnnnnnnnnnnnnnnnnnnnnnnnnnnnnnnnnnnnnnnnnnnnnnnnnnnnnnnnnnnnnnnnnnnnnnnnnnnnnnnnnnnnnnnnnnnnnnnnnnnnnnnnnnnnnnnnnnnnnnnnnnnnnnnnnnnnnnnnnnnnnnnnnnnnnnnnnnnnnnnnnnnnnnnnnnnnnnnnnnnnnnnnnnnnnnnnnnnnnnnnnnnnnnnnnnnnnnnnnnnnnnnnnnnnnnnnnnnnnnnnnnnnnnnnnnnnnnnnnnnnnnnnnnnnnnnnnnnnnnnnnnnnnnnnnnnnnnnnnnnnnnnnnnnnnnnnnnnnnnnnnnnnnnnnnnnnnnnnnnnnnnnnnnnnnnnnnnnnnnnnnnnnnnnnnnnnnnnnnnnnnnnnnnnnnnnnnnnnnnnnnnnnnnnnnnnnnnnnnnnnnnnnnnnnnnnnnnnnnnnnnnnnnnnnnnnnnnnnnnnnnnnnnnnnnnnnnnnnnnnnnnnnnnnnnnnnnnnnnnnnnnnnnnnnnnnnnnnnnnnnnnnnnnnnnnnnnnnnnnnnnnnnnnnnnnnnnnnnnnnnnnnnnnnnnnnnnnnnnnnnnnnnnnnnnnnnnnnnnnnnnnnnnnnnnnnnnnnnnnnnnnnnnnnnnnnnnnnnnnnnnnnnnnnnnnnnnnnnnnnnnnnnnnnnnnnnnnnnnnnnnnnnnnnnnnnnnnnnnnnnnnnnnnnnnnnnnnnnnnnnnnnnnnnnnnnnnnnnnnnnnnnnnnnnnnnnnnnnnnnnnnnnnnnnnnnnnnnnnnnnnnnnnnnnnnnnnnnnnnnnnnnnnnnnnnnnnnnnnnnnnnnnnnnnnnnnnnnnnnnnnnnnnnnnnnnnnnnnnnnnnnnnnnnnnnnnnnnnnnnnnnnnnnnnnnnnnnnnnnnnnnnnnnnnnnnnnnnnnnnnnnnnnnnnnnnnnnnnnnnnnnnnnnnnnnnnnnnnnnnnnnnnnnnnnnnnnnnnnnnnnnnnnnnnnnnnnnnnnnnnnnnnnnnnnnnnnnnnnnnnnnnnnnnnnnnnnnnnnnnnnnnnnnnnnnnnnnnnnnnnnnnnnnnnnnnnnnnnnnnnnnnnnnnnnnnnnnnnnnnnnnnnnnnnnnnnnnnnnnnnnnnnnnnnnnnnnnnnnnnnnnnnnnnnnnnnnnnnnnnnnnnnnnnnnnnnnnnnnnnnnnnnnnnnnnnnnnnnnnnnnnnnnnnnnnnnnnnnnnnnnnnnnnnnnnnnnnnnnnnnnnnnnnnnnnnnnnnnnnnnnnnnnnnnnnnnnnnnnnnnnnnnnnnnnnnnnnnnnnnnnnnnnnnnnnnnnnnnnnnnnnnnnnnnnnnnnnnnnnnnnnnnnnnnnnnnnnnnnnnnnnnnnnnnnnnnnnnnnnnnnnnnnnnnnnnnnnnnnnnnnnnnnnnnnnnnnnnnnnnnnnnnnnnnnnnnnnnnnnnnnnnnnnnnnnnnnnnnnnnnnnnnnnnnnnnnnnnnnnnnnnnnnnnnnnnnnnnnnnnnnnnnnnnnnnnnnnnnnnnnnnnnnnnnnnnnnnnnnnnnnnnnnnnnnnnnnnnnnnnnnnnnnnnnnnnnnnnnnnnnnnnnnnnnnnnnnnnnnnnnnnnnnnnnnnnnnnnnnnnnnnnnnnnnnnnnnnnnnnnnnnnnnnnnnnnnnnnnnnnnnnnnnnnnnnnnnnnnnnnnnnnnnnnnnnnnnnnnnnnnnnnnnnnnnnnnnnnnnnnnnnnnnnnnnnnnnnnnnnnnnnnnnnnnnnnnnnnnnnnnnnnnnnnnnnnnnnnnnnnnnnnnnnnnnnnnnnnnnnnnnnnnnnnnnnnnnnnnnnnnnnnnnnnnnnnnnnnnnnnnnnnnnnnnnnnnnnnnnnnnnnnnnnnnnnnnnnnnnnnnnnnnnnnnnnnnnnnnnnnnnnnnnnnnnnnnnnnnnnnnnnnnnnnnnnnnnnnnnnnnnnnnnnnnnnnnnnnnnnnnnnnnnnnnnnnnnnnnnnnnnnnnnnnnnnnnnnnnnnnnnnnnnnnnnnnnnnnnnnnnnnnnnnnnnnnnnnnnnnnnnnnnnnnnnnnnnnnnnnnnnnnnnnnnnnnnnnnnnnnnnnnnnnnnnnnnnnnnnnnnnnnnnnnnnnnnnnnnnnnnnnnnnnnnnnnnnnnnnnnnnnnnnnnnnnnnnnnnnnnnnnnnnnnnnnnnnnnnnnnnnnnnnnnnnnnnnnnnnnnnnnnnnnnnnnnnnnnnnnnnnnnnnnnnnnnnnnnnnnnnnnnnnnnnnnnnnnnnnnnnnnnnnnnnnnnnnnnnnnnnnnnnnnnnnnnnnnnnnnnnnnnnnnnnnnnnnnnnnnnnnnnnnnnnnnnnnnnnnnnnnnnnnnnnnnnnnnnnnnnnnnnnnnnnnnnnnnnnnnnnnnnnnnnnnnnnnnnnnnnnnnnnnnnnnnnnnnnnnnnnnnnnnnnnnnnnnnnnnnnnnnnnnnnnnnnnnnnnnnnnnnnnnnnnnnnnnnnnnnnnnnnnnnnnnnnnnnnnnnnnnnnnnnnnnnnnnnnnnnnnnnnnnnnnnnnnnnnnnnnnnnnnnnnnnnnnnnnnnnnnnnnnnnnnnnnnnnnnnnnnnnnnnnnnnnnnnnnnnnnnnnnnnnnnnnnnnnnnnnnnnnnnnnnnnnnnnnnnnnnnnnnnnnnnnnnnnnnnnnnnnnnnnnnnnnnnnnnnnnnnnnnnnnnnnnnnnnnnnnnnnnnnnnnnnnnnnnnnnnnnnnnnnnnnnnnnnnnnnnnnnnnnnnnnnnnnnnnnnnnnnnnnnnnnnnnnnnnnnnnnnnnnnnnnnnnnnnnnnnnnnnnnnnnnnnnnnnnnnnnnnnnnnnnnnnnnnnnnnnnnnnnnnnnnnnnnnnnnnnnnnnnnnnnnnnnnnnnnnnnnnnnnnnnnnnnnnnnnnnnnnnnnnnnnnnnnnnnnnnnnnnnnnnnnnnnnnnnnnnnnnnnnnnnnnnnnnnnnnnnnnnnnnnnnnnnnnnnnnnnnnnnnnnnnnnnnnnnnnnnnnnnnnnnnnnnnnnnnnnnnnnnnnnnnnnnnnnnnnnnnnnnnnnnnnnnnnnnnnnnnnnnnnnnnnnnnnnnnnnnnnnnnnnnnnnnnnnnnnnnnnnnnnnnnnnnnnnnnnnnnnnnnnnnnnnnnnnnnnnnnnnnnnnnnnnnnnnnnnnnnnnnnnnnnnnnnnnnnnnnnnnnnnnnnnnnnnnnnnnnnnnnnnnnnnnnnnnnnnnnnnnnnnnnnnnnnnnnnnnnnnnnnnnnnnnnnnnnnnnnnnnnnnnnnnnnnnnnnnnnnnnnnnnnnnnnnnnnnnnnnnnnnnnnnnnnnnnnnnnnnnnnnnnnnnnnnnnnnnnnnnnnnnnnnnnnnnnnnnnnnnnnnnnnnnnnnnnnnnnnnnnnnnnnnnnnnnnnnnnnnnnnnnnnnnnnnnnnnnnnnnnnnnnnnnnnnnnnnnnnnnnnnnnnnnnnnnnnnnnnnnnnnnnnnnnnnnnnnnnnnnnnnnnnnnnnnnnnnnnnnnnnnnnnnnnnnnnnnnnnnnnnnnnnnnnnnnnnnnnnnnnnnnnnnnnnnnnnnnnnnnnnnnnnnnnnnnnnnnnnnnnnnnnnnnnnnnnnnnnnnnnnnnnnnnnnnnnnnnnnnnnnnnnnnnnnnnnnnnnnnnnnnnnnnnnnnnnnnnnnnnnnnnnnnnnnnnnnnnnnnnnnnnnnnnnnnnnnnnnnnnnnnnnnnnnnnnnnnnnnnnnnnnnnnnnnnnnnnnnnnnnnnnnnnnnnnnnnnnnnnnnnnnnnnnnnnnnnnnnnnnnnnnnnnnnnnnnnnnnnnnnnnnnnnnnnnnnnnnnnnnnnnnnnnnnnnnnnnnnnnnnnnnnnnnnnnnnnnnnnnnnnnnnnnnnnnnnnnnnnnnnnnnnnnnnnnnnnnnnnnnnnnnnnnnnnnnnnnnnnnnnnnnnnnnnnnnnnnnnnnnnnnnnnnnnnnnnnnnnnnnnnnnnnnnnnnnnnnnnnnnnnnnnnnnnnnnnnnnnnnnnnnnnnnnnnnnnnnnnnnnnnnnnnnnnnnnnnnnnnnnnnnnnnnnnnnnnnnnnnnnnnnnnnnnnnnnnnnnnnnnnnnnnnnnnnnnnnnnnnnnnnnnnnnnnnnnnnnnnnnnnnnnnnnnnnnnnnnnnnnnnnnnnnnnnnnnnnnnnnnnnnnnnnnnnnnnnnnnnnnnnnnnnnnnnnnnnnnnnnnnnnnnnnnnnnnnnnnnnnnnnnnnnnnnnnnnnnnnnnnnnnnnnnnnnnnnnnnnnnnnnnnnnnnnnnnnnnnnnnnnnnnnnnnnnnnnnnnnnnnnnnnnnnnnnnnnnnnnnnnnnnnnnnnnnnnnnnnnnnnnnnnnnnnnnnnnnnnnnnnnnnnnnnnnnnnnnnnnnnnnnnnnnnnnnnnnnnnnnnnnnnnnnnnnnnnnnnnnnnnnnnnnnnnnnnnnnnnnnnnnnnnnnnnnnnnnnnnnnnnnnnnnnnnnnnnnnnnnnnnnnnnnnnnnnnnnnnnnnnnnnnnnnnnnnnnnnnnnnnnnnnnnnnnnnnnnnnnnnnnnnnnnnnnnnnnnnnnnnnnnnnnnnnnnnnnnnnnnnnnnnnnnnnnnnnnnnnnnnnnnnnnnnnnnnnnnnnnnnnnnnnnnnnnnnnnnnnnnnnnnnnnnnnnnnnnnnnnnnnnnnnnnnnnnnnnnnnnnnnnnnnnnnnnnnnnnnnnnnnnnnnnnnnnnnnnnnnnnnnnnnnnnnnnnnnnnnnnnnnnnnnnnnnnnnnnnnnnnnnnnnnnnnnnnnnnnnnnnnnnnnnnnnnnnnnnnnnnnnnnnnnnnnnnnnnnnnnnnnnnnnnnnnnnnnnnnnnnnnnnnnnnnnnnnnnnnnnnnnnnnnnnnnnnnnnnnnnnnnnnnnnnnnnnnnnnnnnnnnnnnnnnnnnnnnnnnnnnnnnnnnnnnnnnnnnnnnnnnnnnnnnnnnnnnnnnnnnnnnnnnnnnnnnnnnnnnnnnnnnnnnnnnnnnnnnnnnnnnnnnnnnnnnnnnnnnnnnnnnnnnnnnnnnnnnnnnnnnnnnnnnnnnnnnnnnnnnnnnnnnnnnnnnnnnnnnnnnnnnnnnnnnnnnnnnnnnnnnnnnnnnnnnnnnnnnnnnnnnnnnnnnnnnnnnnnnnnnnnnnnnnnnnnnnnnnnnnnnnnnnnnnnnnnnnnnnnnnnnnnnnnnnnnnnnnnnnnnnnnnnnnnnnnnnnnnnnnnnnnnnnnnnnnnnnnnnnnnnnnnnnnnnnnnnnnnnnnnnnnnnnnnnnnnnnnnnnnnnnnnnnnnnnnnnnnnnnnnnnnnnnnnnnnnnnnnnnnnnnnnnnnnnnnnnnnnnnnnnnnnnnnnnnnnnnnnnnnnnnnnnnnnnnnnnnnnnnnnnnnnnnnnnnnnnnnnnnnnnnnnnnnnnnnnnnnnnnnnnnnnnnnnnnnnnnnnnnnnnnnnnnnnnnnnnnnnnnnnnnnnnnnnnnnnnnnnnnnnnnnnnnnnnnnnnnnnnnnnnnnnnnnnnnnnnnnnnnnnnnnnnnnnnnnnnnnnnnnnnnnnnnnnnnnnnnnnnnnnnnnnnnnnnnnnnnnnnnnnnnnnnnnnnnnnnnnnnnnnnnnnnnnnnnnnnnnnnnnnnnnnnnnnnnnnnnnnnnnnnnnnnnnnnnnnnnnnnnnnnnnnnnnnnnnnnnnnnnnnnnnnnnnnnnnnnnnnnnnnnnnnnnnnnnnnnnnnnnnnnnnnnnnnnnnnnnnnnnnnnnnnnnnnnnnnnnnnnnnnnnnnnnnnnnnnnnnnnnnnnnnnnnnnnnnnnnnnnnnnnnnnnnnnnnnnnnnnnnnnnnnnnnnnnnnnnnnnnnnnnnnnnnnnnnnnnnnnnnnnnnnnnnnnnnnnnnnnnnnnnnnnnnnnnnnnnnnnnnnnnnnnnnnnnnnnnnnnnnnnnnnnnnnnnnnnnnnnnnnnnnnnnnnnnnnnnnnnnnnnnnnnnnnnnnnnnnnnnnnnnnnnnnnnnnnnnnnnnnnnnnnnnnnnnnnnnnnnnnnnnnnnnnnnnnnnnnnnnnnnnnnnnnnnnnnnnnnnnnnnnnnnnnnnnnnnnnnnnnnnnnnnnnnnnnnnnnnnnnnnnnnnnnnnnnnnnnnnnnnnnnnnnnnnnnnnnnnnnnnnnnnnnnnnnnnnnnnnnnnnnnnnnnnnnnnnnnnnnnnnnnnnnnnnnnnnnnnnnnnnnnnnnnnnnnnnnnnnnnnnnnnnnnnnnnnnnnnnnnnnnnnnnnnnnnnnnnnnnnnnnnnnnnnnnnnnnnnnnnnnnnnnnnnnnnnnnnnnnnnnnnnnnnnnnnnnnnnnnnnnnnnnnnnnnnnnnnnnnnnnnnnnnnnnnnnnnnnnnnnnnnnnnnnnnnnnnnnnnnnnnnnnnnnnnnnnnnnnnnnnnnnnnnnnnnnnnnnnnnnnnnnnnnnnnnnnnnnnnnnnnnnnnnnnnnnnnnnnnnnnnnnnnnnnnnnnnnnnnnnnnnnnnnnnnnnnnnnnnnnnnnnnnnnnnnnnnnnnnnnnnnnnnnnnnnnnnnnnnnnnnnnnnnnnnnnnnnnnnnnnnnnnnnnnnnnnnnnnnnnnnnnnnnnnnnnnnnnnnnnnnnnnnnnnnnnnnnnnnnnnnnnnnnnnnnnnnnnnnnnnnnnnnnnnnnnnnnnnnnnnnnnnnnnnnnnnnnnnnnnnnnnnnnnnnnnnnnnnnnnnnnnnnnnnnnnnnnnnnnnnnnnnnnnnnnnnnnnnnnnnnnnnnnnnnnnnnnnnnnnnnnnnnnnnnnnnnnnnnnnnnnnnnnnnnnnnnnnnnnnnnnnnnnnnnnnnnnnnnnnnnnnnnnnnnnnnnnnnnnnnnnnnnnnnnnnnnnnnnnnnnnnnnnnnnnnnnnnnnnnnnnnnnnnnnnnnnnnnnnnnnnnnnnnnnnnnnnnnnnnnnnnnnnnnnnnnnnnnnnnnnnnnnnnnnnnnnnnnnnnnnnnnnnnnnnnnnnnnnnnnnnnnnnnnnnnnnnnnnnnnnnnnnnnnnnnnnnnnnnnnnnnnnnnnnnnnnnnnnnnnnnnnnnnnnnnnnnnnnnnnnnnnnnnnnnnnnnnnnnnnnnnnnnnnnnnnnnnnnnnnnnnnnnnnnnnnnnnnnnnnnnnnnnnnnnnnnnnnnnnnnnnnnnnnnnnnnnnnnnnnnnnnnnnnnnnnnnnnnnnnnnnnnnnnnnnnnnnnnnnnnnnnnnnnnnnnnnnnnnnnnnnnnnnnnnnnnnnnnnnnnnnnnnnnnnnnnnnnnnnnnnnnnnnnnnnnnnnnnnnnnnnnnnnnnnnnnnnnnnnnnnnnnnnnnnnnnnnnnnnnnnnnnnnnnnnnnnnnnnnnnnnnnnnnnnnnnnnnnnnnnnnnnnnnnnnnnnnnnnnnnnnnnnnnnnnnnnnnnnnnnnnnnnnnnnnnnnnnnnnnnnnnnnnnnnnnnnnnnnnnnnnnnnnnnnnnnnnnnnnnnnnnnnnnnnnnnnnnnnnnnnnnnnnnnnnnnnnnnnnnnnnnnnnnnnnnnnnnnnnnnnnnnnnnnnnnnnnnnnnnnnnnnnnnnnnnnnnnnnnnnnnnnnnnnnnnnnnnnnnnnnnnnnnnnnnnnnnnnnnnnnnnnnnnnnnnnnnnnnnnnnnnnnnnnnnnnnnnnnnnnnnnnnnnnnnnnnnnnnnnnnnnnnnnnnnnnnnnnnnnnnnnnnnnnnnnnnnnnnnnnnnnnnnnnnnnnnnnnnnnnnnnnnnnnnnnnnnnnnnnnnnnnnnnnnnnnnnnnnnnnnnnnnnnnnnnnnnnnnnnnnnnnnnnnnnnnnnnnnnnnnnnnnnnnnnnnnnnnnnnnnnnnnnnnnnnnnnnnnnnnnnnnnnnnnnnnnnnnnnnnnnnnnnnnnnnnnnnnnnnnnnnnnnnnnnnnnnnnnnnnnnnnnnnnnnnnnnnnnnnnnnnnnnnnnnnnnnnnnnnnnnnnnnnnnnnnnnnnnnnnnnnnnnnnnnnnnnnnnnnnnnnnnnnnnnnnnnnnnnnnnnnnnnnnnnnnnnnnnnnnnnnnnnnnnnnnnnnnnnnnnnnnnnnnnnnnnnnnnnnnnnnnnnnnnnnnnnnnnnnnnnnnnnnnnnnnnnnnnnnnnnnnnnnnnnnnnnnnnnnnnnnnnnnnnnnnnnnnnnnnnnnnnnnnnnnnnnnnnnnnnnnnnnnnnnnnnnnnnnnnnnnnnnnnnnnnnnnnnnnnnnnnnnnnnnnnnnnnnnnnnnnnnnnnnnnnnnnnnnnnnnnnnnnnnnnnnnnnnnnnnnnnnnnnnnnnnnnnnnnnnnnnnnnnnnnnnnnnnnnnnnnnnnnnnnnnnnnnnnnnnnnnnnnnnnnnnnnnnnnnnnnnnnnnnnnnnnnnnnnnnnnnnnnnnnnnnnnnnnnnnnnnnnnnnnnnnnnnnnnnnnnnnnnnnnnnnnnnnnnnnnnnnnnnnnnnnnnnnnnnnnnnnnnnnnnnnnnnnnnnnnnnnnnnnnnnnnnnnnnnnnnnnnnnnnnnnnnnnnnnnnnnnnnnnnnnnnnnnnnnnnnnnnnnnnnnnnnnnnnnnnnnnnnnnnnnnnnnnnnnnnnnnnnnnnnnnnnnnnnnnnnnnnnnnnnnnnnnnnnnnnnnnnnnnnnnnnnnnnnnnnnnnnnnnnnnnnnnnnnnnnnnnnnnnnnnnnnnnnnnnnnnnnnnnnnnnnnnnnnnnnnnnnnnnnnnnnnnnnnnnnnnnnnnnnnnnnnnnnnnnnnnnnnnnnnnnnnnnnnnnnnnnnnnnnnnnnnnnnnnnnnnnnnnnnnnnnnnnnnnnnnnnnnnnnnnnnnnnnnnnnnnnnnnnnnnnnnnnnnnnnnnnnnnnnnnnnnnnnnnnnnnnnnnnnnnnnnnnnnnnnnnnnnnnnnnnnnnnnnnnnnnnnnnnnnnnnnnnnnnnnnnnnnnnnnnnnnnnnnnnnnnnnnnnnnnnnnnnnnnnnnnnnnnnnnnnnnnnnnnnnnnnnnnnnnnnnnnnnnnnnnnnnnnnnnnnnnnnnnnnnnnnnnnnnnnnnnnnnnnnnnnnnnnnnnnnnnnnnnnnnnnnnnnnnnnnnnnnnnnnnnnnnnnnnnnnnnnnnnnnnnnnnnnnnnnnnnnnnnnnnnnnnnnnnnnnnnnnnnnnnnnnnnnnnnnnnnnnnnnnnnnnnnnnnnnnnnnnnnnnnnnnnnnnnnnnnnnnnnnnnnnnnnnnnnnnnnnnnnnnnnnnnnnnnnnnnnnnnnnnnnnnnnnnnnnnnnnnnnnnnnnnnnnnnnnnnnnnnnnnnnnnnnnnnnnnnnnnnnnnnnnnnnnnnnnnnnnnnnnnnnnnnnnnnnnnnnnnnnnnnnnnnnnnnnnnnnnnnnnnnnnnnnnnnnnnnnnnnnnnnnnnnnnnnnnnnnnnnnnnnnnnnnnnnnnnnnnnnnnnnnnnnnnnnnnnnnnnnnnnnnnnnnnnnnnnnnnnnnnnnnnnnnnnnnnnnnnnnnnnnnnnnnnnnnnnnnnnnnnnnnnnnnnnnnnnnnnnnnnnnnnnnnnnnnnnnnnnnnnnnnnnnnnnnnnnnnnnnnnnnnnnnnnnnnnnnnnnnnnnnnnnnnnnnnnnnnnnnnnnnnnnnnnnnnnnnnnnnnnnnnnnnnnnnnnnnnnnnnnnnnnnnnnnnnnnnnnnnnnnnnnnnnnnnnnnnnnnnnnnnnnnnnnnnnnnnnnnnnnnnnnnnnnnnnnnnnnnnnnnnnnnnnnnnnnnnnnnnnnnnnnnnnnnnnnnnnnnnnnnnnnnnnnnnnnnnnnnnnnnnnnnnnnnnnnnnnnnnnnnnnnnnnnnnnnnnnnnnnnnnnnnnnnnnnnnnnnnnnnnnnnnnnnnnnnnnnnnnnnnnnnnnnnnnnnnnnnnnnnnnnnnnnnnnnnnnnnnnnnnnnnnnnnnnnnnnnnnnnnnnnnnnnnnnnnnnnnnnnnnnnnnnnnnnnnnnnnnnnnnnnnnnnnnnnnnnnnnnnnnnnnnnnnnnnnnnnnnnnnnnnnnnnnnnnnnnnnnnnnnnnnnnnnnnnnnnnnnnnnnnnnnnnnnnnnnnnnnnnnnnnnnnnnnnnnnnnnnnnnnnnnnnnnnnnnnnnnnnnnnnnnnnnnnnnnnnnnnnnnnnnnnnnnnnnnnnnnnnnnnnnnnnnnnnnnnnnnnnnnnnnnnnnnnnnnnnnnnnnnnnnnnnnnnnnnnnnnnnnnnnnnnnnnnnnnnnnnnnnnnnnnnnnnnnnnnnnnnnnnnnnnnnnnnnnnnnnnnnnnnnnnnnnnnnnnnnnnnnnnnnnnnnnnnnnnnnnnnnnnnnnnnnnnnnnnnnnnnnnnnnnnnnnnnnnnnnnnnnnnnnnnnnnnnnnnnnnnnnnnnnnnnnnnnnnnnnnnnnnnnnnnnnnnnnnnnnnnnnnnnnnnnnnnnnnnnnnnnnnnnnnnnnnnnnnnnnnnnnnnnnnnnnnnnnnnnnnnnnnnnnnnnnnnnnnnnnnnnnnnnnnnnnnnnnnnnnnnnnnnnnnnnnnnnnnnnnnnnnnnnnnnnnnnnnnnnnnnnnnnnnnnnnnnnnnnnnnnnnnnnnnnnnnnnnnnnnnnnnnnnnnnnnnnnnnnnnnnnnnnnnnnnnnnnnnnnnnnnnnnnnnnnnnnnnnnnnnnnnnnnnnnnnnnnnnnnnnnnnnnnnnnnnnnnnnnnnnnnnnnnnnnnnnnnnnnnnnnnnnnnnnnnnnnnnnnnnnnnnnnnnnnnnnnnnnnnnnnnnnnnnnnnnnnnnnnnnnnnnnnnnnnnnnnnnnnnnnnnnnnnnnnnnnnnnnnnnnnnnnnnnnnnnnnnnnnnnnnnnnnnnnnnnnnnnnnnnnnnnnnnnnnnnnnnnnnnnnnnnnnnnnnnnnnnnnnnnnnnnnnnnnnnnnnnnnnnnnnnnnnnnnnnnnnnnnnnnnnnnnnnnnnnnnnnnnnnnnnnnnnnnnnnnnnnnnnnnnnnnnnnnnnnnnnnnnnnnnnnnnnnnnnnnnnnnnnnnnnnnnnnnnnnnnnnnnnnnnnnnnnnnnnnnnnnnnnnnnnnnnnnnnnnnnnnnnnnnnnnnnnnnnnnnnnnnnnnnnnnnnnnnnnnnnnnnnnnnnnnnnnnnnnnnnnnnnnnnnnnnnnnnnnnnnnnnnnnnnnnnnnnnnnnnnnnnnnnnnnnnnnnnnnnnnnnnnnnnnnnnnnnnnnnnnnnnnnnnnnnnnnnnnnnnnnnnnnnnnnnnnnnnnnnnnnnnnnnnnnnnnnnnnnnnnnnnnnnnnnnnnnnnnnnnnnnnnnnnnnnnnnnnnnnnnnnnnnnnnnnnnnnnnnnnnnnnnnnnnnnnnnnnnnnnnnnnnnnnnnnnnnnnnnnnnnnnnnnnnnnnnnnnnnnnnnnnnnnnnnnnnnnnnnnnnnnnnnnnnnnnnnnnnnnnnnnnnnnnnnnnnnnnnnnnnnnnnnnnnnnnnnnnnnnnnnnnnnnnnnnnnnnnnnnnnnnnnnnnnnnnnnnnnnnnnnnnnnnnnnnnnnnnnnnnnnnnnnnnnnnnnnnnnnnnnnnnnnnnnnnnnnnnnnnnnnnnnnnnnnnnnnnnnnnnnnnnnnnnnnnnnnnnnnnnnnnnnnnnnnnnnnnnnnnnnnnnnnnnnnnnnnnnnnnnnnnnnnnnnnnnnnnnnnnnnnnnnnnnnnnnnnnnnnnnnnnnnnnnnnnnnnnnnnnnnnnnnnnnnnnnnnnnnnnnnnnnnnnnnnnnnnnnnnnnnnnnnnnnnnnnnnnnnnnnnnnnnnnnnnnnnnnnnnnnnnnnnnnnnnnnnnnnnnnnnnnnnnnnnnnnnnnnnnnnnnnnnnnnnnnnnnnnnnnnnnnnnnnnnnnnnnnnnnnnnnnnnnnnnnnnnnnnnnnnnnnnnnnnnnnnnnnnnnnnnnnnnnnnnnnnnnnnnnnnnnnnnnnnnnnnnnnnnnnnnnnnnnnnnnnnnnnnnnnnnnnnnnnnnnnnnnnnnnnnnnnnnnnnnnnnnnnnnnnnnnnnnnnnnnnnnnnnnnnnnnnnnnnnnnnnnnnnnnnnnnnnnnnnnnnnnnnnnnnnnnnnnnnnnnnnnnnnnnnnnnnnnnnnnnnnnnnnnnnnnnnnnnnnnnnnnnnnnnnnnnnnnnnnnnnnnnnnnnnnnnnnnnnnnnnnnnnnnnnnnnnnnnnnnnnnnnnnnnnnnnnnnnnnnnnnnnnnnnnnnnnnnnnnnnnnnnnnnnnnnnnnnnnnnnnnnnnnnnnnnnnnnnnnnnnnnnnnnnnnnnnnnnnnnnnnnnnnnnnnnnnnnnnnnnnnnnnnnnnnnnnnnnnnnnnnnnnnnnnnnnnnnnnnnnnnnnnnnnnnnnnnnnnnnnnnnnnnnnnnnnnnnnnnnnnnnnnnnnnnnnnnnnnnnnnnnnnnnnnnnnnnnnnnnnnnnnnnnnnnnnnnnnnnnnnnnnnnnnnnnnnnnnnnnnnnnnnnnnnnnnnnnnnnnnnnnnnnnnnnnnnnnnnnnnnnnnnnnnnnnnnnnnnnnnnnnnnnnnnnnnnnnnnnnnnnnnnnnnnnnnnnnnnnnnnnnnnnnnnnnnnnnnnnnnnnnnnnnnnnnnnnnnnnnnnnnnnnnnnnnnnnnnnnnnnnnnnnnnnnnnnnnnnnnnnnnnnnnnnnnnnnnnnnnnnnnnnnnnnnnnnnnnnnnnnnnnnnnnnnnnnnnnnnnnnnnnnnnnnnnnnnnnnnnnnnnnnnnnnnnnnnnnnnnnnnnnnnnnnnnnnnnnnnnnnnnnnnnnnnnnnnnnnnnnnnnnnnnnnnnnnnnnnnnnnnnnnnnnnnnnnnnnnnnnnnnnnnnnnnnnnnnnnnnnnnnnnnnnnnnnnnnnnnnnnnnnnnnnnnnnnnnnnnnnnnnnnnnnnnnnnnnnnnnnnnnnnnnnnnnnnnnnnnnnnnnnnnnnnnnnnnnnnnnnnnnnnnnnnnnnnnnnnnnnnnnnnnnnnnnnnnnnnnnnnnnnnnnnnnnnnnnnnnnnnnnnnnnnnnnnnnnnnnnnnnnnnnnnnnnnnnnnnnnnnnnnnnnnnnnnnnnnnnnnnnnnnnnnnnnnnnnnnnnnnnnnnnnnnnnnnnnnnnnnnnnnnnnnnnnnnnnnnnnnnnnnnnnnnnnnnnnnnnnnnnnnnnnnnnnnnnnnnnnnnnnnnnnnnnnnnnnnnnnnnnnnnnnnnnnnnnnnnnnnnnnnnnnnnnnnnnnnnnnnnnnnnnnnnnnnnnnnnnnnnnnnnnnnnnnnnnnnnnnnnnnnnnnnnnnnnnnnnnnnnnnnnnnnnnnnnnnnnnnnnnnnnnnnnnnnnnnnnnnnnnnnnnnnnnnnnnnnnnnnnnnnnnnnnnnnnnnnnnnnnnnnnnnnnnnnnnnnnnnnnnnnnnnnnnnnnnnnnnnnnnnnnnnnnnnnnnnnnnnnnnnnnnnnnnnnnnnnnnnnnnnnnnnnnnnnnnnnnnnnnnnnnnnnnnnnnnnnnnnnnnnnnnnnnnnnnnnnnnnnnnnnnnnnnnnnnnnnnnnnnnnnnnnnnnnnnnnnnnnnnnnnnnnnnnnnnnnnnnnnnnnnnnnnnnnnnnnnnnnnnnnnnnnnnnnnnnnnnnnnnnnnnnnnnnnnnnnnnnnnnnnnnnnnnnnnnnnnnnnnnnnnnnnnnnnnnnnnnnnnnnnnnnnnnnnnnnnnnnnnnnnnnnnnnnnnnnnnnnnnnnnnnnnnnnnnnnnnnnnnnnnnnnnnnnnnnnnnnnnnnnnnnnnnnnnnnnnnnnnnnnnnnnnnnnnnnnnnnnnnnnnnnnnnnnnnnnnnnnnnnnnnnnnnnnnnnnnnnnnnnnnnnnnnnnnnnnnnnnnnnnnnnnnnnnnnnnnnnnnnnnnnnnnnnnnnnnnnnnnnnnnnnnnnnnnnnnnnnnnnnnnnnnnnnnnnnnnnnnnnnnnnnnnnnnnnnnnnnnnnnnnnnnnnnnnnnnnnnnnnnnnnnnnnnnnnnnnnnnnnnnnnnnnnnnnnnnnnnnnnnnnnnnnnnnnnnnnnnnnnnnnnnnnnnnnnnnnnnnnnnnnnnnnnnnnnnnnnnnnnnnnnnnnnnnnnnnnnnnnnnnnnnnnnnnnnnnnnnnnnnnnnnnnnnnnnnnnnnnnnnnnnnnnnnnnnnnnnnnnnnnnnnnnnnnnnnnnnnnnnnnnnnnnnnnnnnnnnnnnnnnnnnnnnnnnnnnnnnnnnnnnnnnnnnnnnnnnnnnnnnnnnnnnnnnnnnnnnnnnnnnnnnnnnnnnnnnnnnnnnnnnnnnnnnnnnnnnnnnnnnnnnnnnnnnnnnnnnnnnnnnnnnnnnnnnnnnnnnnnnnnnnnnnnnnnnnnnnnnnnnnnnnnnnnnnnnnnnnnnnnnnnnnnnnnnnnnnnnnnnnnnnnnnnnnnnnnnnnnnnnnnnnnnnnnnnnnnnnnnnnnnnnnnnnnnnnnnnnnnnnnnnnnnnnnnnnnnnnnnnnnnnnnnnnnnnnnnnnnnnnnnnnnnnnnnnnnnnnnnnnnnnnnnnnnnnnnnnnnnnnnnnnnnnnnnnnnnnnnnnnnnnnnnnnnnnnnnnnnnnnnnnnnnnnnnnnnnnnnnnnnnnnnnnnnnnnnnnnnnnnnnnnnnnnnnnnnnnnnnnnnnnnnnnnnnnnnnnnnnnnnnnnnnnnnnnnnnnnnnnnnnnnnnnnnnnnnnnnnnnnnnnnnnnnnnnnnnnnnnnnnnnnnnnnnnnnnnnnnnnnnnnnnnnnnnnnnnnnnnnnnnnnnnnnnnnnnnnnnnnnnnnnnnnnnnnnnnnnnnnnnnnnnnnnnnnnnnnnnnnnnnnnnnnnnnnnnnnnnnnnnnnnnnnnnnnnnnnnnnnnnnnnnnnnnnnnnnnnnnnnnnnnnnnnnnnnnnnnnnnnnnnnnnnnnnnnnnnnnnnnnnnnnnnnnnnnnnnnnnnnnnnnnnnnnnnnnnnnnnnnnnnnnnnnnnnnnnnnnnnnnnnnnnnnnnnnnnnnnnnnnnnnnnnnnnnnnnnnnnnnnnnnnnnnnnnnnnnnnnnnnnnnnnnnnnnnnnnnnnnnnnnnnnnnnnnnnnnnnnnnnnnnnnnnnnnnnnnnnnnnnnnnnnnnnnnnnnnnnnnnnnnnnnnnnnnnnnnnnnnnnnnnnnnnnnnnnnnnnnnnnnnnnnnnnnnnnnnnnnnnnnnnnnnnnnnnnnnnnnnnnnnnnnnnnnnnnnnnnnnnnnnnnnnnnnnnnnnnnnnnnnnnnnnnnnnnnnnnnnnnnnnnnnnnnnnnnnnnnnnnnnnnnnnnnnnnnnnnnnnnnnnnnnnnnnnnnnnnnnnnnnnnnnnnnnnnnnnnnnnnnnnnnnnnnnnnnnnnnnnnnnnnnnnnnnnnnnnnnnnnnnnnnnnnnnnnnnnnnnnnnnnnnnnnnnnnnnnnnnnnnnnnnnnnnnnnnnnnnnnnnnnnnnnnnnnnnnnnnnnnnnnnnnnnnnnnnnnnnnnnnnnnnnnnnnnnnnnnnnnnnnnnnnnnnnnnnnnnnnnnnnnnnnnnnnnnnnnnnnnnnnnnnnnnnnnnnnnnnnnnnnnnnnnnnnnnnnnnnnnnnnnnnnnnnnnnnnnnnnnnnnnnnnnnnnnnnnnnnnnnnnnnnnnnnnnnnnnnnnnnnnnnnnnnnnnnnnnnnnnnnnnnnnnnnnnnnnnnnnnnnnnnnnnnnnnnnnnnnnnnnnnnnnnnnnnnnnnnnnnnnnnnnnnnnnnnnnnnnnnnnnnnnnnnnnnnnnnnnnnnnnnnnnnnnnnnnnnnnnnnnnnnnnnnnnnnnnnnnnnnnnnnnnnnnnnnnnnnnnnnnnnnnnnnnnnnnnnnnnnnnnnnnnnnnnnnnnnnnnnnnnnnnnnnnnnnnnnnnnnnnnnnnnnnnnnnnnnnnnnnnnnnnnnnnnnnnnnnnnnnnnnnnnnnnnnnnnnnnnnnnnnnnnnnnnnnnnnnnnnnnnnnnnnnnnnnnnnnnnnnnnnnnnnnnnnnnnnnnnnnnnnnnnnnnnnnnnnnnnnnnnnnnnnnnnnnnnnnnnnnnnnnnnnnnnnnnnnnnnnnnnnnnnnnnnnnnnnnnnnnnnnnnnnnnnnnnnnnnnnnnnnnnnnnnnnnnnnnnnnnnnnnnnnnnnnnnnnnnnnnnnnnnnnnnnnnnnnnnnnnnnnnnnnnnnnnnnnnnnnnnnnnnnnnnnnnnnnnnnnnnnnnnnnnnnnnnnnnnnnnnnnnnnnnnnnnnnnnnnnnnnnnnnnnnnnnnnnnnnnnnnnnnnnnnnnnnnnnnnnnnnnnnnnnnnnnnnnnnnnnnnnnnnnnnnnnnnnnnnnnnnnnnnnnnnnnnnnnnnnnnnnnnnnnnnnnnnnnnnnnnnnnnnnnnnnnnnnnnnnnnnnnnnnnnnnnnnnnnnnnnnnnnnnnnnnnnnnnnnnnnnnnnnnnnnnnnnnnnnnnnnnnnnnnnnnnnnnnnnnnnnnnnnnnnnnnnnnnnnnnnnnnnnnnnnnnnnnnnnnnnnnnnnnnnnnnnnnnnnnnnnnnnnnnnnnnnnnnnnnnnnnnnnnnnnnnnnnnnnnnnnnnnnnnnnnnnnnnnnnnnnnnnnnnnnnnnnnnnnnnnnnnnnnnnnnnnnnnnnnnnnnnnnnnnnnnnnnnnnnnnnnnnnnnnnnnnnnnnnnnnnnnnnnnnnnnnnnnnnnnnnnnnnnnnnnnnnnnnnnnnnnnnnnnnnnnnnnnnnnnnnnnnnnnnnnnnnnnnnnnnnnnnnnnnnnnnnnnnnnnnnnnnnnnnnnnnnnnnnnnnnnnnnnnnnnnnnnnnnnnnnnnnnnnnnnnnnnnnnnnnnnnnnnnnnnnnnnnnnnnnnnnnnnnnnnnnnnnnnnnnnnnnnnnnnnnnnnnnnnnnnnnnnnnnnnnnnnnnnnnnnnnnnnnnnnnnnnnnnnnnnnnnnnnnnnnnnnnnnnnnnnnnnnnnnnnnnnnnnnnnnnnnnnnnnnnnnnnnnnnnnnnnnnnnnnnnnnnnnnnnnnnnnnnnnnnnnnnnnnnnnnnnnnnnnnnnnnnnnnnnnnnnnnnnnnnnnnnnnnnnnnnnnnnnnnnnnnnnnnnnnnnnnnnnnnnnnnnnnnnnnnnnnnnnnnnnnnnnnnnnnnnnnnnnnnnnnnnnnnnnnnnnnnnnnnnnnnnnnnnnnnnnnnnnnnnnnnnnnnnnnnnnnnnnnnnnnnnnnnnnnnnnnnnnnnnnnnnnnnnnnnnnnnnnnnnnnnnnnnnnnnnnnnnnnnnnnnnnnnnnnnnnnnnnnnnnnnnnnnnnnnnnnnnnnnnnnnnnnnnnnnnnnnnnnnnnnnnnnnnnnnnnnnnnnnnnnnnnnnnnnnnnnnnnnnnnnnnnnnnnnnnnnnnnnnnnnnnnnnnnnnnnnnnnnnnnnnnnnnnnnnnnnnnnnnnnnnnnnnnnnnnnnnnnnnnnnnnnnnnnnnnnnnnnnnnnnnnnnnnnnnnnnnnnnnnnnnnnnnnnnnnnnnnnnnnnnnnnnnnnnnnnnnnnnnnnnnnnnnnnnnnnnnnnnnnnnnnnnnnnnnnnnnnnnnnnnnnnnnnnnnnnnnnnnnnnnnnnnnnnnnnnnnnnnnnnnnnnnnnnnnnnnnnnnnnnnnnnnnnnnnnnnnnnnnnnnnnnnnnnnnnnnnnnnnnnnnnnnnnnnnnnnnnnnnnnnnnnnnnnnnnnnnnnnnnnnnnnnnnnnnnnnnnnnnnnnnnnnnnnnnnnnnnnnnnnnnnnnnnnnnnnnnnnnnnnnnnnnnnnnnnnnnnnnnnnnnnnnnnnnnnnnnnnnnnnnnnnnnnnnnnnnnnnnnnnnnnnnnnnnnnnnnnnnnnnnnnnnnnnnnnnnnnnnnnnnnnnnnnnnnnnnnnnnnnnnnnnnnnnnnnnnnnnnnnnnnnnnnnnnnnnnnnnnnnnnnnnnnnnnnnnnnnnnnnnnnnnnnnnnnnnnnnnnnnnnnnnnnnnnnnnnnnnnnnnnnnnnnnnnnnnnnnnnnnnnnnnnnnnnnnnnnnnnnnnnnnnnnnnnnnnnnnnnnnnnnnnnnnnnnnnnnnnnnnnnnnnnnnnnnnnnnnnnnnnnnnnnnnnnnnnnnnnnnnnnnnnnnnnnnnnnnnnnnnnnnnnnnnnnnnnnnnnnnnnnnnnnnnnnnnnnnnnnnnnnnnnnnnnnnnnnnnnnnnnnnnnnnnnnnnnnnnnnnnnnnnnnnnnnnnnnnnnnnnnnnnnnnnnnnnnnnnnnnnnnnnnnnnnnnnnnnnnnnnnnnnnnnnnnnnnnnnnnnnnnnnnnnnnnnnnnnnnnnnnnnnnnnnnnnnnnnnnnnnnnnnnnnnnnnnnnnnnnnnnnnnnnnnnnnnnnnnnnnnnnnnnnnnnnnnnnnnnnnnnnnnnnnnnnnnnnnnnnnnnnnnnnnnnnnnnnnnnnnnnnnnnnnnnnnnnnnnnnnnnnnnnnnnnnnnnnnnnnnnnnnnnnnnnnnnnnnnnnnnnnnnnnnnnnnnnnnnnnnnnnnnnnnnnnnnnnnnnnnnnnnnnnnnnnnnnnnnnnnnnnnnnnnnnnnnnnnnnnnnnnnnnnnnnnnnnnnnnnnnnnnnnnnnnnnnnnnnnnnnnnnnnnnnnnnnnnnnnnnnnnnnnnnnnnnnnnnnnnnnnnnnnnnnnnnnnnnnnnnnnnnnnnnnnnnnnnnnnnnnnnnnnnnnnnnnnnnnnnnnnnnnnnnnnnnnnnnnnnnnnnnnnnnnnnnnnnnnnnnnnnnnnnnnnnnnnnnnnnnnnnnnnnnnnnnnnnnnnnnnnnnnnnnnnnnnnnnnnnnnnnnnnnnnnnnnnnnnnnnnnnnnnnnnnnnnnnnnnnnnnnnnnnnnnnnnnnnnnnnnnnnnnnnnnnnnnnnnnnnnnnnnnnnnnnnnnnnnnnnnnnnnnnnnnnnnnnnnnnnnnnnnnnnnnnnnnnnnnnnnnnnnnnnnnnnnnnnnnnnnnnnnnnnnnnnnnnnnnnnnnnnnnnnnnnnnnnnnnnnnnnnnnnnnnnnnnnnnnnnnnnnnnnnnnnnnnnnnnnnnnnnnnnnnnnnnnnnnnnnnnnnnnnnnnnnnnnnnnnnnnnnnnnnnnnnnnnnnnnnnnnnnnnnnnnnnnnnnnnnnnnnnnnnnnnnnnnnnnnnnnnnnnnnnnnnnnnnnnnnnnnnnnnnnnnnnnnnnnnnnnnnnnnnnnnnnnnnnnnnnnnnnnnnnnnnnnnnnnnnnnnnnnnnnnnnnnnnnnnnnnnnnnnnnnnnnnnnnnnnnnnnnnnnnnnnnnnnnnnnnnnnnnnnnnnnnnnnnnnnnnnnnnnnnnnnnnnnnnnnnnnnnnnnnnnnnnnnnnnnnnnnnnnnnnnnnnnnnnnnnnnnnnnnnnnnnnnnnnnnnnnnnnnnnnnnnnnnnnnnnnnnnnnnnnnnnnnnnnnnnnnnnnnnnnnnnnnnnnnnnnnnnnnnnnnnnnnnnnnnnnnnnnnnnnnnnnnnnnnnnnnnnnnnnnnnnnnnnnnnnnnnnnnnnnnnnnnnnnnnnnnnnnnnnnnnnnnnnnnnnnnnnnnnnnnnnnnnnnnnnnnnnnnnnnnnnnnnnnnnnnnnnnnnnnnnnnnnnnnnnnnnnnnnnnnnnnnnnnnnnnnnnnnnnnnnnnnnnnnnnnnnnnnnnnnnnnnnnnnnnnnnnnnnnnnnnnnnnnnnnnnnnnnnnnnnnnnnnnnnnnnnnnnnnnnnnnnnnnnnnnnnnnnnnnnnnnnnnnnnnnnnnnnnnnnnnnnnnnnnnnnnnnnnnnnnnnnnnnnnnnnnnnnnnnnnnnnnnnnnnnnnnnnnnnnnnnnnnnnnnnnnnnnnnnnnnnnnnnnnnnnnnnnnnnnnnnnnnnnnnnnnnnnnnnnnnnnnnnnnnnnnnnnnnnnnnnnnnnnnnnnnnnnnnnnnnnnnnnnnnnnnnnnnnnnnnnnnnnnnnnnnnnnnnnnnnnnnnnnnnnnnnnnnnnnnnnnnnnnnnnnnnnnnnnnnnnnnnnnnnnnnnnnnnnnnnnnnnnnnnnnnnnnnnnnnnnnnnnnnnnnnnnnnnnnnnnnnnnnnnnnnnnnnnnnnnnnnnnnnnnnnnnnnnnnnnnnnnnnnnnnnnnnnnnnnnnnnnnnnnnnnnnnnnnnnnnnnnnnnnnnnnnnnnnnnnnnnnnnnnnnnnnnnnnnnnnnnnnnnnnnnnnnnnnnnnnnnnnnnnnnnnnnnnnnnnnnnnnnnnnnnnnnnnnnnnnnnnnnnnnnnnnnnnnnnnnnnnnnnnnnnnnnnnnnnnnnnnnnnnnnnnnnnnnnnnnnnnnnnnnnnnnnnnnnnnnnnnnnnnnnnnnnnnnnnnnnnnnnnnnnnnnnnnnnnnnnnnnnnnnnnnnnnnnnnnnnnnnnnnnnnnnnnnnnnnnnnnnnnnnnnnnnnnnnnnnnnnnnnnnnnnnnnnnnnnnnnnnnnnnnnnnnnnnnnnnnnnnnnnnnnnnnnnnnnnnnnnnnnnnnnnnnnnnnnnnnnnnnnnnnnnnnnnnnnnnnnnnnnnnnnnnnnnnnnnnnnnnnnnnnnnnnnnnnnnnnnnnnnnnnnnnnnnnnnnnnnnnnnnnnnnnnnnnnnnnnnnnnnnnnnnnnnnnnnnnnnnnnnnnnnnnnnnnnnnnnnnnnnnnnnnnnnnnnnnnnnnnnnnnnnnnnnnnnnnnnnnnnnnnnnnnnnnnnnnnnnnnnnnnnnnnnnnnnnnnnnnnnnnnnnnnnnnnnnnnnnnnnnnnnnnnnnnnnnnnnnnnnnnnnnnnnnnnnnnnnnnnnnnnnnnnnnnnnnnnnnnnnnnnnnnnnnnnnnnnnnnnnnnnnnnnnnnnnnnnnnnnnnnnnnnnnnnnnnnnnnnnnnnnnnnnnnnnnnnnnnnnnnnnnnnnnnnnnnnnnnnnnnnnnnnnnnnnnnnnnnnnnnnnnnnnnnnnnnnnnnnnnnnnnnnnnnnnnnnnnnnnnnnnnnnnnnnnnnnnnnnnnnnnnnnnnnnnnnnnnnnnnnnnnnnnnnnnnnnnnnnnnnnnnnnnnnnnnnnnnnnnnnnnnnnnnnnnnnnnnnnnnnnnnnnnnnnnnnnnnnnnnnnnnnnnnnnnnnnnnnnnnnnnnnnnnnnnnnnnnnnnnnnnnnnnnnnnnnnnnnnnnnnnnnnnnnnnnnnnnnnnnnnnnnnnnnnnnnnnnnnnnnnnnnnnnnnnnnnnnnnnnnnnnnnnnnnnnnnnnnnnnnnnnnnnnnnnnnnnnnnnnnnnnnnnnnnnnnnnnnnnnnnnnnnnnnnnnnnnnnnnnnnnnnnnnnnnnnnnnnnnnnnnnnnnnnnnnnnnnnnnnnnnnnnnnnnnnnnnnnnnnnnnnnnnnnnnnnnnnnnnnnnnnnnnnnnnnnnnnnnnnnnnnnnnnnnnnnnnnnnnnnnnnnnnnnnnnnnnnnnnnnnnnnnnnnnnnnnnnnnnnnnnnnnnnnnnnnnnnnnnnnnnnnnnnnnnnnnnnnnnnnnnnnnnnnnnnnnnnnnnnnnnnnnnnnnnnnnnnnnnnnnnnnnnnnnnnnnnnnnnnnnnnnnnnnnnnnnnnnnnnnnnnnnnnnnnnnnnnnnnnnnnnnnnnnnnnnnnnnnnnnnnnnnnnnnnnnnnnnnnnnnnnnnnnnnnnnnnnnnnnnnnnnnnnnnnnnnnnnnnnnnnnnnnnnnnnnnnnnnnnnnnnnnnnnnnnnnnnnnnnnnnnnnnnnnnnnnnnnnnnnnnnnnnnnnnnnnnnnnnnnnnnnnnnnnnnnnnnnnnnnnnnnnnnnnnnnnnnnnnnnnnnnnnnnnnnnnnnnnnnnnnnnnnnnnnnnnnnnnnnnnnnnnnnnnnnnnnnnnnnnnnnnnnnnnnnnnnnnnnnnnnnnnnnnnnnnnnnnnnnnnnnnnnnnnnnnnnnnnnnnnnnnnnnnnnnnnnnnnnnnnnnnnnnnnnnnnnnnnnnnnnnnnnnnnnnnnnnnnnnnnnnnnnnnnnnnnnnnnnnnnnnnnnnnnnnnnnnnnnnnnnnnnnnnnnnnnnnnnnnnnnnnnnnnnnnnnnnnnnnnnnnnnnnnnnnnnnnnnnnnnnnnnnnnnnnnnnnnnnnnnnnnnnnnnnnnnnnnnnnnnnnnnnnnnnnnnnnnnnnnnnnnnnnnnnnnnnnnnnnnnnnnnnnnnnnnnnnnnnnnnnnnnnnnnnnnnnnnnnnnnnnnnnnnnnnnnnnnnnnnnnnnnnnnnnnnnnnnnnnnnnnnnnnnnnnnnnnnnnnnnnnnnnnnnnnnnnnnnnnnnnnnnnnnnnnnnnnnnnnnnnnnnnnnnnnnnnnnnnnnnnnnnnnnnnnnnnnnnnnnnnnnnnnnnnnnnnnnnnnnnnnnnnnnnnnnnnnnnnnnnnnnnnnnnnnnnnnnnnnnnnnnnnnnnnnnnnnnnnnnnnnnnnnnnnnnnnnnnnnnnnnnnnnnnnnnnnnnnnnnnnnnnnnnnnnnnnnnnnnnnnnnnnnnnnnnnnnnnnnnnnnnnnnnnnnnnnnnnnnnnnnnnnnnnnnnnnnnnnnnnnnnnnnnnnnnnnnnnnnnnnnnnnnnnnnnnnnnnnnnnnnnnnnnnnnnnnnnnnnnnnnnnnnnnnnnnnnnnnnnnnnnnnnnnnnnnnnnnnnnnnnnnnnnnnnnnnnnnnnnnnnnnnnnnnnnnnnnnnnnnnnnnnnnnnnnnnnnnnnnnnnnnnnnnnnnnnnnnnnnnnnnnnnnnnnnnnnnnnnnnnnnnnnnnnnnnnnnnnnnnnnnnnnnnnnnnnnnnnnnnnnnnnnnnnnnnnnnnnnnnnnnnnnnnnnnnnnnnnnnnnnnnnnnnnnnnnnnnnnnnnnnnnnnnnnnnnnnnnnnnnnnnnnnnnnnnnnnnnnnnnnnnnnnnnnnnnnnnnnnnnnnnnnnnnnnnnnnnnnnnnnnnnnnnnnnnnnnnnnnnnnnnnnnnnnnnnnnnnnnnnnnnnnnnnnnnnnnnnnnnnnnnnnnnnnnnnnnnnnnnnnnnnnnnnnnnnnnnnnnnnnnnnnnnnnnnnnnnnnnnnnnnnnnnnnnnnnnnnnnnnnnnnnnnnnnnnnnnnnnnnnnnnnnnnnnnnnnnnnnnnnnnnnnnnnnnnnnnnnnnnnnnnnnnnnnnnnnnnnnnnnnnnnnnnnnnnnnnnnnnnnnnnnnnnnnnnnnnnnnnnnnnnnnnnnnnnnnnnnnnnnnnnnnnnnnnnnnnnnnnnnnnnnnnnnnnnnnnnnnnnnnnnnnnnnnnnnnnnnnnnnnnnnnnnnnnnnnnnnnnnnnnnnnnnnnnnnnnnnnnnnnnnnnnnnnnnnnnnnnnnnnnnnnnnnnnnnnnnnnnnnnnnnnnnnnnnnnnnnnnnnnnnnnnnnnnnnnnnnnnnnnnnnnnnnnnnnnnnnnnnnnnnnnnnnnnnnnnnnnnnnnnnnnnnnnnnnnnnnnnnnnnnnnnnnnnnnnnnnnnnnnnnnnnnnnnnnnnnnnnnnnnnnnnnnnnnnnnnnnnnnnnnnnnnnnnnnnnnnnnnnnnnnnnnnnnnnnnnnnnnnnnnnnnnnnnnnnnnnnnnnnnnnnnnnnnnnnnnnnnnnnnnnnnnnnnnnnnnnnnnnnnnnnnnnnnnnnnnnnnnnnnnnnnnnnnnnnnnnnnnnnnnnnnnnnnnnnnnnnnnnnnnnnnnnnnnnnnnnnnnnnnnnnnnnnnnnnnnnnnnnnnnnnnnnnnnnnnnnnnnnnnnnnnnnnnnnnnnnnnnnnnnnnnnnnnnnnnnnnnnnnnnnnnnnnnnnnnnnnnnnnnnnnnnnnnnnnnnnnnnnnnnnnnnnnnnnnnnnnnnnnnnnnnnnnnnnnnnnnnnnnnnnnnnnnnnnnnnnnnnnnnnnnnnnnnnnnnnnnnnnnnnnnnnnnnnnnnnnnnnnnnnnnnnnnnnnnnnnnnnnnnnnnnnnnnnnnnnnnnnnnnnnnnnnnnnnnnnnnnnnnnnnnnnnnnnnnnnnnnnnnnnnnnnnnnnnnnnnnnnnnnnnnnnnnnnnnnnnnnnnnnnnnnnnnnnnnnnnnnnnnnnnnnnnnnnnnnnnnnnnnnnnnnnnnnnnnnnnnnnnnnnnnnnnnnnnnnnnnnnnnnnnnnnnnnnnnnnnnnnnnnnnnnnnnnnnnnnnnnnnnnnnnnnnnnnnnnnnnnnnnnnnnnnnnnnnnnnnnnnnnnnnnnnnnnnnnnnnnnnnnnnnnnnnnnnnnnnnnnnnnnnnnnnnnnnnnnnnnnnnnnnnnnnnnnnnnnnnnnnnnnnnnnnnnnnnnnnnnnnnnnnnnnnnnnnnnnnnnnnnnnnnnnnnnnnnnnnnnnnnnnnnnnnnnnnnnnnnnnnnnnnnnnnnnnnnnnnnnnnnnnnnnnnnnnnnnnnnnnnnnnnnnnnnnnnnnnnnnnnnnnnnnnnnnnnnnnnnnnnnnnnnnnnnnnnnnnnnnnnnnnnnnnnnnnnnnnnnnnnnnnnnnnnnnnnnnnnnnnnnnnnnnnnnnnnnnnnnnnnnnnnnnnnnnnnnnnnnnnnnnnnnnnnnnnnnnnnnnnnnnnnnnnnnnnnnnnnnnnnnnnnnnnnnnnnnnnnnnnnnnnnnnnnnnnnnnnnnnnnnnnnnnnnnnnnnnnnnnnnnnnnnnnnnnnnnnnnnnnnnnnnnnnnnnnnnnnnnnnnnnnnnnnnnnnnnnnnnnnnnnnnnnnnnnnnnnnnnnnnnnnnnnnnnnnnnnnnnnnnnnnnnnnnnnnnnnnnnnnnnnnnnnnnnnnnnnnnnnnnnnnnnnnnnnnnnnnnnnnnnnnnnnnnnnnnnnnnnnnnnnnnnnnnnnnnnnnnnnnnnnnnnnnnnnnnnnnnnnnnnnnnnnnnnnnnnnnnnnnnnnnnnnnnnnnnnnnnnnnnnnnnnnnnnnnnnnnnnnnnnnnnnnnnnnnnnnnnnnnnnnnnnnnnnnnnnnnnnnnnnnnnnnnnnnnnnnnnnnnnnnnnnnnnnnnnnnnnnnnnnnnnnnnnnnnnnnnnnnnnnnnnnnnnnnnnnnnnnnnnnnnnnnnnnnnnnnnnnnnnnnnnnnnnnnnnnnnnnnnnnnnnnnnnnnnnnnnnnnnnnnnnnnnnnnnnnnnnnnnnnnnnnnnnnnnnnnnnnnnnnnnnnnnnnnnnnnnnnnnnnnnnnnnnnnnnnnnnnnnnnnnnnnnnnnnnnnnnnnnnnnnnnnnnnnnnnnnnnnnnnnnnnnnnnnnnnnnnnnnnnnnnnnnnnnnnnnnnnnnnnnnnnnnnnnnnnnnnnnnnnnnnnnnnnnnnnnnnnnnnnnnnnnnnnnnnnnnnnnnnnnnnnnnnnnnnnnnnnnnnnnnnnnnnnnnnnnnnnnnnnnnnnnnnnnnnnnnnnnnnnnnnnnnnnnnnnnnnnnnnnnnnnnnnnnnnnnnnnnnnnnnnnnnnnnnnnnnnnnnnnnnnnnnnnnnnnnnnnnnnnnnnnnnnnnnnnnnnnnnnnnnnnnnnnnnnnnnnnnnnnnnnnnnnnnnnnnnnnnnnnnnnnnnnnnnnnnnnnnnnnnnnnnnnnnnnnnnnnnnnnnnnnnnnnnnnnnnnnnnnnnnnnnnnnnnnnnnnnnnnnnnnnnnnnnnnnnnnnnnnnnnnnnnnnnnnnnnnnnnnnnnnnnnnnnnnnnnnnnnnnnnnnnnnnnnnnnnnnnnnnnnnnnnnnnnnnnnnnnnnnnnnnnnnnnnnnnnnnnnnnnnnnnnnnnnnnnnnnnnnnnnnnnnnnnnnnnnnnnnnnnnnnnnnnnnnnnnnnnnnnnnnnnnnnnnnnnnnnnnnnnnnnnnnnnnnnnnnnnnnnnnnnnnnnnnnnnnnnnnnnnnnnnnnnnnnnnnnnnnnnnnnnnnnnnnnnnnnnnnnnnnnnnnnnnnnnnnnnnnnnnnnnnnnnnnnnnnnnnnnnnnnnnnnnnnnnnnnnnnnnnnnnnnnnnnnnnnnnnnnnnnnnnnnnnnnnnnnnnnnnnnnnnnnnnnnnnnnnnnnnnnnnnnnnnnnnnnnnnnnnnnnnnnnnnnnnnnnnnnnnnnnnnnnnnnnnnnnnnnnnnnnnnnnnnnnnnnnnnnnnnnnnnnnnnnnnnnnnnnnnnnnnnnnnnnnnnnnnnnnnnnnnnnnnnnnnnnnnnnnnnnnnnnnnnnnnnnnnnnnnnnnnnnnnnnnnnnnnnnnnnnnnnnnnnnnnnnnnnnnnnnnnnnnnnnnnnnnnnnnnnnnnnnnnnnnnnnnnnnnnnnnnnnnnnnnnnnnnnnnnnnnnnnnnnnnnnnnnnnnnnnnnnnnnnnnnnnnnnnnnnnnnnnnnnnnnnnnnnnnnnnnnnnnnnnnnnnnnnnnnnnnnnnnnnnnnnnnnnnnnnnnnnnnnnnnnnnnnnnnnnnnnnnnnnnnnnnnnnnnnnnnnnnnnnnnnnnnnnnnnnnnnnnnnnnnnnnnnnnnnnnnnnnnnnnnnnnnnnnnnnnnnnnnnnnnnnnnnnnnnnnnnnnnnnnnnnnnnnnnnnnnnnnnnnnnnnnnnnnnnnnnnnnnnnnnnnnnnnnnnnnnnnnnnnnnnnnnnnnnnnnnnnnnnnnnnnnnnnnnnnnnnnnnnnnnnnnnnnnnnnnnnnnnnnnnnnnnnnnnnnnnnnnnnnnnnnnnnnnnnnnnnnnnnnnnnnnnnnnnnnnnnnnnnnnnnnnnnnnnnnnnnnnnnnnnnnnnnnnnnnnnnnnnnnnnnnnnnnnnnnnnnnnnnnnnnnnnnnnnnnnnnnnnnnnnnnnnnnnnnnnnnnnnnnnnnnnnnnnnnnnnnnnnnnnnnnnnnnnnnnnnnnnnnnnnnnnnnnnnnnnnnnnnnnnnnnnnnnnnnnnnnnnnnnnnnnnnnnnnnnnnnnnnnnnnnnnnnnnnnnnnnnnnnnnnnnnnnnnnnnnnnnnnnnnnnnnnnnnnnnnnnnnnnnnnnnnnnnnnnnnnnnnnnnnnnnnnnnnnnnnnnnnnnnnnnnnnnnnnnnnnnnnnnnnnnnnnnnnnnnnnnnnnnnnnnnnnnnnnnnnnnnnnnnnnnnnnnnnnnnnnnnnnnnnnnnnnnnnnnnnnnnnnnnnnnnnnnnnnnnnnnnnnnnnnnnnnnnnnnnnnnnnnnnnnnnnnnnnnnnnnnnnnnnnnnnnnnnnnnnnnnnnnnnnnnnnnnnnnnnnnnnnnnnnnnnnnnnnnnnnnnnnnnnnnnnnnnnnnnnnnnnnnnnnnnnnnnnnnnnnnnnnnnnnnnnnnnnnnnnnnnnnnnnnnnnnnnnnnnnnnnnnnnnnnnnnnnnnnnnnnnnnnnnnnnnnnnnnnnnnnnnnnnnnnnnnnnnnnnnnnnnnnnnnnnnnnnnnnnnnnnnnnnnnnnnnnnnnnnnnnnnnnnnnnnnnnnnnnnnnnnnnnnnnnnnnnnnnnnnnnnnnnnnnnnnnnnnnnnnnnnnnnnnnnnnnnnnnnnnnnnnnnnnnnnnnnnnnnnnnnnnnnnnnnnnnnnnnnnnnnnnnnnnnnnnnnnnnnnnnnnnnnnnnnnnnnnnnnnnnnnnnnnnnnnnnnnnnnnnnnnnnnnnnnnnnnnnnnnnnnnnnnnnnnnnnnnnnnnnnnnnnnnnnnnnnnnnnnnnnnnnnnnnnnnnnnnnnnnnnnnnnnnnnnnnnnnnnnnnnnnnnnnnnnnnnnnnnnnnnnnnnnnnnnnnnnnnnnnnnnnnnnnnnnnnnnnnnnnnnnnnnnnnnnnnnnnnnnnnnnnnnnnnnnnnnnnnnnnnnnnnnnnnnnnnnnnnnnnnnnnnnnnnnnnnnnnnnnnnnnnnnnnnnnnnnnnnnnnnnnnnnnnnnnnnnnnnnnnnnnnnnnnnnnnnnnnnnnnnnnnnnnnnnnnnnnnnnnnnnnnnnnnnnnnnnnnnnnnnnnnnnnnnnnnnnnnnnnnnnnnnnnnnnnnnnnnnnnnnnnnnnnnnnnnnnnnnnnnnnnnnnnnnnnnnnnnnnnnnnnnnnnnnnnnnnnnnnnnnnnnnnnnnnnnnnnnnnnnnnnnnnnnnnnnnnnnnnnnnnnnnnnnnnnnnnnnnnnnnnnnnnnnnnnnnnnnnnnnnnnnnnnnnnnnnnnnnnnnnnnnnnnnnnnnnnnnnnnnnnnnnnnnnnnnnnnnnnnnnnnnnnnnnnnnnnnnnnnnnnnnnnnnnnnnnnnnnnnnnnnnnnnnnnnnnnnnnnnnnnnnnnnnnnnnnnnnnnnnnnnnnnnnnnnnnnnnnnnnnnnnnnnnnnnnnnnnnnnnnnnnnnnnnnnnnnnnnnnnnnnnnnnnnnnnnnnnnnnnnnnnnnnnnnnnnnnnnnnnnnnnnnnnnnnnnnnnnnnnnnnnnnnnnnnnnnnnnnnnnnnnnnnnnnnnnnnnnnnnnnnnnnnnnnnnnnnnnnnnnnnnnnnnnnnnnnnnnnnnnnnnnnnnnnnnnnnnnnnnnnnnnnnnnnnnnnnnnnnnnnnnnnnnnnnnnnnnnnnnnnnnnnnnnnnnnnnnnnnnnnnnnnnnnnnnnnnnnnnnnnnnnnnnnnnnnnnnnnnnnnnnnnnnnnnnnnnnnnnnnnnnnnnnnnnnnnnnnnnnnnnnnnnnnnnnnnnnnnnnnnnnnnnnnnnnnnnnnnnnnnnnnnnnnnnnnnnnnnnnnnnnnnnnnnnnnnnnnnnnnnnnnnnnnnnnnnnnnnnnnnnnnnnnnnnnnnnnnnnnnnnnnnnnnnnnnnnnnnnnnnnnnnnnnnnnnnnnnnnnnnnnnnnnnnnnnnnnnnnnnnnnnnnnnnnnnnnnnnnnnnnnnnnnnnnnnnnnnnnnnnnnnnnnnnnnnnnnnnnnnnnnnnnnnnnnnnnnnnnnnnnnnnnnnnnnnnnnnnnnnnnnnnnnnnnnnnnnnnnnnnnnnnnnnnnnnnnnnnnnnnnnnnnnnnnnnnnnnnnnnnnnnnnnnnnnnnnnnnnnnnnnnnnnnnnnnnnnnnnnnnnnnnnnnnnnnnnnnnnnnnnnnnnnnnnnnnnnnnnnnnnnnnnnnnnnnnnnnnnnnnnnnnnnnnnnnnnnnnnnnnnnnnnnnnnnnnnnnnnnnnnnnnnnnnnnnnnnnnnnnnnnnnnnnnnnnnnnnnnnnnnnnnnnnnnnnnnnnnnnnnnnnnnnnnnnnnnnnnnnnnnnnnnnnnnnnnnnnnnnnnnnnnnnnnnnnnnnnnnnnnnnnnnnnnnnnnnnnnnnnnnnnnnnnnnnnnnnnnnnnnnnnnnnnnnnnnnnnnnnnnnnnnnnnnnnnnnnnnnnnnnnnnnnnnnnnnnnnnnnnnnnnnnnnnnnnnnnnnnnnnnnnnnnnnnnnnnnnnnnnnnnnnnnnnnnnnnnnnnnnnnnnnnnnnnnnnnnnnnnnnnnnnnnnnnnnnnnnnnnnnnnnnnnnnnnnnnnnnnnnnnnnnnnnnnnnnnnnnnnnnnnnnnnnnnnnnnnnnnnnnnnnnnnnnnnnnnnnnnnnnnnnnnnnnnnnnnnnnnnnnnnnnnnnnnnnnnnnnnnnnnnnnnnnnnnnnnnnnnnnnnnnnnnnnnnnnnnnnnnnnnnnnnnnnnnnnnnnnnnnnnnnnnnnnnnnnnnnnnnnnnnnnnnnnnnnnnnnnnnnnnnnnnnnnnnnnnnnnnnnnnnnnnnnnnnnnnnnnnnnnnnnnnnnnnnnnnnnnnnnnnnnnnnnnnnnnnnnnnnnnnnnnnnnnnnnnnnnnnnnnnnnnnnnnnnnnnnnnnnnnnnnnnnnnnnnnnnnnnnnnnnnnnnnnnnnnnnnnnnnnnnnnnnnnnnnnnnnnnnnnnnnnnnnnnnnnnnnnnnnnnnnnnnnnnnnnnnnnnnnnnnnnnnnnnnnnnnnnnnnnnnnnnnnnnnnnnnnnnnnnnnnnnnnnnnnnnnnnnnnnnnnnnnnnnnnnnnnnnnnnnnnnnnnnnnnnnnnnnnnnnnnnnnnnnnnnnnnnnnnnnnnnnnnnnnnnnnnnnnnnnnnnnnnnnnnnnnnnnnnnnnnnnnnnnnnnnnnnnnnnnnnnnnnnnnnnnnnnnnnnnnnnnnnnnnnnnnnnnnnnnnnnnnnnnnnnnnnnnnnnnnnnnnnnnnnnnnnnnnnnnnnnnnnnnnnnnnnnnnnnnnnnnnnnnnnnnnnnnnnnnnnnnnnnnnnnnnnnnnnnnnnnnnnnnnnnnnnnnnnnnnnnnnnnnnnnnnnnnnnnnnnnnnnnnnnnnnnnnnnnnnnnnnnnnnnnnnnnnnnnnnnnnnnnnnnnnnnnnnnnnnnnnnnnnnnnnnnnnnnnnnnnnnnnnnnnnnnnnnnnnnnnnnnnnnnnnnnnnnnnnnnnnnnnnnnnnnnnnnnnnnnnnnnnnnnnnnnnnnnnnnnnnnnnnnnnnnnnnnnnnnnnnnnnnnnnnnnnnnnnnnnnnnnnnnnnnnnnnnnnnnnnnnnnnnnnnnnnnnnnnnnnnnnnnnnnnnnnnnnnnnnnnnnnnnnnnnnnnnnnnnnnnnnnnnnnnnnnnnnnnnnnnnnnnnnnnnnnnnnnnnnnnnnnnnnnnnnnnnnnnnnnnnnnnnnnnnnnnnnnnnnnnnnnnnnnnnnnnnnnnnnnnnnnnnnnnnnnnnnnnnnnnnnnnnnnnnnnnnnnnnnnnnnnnnnnnnnnnnnnnnnnnnnnnnnnnnnnnnnnnnnnnnnnnnnnnnnnnnnnnnnnnnnnnnnnnnnnnnnnnnnnnnnnnnnnnnnnnnnnnnnnnnnnnnnnnnnnnnnnnnnnnnnnnnnnnnnnnnnnnnnnnnnnnnnnnnnnnnnnnnnnnnnnnnnnnnnnnnnnnnnnnnnnnnnnnnnnnnnnnnnnnnnnnnnnnnnnnnnnnnnnnnnnnnnnnnnnnnnnnnnnnnnnnnnnnnnnnnnnnnnnnnnnnnnnnnnnnnnnnnnnnnnnnnnnnnnnnnnnnnnnnnnnnnnnnnnnnnnnnnnnnnnnnnnnnnnnnnnnnnnnnnnnnnnnnnnnnnnnnnnnnnnnnnnnnnnnnnnnnnnnnnnnnnnnnnnnnnnnnnnnnnnnnnnnnnnnnnnnnnnnnnnnnnnnnnnnnnnnnnnnnnnnnnnnnnnnnnnnnnnnnnnnnnnnnnnnnnnnnnnnnnnnnnnnnnnnnnnnnnnnnnnnnnnnnnnnnnnnnnnnnnnnnnnnnnnnnnnnnnnnnnnnnnnnnnnnnnnnnnnnnnnnnnnnnnnnnnnnnnnnnnnnnnnnnnnnnnnnnnnnnnnnnnnnnnnnnnnnnnnnnnnnnnnnnnnnnnnnnnnnnnnnnnnnnnnnnnnnnnnnnnnnnnnnnnnnnnnnnnnnnnnnnnnnnnnnnnnnnnnnnnnnnnnnnnnnnnnnnnnnnnnnnnnnnnnnnnnnnnnnnnnnnnnnnnnnnnnnnnnnnnnnnnnnnnnnnnnnnnnnnnnnnnnnnnnnnnnnnnnnnnnnnnnnnnnnnnnnnnnnnnnnnnnnnnnnnnnnnnnnnnnnnnnnnnnnnnnnnnnnnnnnnnnnnnnnnnnnnnnnnnnnnnnnnnnnnnnnnnnnnnnnnnnnnnnnnnnnnnnnnnnnnnnnnnnnnnnnnnnnnnnnnnnnnnnnnnnnnnnnnnnnnnnnnnnnnnnnnnnnnnnnnnnnnnnnnnnnnnnnnnnnnnnnnnnnnnnnnnnnnnnnnnnnnnnnnnnnnnnnnnnnnnnnnnnnnnnnnnnnnnnnnnnnnnnnnnnnnnnnnnnnnnnnnnnnnnnnnnnnnnnnnnnnnnnnnnnnnnnnnnnnnnnnnnnnnnnnnnnnnnnnnnnnnnnnnnnnnnnnnnnnnnnnnnnnnnnnnnnnnnnnnnnnnnnnnnnnnnnnnnnnnnnnnnnnnnnnnnnnnnnnnnnnnnnnnnnnnnnnnnnnnnnnnnnnnnnnnnnnnnnnnnnnnnnnnnnnnnnnnnnnnnnnnnnnnnnnnnnnnnnnnnnnnnnnnnnnnnnnnnnnnnnnnnnnnnnnnnnnnnnnnnnnnnnnnnnnnnnnnnnnnnnnnnnnnnnnnnnnnnnnnnnnnnnnnnnnnnnnnnnnnnnnnnnnnnnnnnnnnnnnnnnnnnnnnnnnnnnnnnnnnnnnnnnnnnnnnnnnnnnnnnnnnnnnnnnnnnnnnnnnnnnnnnnnnnnnnnnnnnnnnnnnnnnnnnnnnnnnnnnnnnnnnnnnnnnnnnnnnnnnnnnnnnnnnnnnnnnnnnnnnnnnnnnnnnnnnnnnnnnnnnnnnnnnnnnnnnnnnnnnnnnnnnnnnnnnnnnnnnnnnnnnnnnnnnnnnnnnnnnnnnnnnnnnnnnnnnnnnnnnnnnnnnnnnnnnnnnnnnnnnnnnnnnnnnnnnnnnnnnnnnnnnnnnnnnnnnnnnnnnnnnnnnnnnnnnnnnnnnnnnnnnnnnnnnnnnnnnnnnnnnnnnnnnnnnnnnnnnnnnnnnnnnnnnnnnnnnnnnnnnnnnnnnnnnnnnnnnnnnnnnnnnnnnnnnnnnnnnnnnnnnnnnnnnnnnnnnnnnnnnnnnnnnnnnnnnnnnnnnnnnnnnnnnnnnnnnnnnnnnnnnnnnnnnnnnnnnnnnnnnnnnnnnnnnnnnnnnnnnnnnnnnnnnnnnnnnnnnnnnnnnnnnnnnnnnnnnnnnnnnnnnnnnnnnnnnnnnnnnnnnnnnnnnnnnnnnnnnnnnnnnnnnnnnnnnnnnnnnnnnnnnnnnnnnnnnnnnnnnnnnnnnnnnnnnnnnnnnnnnnnnnnnnnnnnnnnnnnnnnnnnnnnnnnnnnnnnnnnnnnnnnnnnnnnnnnnnnnnnnnnnnnnnnnnnnnnnnnnnnnnnnnnnnnnnnnnnnnnnnnnnnnnnnnnnnnnnnnnnnnnnnnnnnnnnnnnnnnnnnnnnnnnnnnnnnnnnnnnnnnnnnnnnnnnnnnnnnnnnnnnnnnnnnnnnnnnnnnnnnnnnnnnnnnnnnnnnnnnnnnnnnnnnnnnnnnnnnnnnnnnnnnnnnnnnnnnnnnnnnnnnnnnnnnnnnnnnnnnnnnnnnnnnnnnnnnnnnnnnnnnnnnnnnnnnnnnnnnnnnnnnnnnnnnnnnnnnnnnnnnnnnnnnnnnnnnnnnnnnnnnnnnnnnnnnnnnnnnnnnnnnnnnnnnnnnnnnnnnnnnnnnnnnnnnnnnnnnnnnnnnnnnnnnnnnnnnnnnnnnnnnnnnnnnnnnnnnnnnnnnnnnnnnnnnnnnnnnnnnnnnnnnnnnnnnnnnnnnnnnnnnnnnnnnnnnnnnnnnnnnnnnnnnnnnnnnnnnnnnnnnnnnnnnnnnnnnnnnnnnnnnnnnnnnnnnnnnnnnnnnnnnnnnnnnnnnnnnnnnnnnnnnnnnnnnnnnnnnnnnnnnnnnnnnnnnnnnnnnnnnnnnnnnnnnnnnnnnnnnnnnnnnnnnnnnnnnnnnnnnnnnnnnnnnnnnnnnnnnnnnnnnnnnnnnnnnnnnnnnnnnnnnnnnnnnnnnnnnnnnnnnnnnnnnnnnnnnnnnnnnnnnnnnnnnnnnnnnnnnnnnnnnnnnnnnnnnnnnnnnnnnnnnnnnnnnnnnnnnnnnnnnnnnnnnnnnnnnnnnnnnnnnnnnnnnnnnnnnnnnnnnnnnnnnnnnnnnnnnnnnnnnnnnnnnnnnnnnnnnnnnnnnnnnnnnnnnnnnnnnnnnnnnnnnnnnnnnnnnnnnnnnnnnnnnnnnnnnnnnnnnnnnnnnnnnnnnnnnnnnnnnnnnnnnnnnnnnnnnnnnnnnnnnnnnnnnnnnnnnnnnnnnnnnnnnnnnnnnnnnnnnnnnnnnnnnnnnnnnnnnnnnnnnnnnnnnnnnnnnnnnnnnnnnnnnnnnnnnnnnnnnnnnnnnnnnnnnnnnnnnnnnnnnnnnnnnnnnnnnnnnnnnnnnnnnnnnnnnnnnnnnnnnnnnnnnnnnnnnnnnnnnnnnnnnnnnnnnnnnnnnnnnnnnnnnnnnnnnnnnnnnnnnnnnnnnnnnnnnnnnnnnnnnnnnnnnnnnnnnnnnnnnnnnnnnnnnnnnnnnnnnnnnnnnnnnnnnnnnnnnnnnnnnnnnnnnnnnnnnnnnnnnnnnnnnnnnnnnnnnnnnnnnnnnnnnnnnnnnnnnnnnnnnnnnnnnnnnnnnnnnnnnnnnnnnnnnnnnnnnnnnnnnnnnnnnnnnnnnnnnnnnnnnnnnnnnnnnnnnnnnnnnnnnnnnnnnnnnnnnnnnnnnnnnnnnnnnnnnnnnnnnnnnnnnnnnnnnnnnnnnnnnnnnnnnnnnnnnnnnnnnnnnnnnnnnnnnnnnnnnnnnnnnnnnnnnnnnnnnnnnnnnnnnnnnnnnnnnnnnnnnnnnnnnnnnnnnnnnnnnnnnnnnnnnnnnnnnnnnnnnnnnnnnnnnnnnnnnnnnnnnnnnnnnnnnnnnnnnnnnnnnnnnnnnnnnnnnnnnnnnnnnnnnnnnnnnnnnnnnnnnnnnnnnnnnnnnnnnnnnnnnnnnnnnnnnnnnnnnnnnnnnnnnnnnnnnnnnnnnnnnnnnnnnnnnnnnnnnnnnnnnnnnnnnnnnnnnnnnnnnnnnnnnnnnnnnnnnnnnnnnnnnnnnnnnnnnnnnnnnnnnnnnnnnnnnnnnnnnnnnnnnnnnnnnnnnnnnnnnnnnnnnnnnnnnnnnnnnnnnnnnnnnnnnnnnnnnnnnnnnnnnnnnnnnnnnnnnnnnnnnnnnnnnnnnnnnnnnnnnnnnnnnnnnnnnnnnnnnnnnnnnnnnnnnnnnnnnnnnnnnnnnnnnnnnnnnnnnnnnnnnnnnnnnnnnnnnnnnnnnnnnnnnnnnnnnnnnnnnnnnnnnnnnnnnnnnnnnnnnnnnnnnnnnnnnnnnnnnnnnnnnnnnnnnnnnnnnnnnnnnnnnnnnnnnnnnnnnnnnnnnnnnnnnnnnnnnnnnnnnnnnnnnnnnnnnnnnnnnnnnnnnnnnnnnnnnnnnnnnnnnnnnnnnnnnnnnnnnnnnnnnnnnnnnnnnnnnnnnnnnnnnnnnnnnnnnnnnnnnnnnnnnnnnnnnnnnnnnnnnnnnnnnnnnnnnnnnnnnnnnnnnnnnnnnnnnnnnnnnnnnnnnnnnnnnnnnnnnnnnnnnnnnnnnnnnnnnnnnnnnnnnnnnnnnnnnnnnnnnnnnnnnnnnnnnnnnnnnnnnnnnnnnnnnnnnnnnnnnnnnnnnnnnnnnnnnnnnnnnnnnnnnnnnnnnnnnnnnnnnnnnnnnnnnnnnnnnnnnnnnnnnnnnnnnnnnnnnnnnnnnnnnnnnnnnnnnnnnnnnnnnnnnnnnnnnnnnnnnnnnnnnnnnnnnnnnnnnnnnnnnnnnnnnnnnnnnnnnnnnnnnnnnnnnnnnnnnnnnnnnnnnnnnnnnnnnnnnnnnnnnnnnnnnnnnnnnnnnnnnnnnnnnnnnnnnnnnnnnnnnnnnnnnnnnnnnnnnnnnnnnnnnnnnnnnnnnnnnnnnnnnnnnnnnnnnnnnnnnnnnnnnnnnnnnnnnnnnnnnnnnnnnnnnnnnnnnnnnnnnnnnnnnnnnnnnnnnnnnnnnnnnnnnnnnnnnnnnnnnnnnnnnnnnnnnnnnnnnnnnnnnnnnnnnnnnnnnnnnnnnnnnnnnnnnnnnnnnnnnnnnnnnnnnnnnnnnnnnnnnnnnnnnnnnnnnnnnnnnnnnnnnnnnnnnnnnnnnnnnnnnnnnnnnnnnnnnnnnnnnnnnnnnnnnnnnnnnnnnnnnnnnnnnnnnnnnnnnnnnnnnnnnnnnnnnnnnnnnnnnnnnnnnnnnnnnnnnnnnnnnnnnnnnnnnnnnnnnnnnnnnnnnnnnnnnnnnnnnnnnnnnnnnnnnnnnnnnnnnnnnnnnnnnnnnnnnnnnnnnnnnnnnnnnnnnnnnnnnnnnnnnnnnnnnnnnnnnnnnnnnnnnnnnnnnnnnnnnnnnnnnnnnnnnnnnnnnnnnnnnnnnnnnnnnnnnnnnnnnnnnnnnnnnnnnnnnnnnnnnnnnnnnnnnnnnnnnnnnnnnnnnnnnnnnnnnnnnnnnnnnnnnnnnnnnnnnnnnnnnnnnnnnnnnnnnnnnnnnnnnnnnnnnnnnnnnnnnnnnnnnnnnnnnnnnnnnnnnnnnnnnnnnnnnnnnnnnnnnnnnnnnnnnnnnnnnnnnnnnnnnnnnnnnnnnnnnnnnnnnnnnnnnnnnnnnnnnnnnnnnnnnnnnnnnnnnnnnnnnnnnnnnnnnnnnnnnnnnnnnnnnnnnnnnnnnnnnnnnnnnnnnnnnnnnnnnnnnnnnnnnnnnnnnnnnnnnnnnnnnnnnnnnnnnnnnnnnnnnnnnnnnnnnnnnnnnnnnnnnnnnnnnnnnnnnnnnnnnnnnnnnnnnnnnnnnnnnnnnnnnnnnnnnnnnnnnnnnnnnnnnnnnnnnnnnnnnnnnnnnnnnnnnnnnnnnnnnnnnnnnnnnnnnnnnnnnnnnnnnnnnnnnnnnnnnnnnnnnnnnnnnnnnnnnnnnnnnnnnnnnnnnnnnnnnnnnnnnnnnnnnnnnnnnnnnnnnnnnnnnnnnnnnnnnnnnnnnnnnnnnnnnnnnnnnnnnnnnnnnnnnnnnnnnnnnnnnnnnnnnnnnnnnnnnnnnnnnnnnnnnnnnnnnnnnnnnnnnnnnnnnnnnnnnnnnnnnnnnnnnnnnnnnnnnnnnnnnnnnnnnnnnnnnnnnnnnnnnnnnnnnnnnnnnnnnnnnnnnnnnnnnnnnnnnnnnnnnnnnnnnnnnnnnnnnnnnnnnnnnnnnnnnnnnnnnnnnnnnnnnnnnnnnnnnnnnnnnnnnnnnnnnnnnnnnnnnnnnnnnnnnnnnnnnnnnnnnnnnnnnnnnnnnnnnnnnnnnnnnnnnnnnnnnnnnnnnnnnnnnnnnnnnnnnnnnnnnnnnnnnnnnnnnnnnnnnnnnnnnnnnnnnnnnnnnnnnnnnnnnnnnnnnnnnnnnnnnnnnnnnnnnnnnnnnnnnnnnnnnnnnnnnnnnnnnnnnnnnnnnnnnnnnnnnnnnnnnnnnnnnnnnnnnnnnnnnnnnnnnnnnnnnnnnnnnnnnnnnnnnnnnnnnnnnnnnnnnnnnnnnnnnnnnnnnnnnnnnnnnnnnnnnnnnnnnnnnnnnnnnnnnnnnnnnnnnnnnnnnnnnnnnnnnnnnnnnnnnnnnnnnnnnnnnnnnnnnnnnnnnnnnnnnnnnnnnnnnnnnnnnnnnnnnnnnnnnnnnnnnnnnnnnnnnnnnnnnnnnnnnnnnnnnnnnnnnnnnnnnnnnnnnnnnnnnnnnnnnnnnnnnnnnnnnnnnnnnnnnnnnnnnnnnnnnnnnnnnnnnnnnnnnnnnnnnnnnnnnnnnnnnnnnnnnnnnnnnnnnnnnnnnnnnnnnnnnnnnnnnnnnnnnnnnnnnnnnnnnnnnnnnnnnnnnnnnnnnnnnnnnnnnnnnnnnnnnnnnnnnnnnnnnnnnnnnnnnnnnnnnnnnnnnnnnnnnnnnnnnnnnnnnnnnnnnnnnnnnnnnnnnnnnnnnnnnnnnnnnnnnnnnnnnnnnnnnnnnnnnnnnnnnnnnnnnnnnnnnnnnnnnnnnnnnnnnnnnnnnnnnnnnnnnnnnnnnnnnnnnnnnnnnnnnnnnnnnnnnnnnnnnnnnnnnnnnnnnnnnnnnnnnnnnnnnnnnnnnnnnnnnnnnnnnnnnnnnnnnnnnnnnnnnnnnnnnnnnnnnnnnnnnnnnnnnnnnnnnnnnnnnnnnnnnnnnnnnnnnnnnnnnnnnnnnnnnnnnnnnnnnnnnnnnnnnnnnnnnnnnnnnnnnnnnnnnnnnnnnnnnnnnnnnnnnnnnnnnnnnnnnnnnnnnnnnnnnnnnnnnnnnnnnnnnnnnnnnnnnnnnnnnnnnnnnnnnnnnnnnnnnnnnnnnnnnnnnnnnnnnnnnnnnnnnnnnnnnnnnnnnnnnnnnnnnnnnnnnnnnnnnnnnnnnnnnnnnnnnnnnnnnnnnnnnnnnnnnnnnnnnnnnnnnnnnnnnnnnnnnnnnnnnnnnnnnnnnnnnnnnnnnnnnnnnnnnnnnnnnnnnnnnnnnnnnnnnnnnnnnnnnnnnnnnnnnnnnnnnnnnnnnnnnnnnnnnnnnnnnnnnnnnnnnnnnnnnnnnnnnnnnnnnnnnnnnnnnnnnnnnnnnnnnnnnnnnnnnnnnnnnnnnnnnnnnnnnnnnnnnnnnnnnnnnnnnnnnnnnnnnnnnnnnnnnnnnnnnnnnnnnnnnnnnnnnnnnnnnnnnnnnnnnnnnnnnnnnnnnnnnnnnnnnnnnnnnnnnnnnnnnnnnnnnnnnnnnnnnnnnnnnnnnnnnnnnnnnnnnnnnnnnnnnnnnnnnnnnnnnnnnnnnnnnnnnnnnnnnnnnnnnnnnnnnnnnnnnnnnnnnnnnnnnnnnnnnnnnnnnnnnnnnnnnnnnnnnnnnnnnnnnnnnnnnnnnnnnnnnnnnnnnnnnnnnnnnnnnnnnnnnnnnnnnnnnnnnnnnnnnnnnnnnnnnnnnnnnnnnnnnnnnnnnnnnnnnnnnnnnnnnnnnnnnnnnnnnnnnnnnnnnnnnnnnnnnnnnnnnnnnnnnnnnnnnnnnnnnnnnnnnnnnnnnnnnnnnnnnnnnnnnnnnnnnnnnnnnnnnnnnnnnnnnnnnnnnnnnnnnnnnnnnnnnnnnnnnnnnnnnnnnnnnnnnnnnnnnnnnnnnnnnnnnnnnnnnnnnnnnnnnnnnnnnnnnnnnnnnnnnnnnnnnnnnnnnnnnnnnnnnnnnnnnnnnnnnnnnnnnnnnnnnnnnnnnnnnnnnnnnnnnnnnnnnnnnnnnnnnnnnnnnnnnnnnnnnnnnnnnnnnnnnnnnnnnnnnnnnnnnnnnnnnnnnnnnnnnnnnnnnnnnnnnnnnnnnnnnnnnnnnnnnnnnnnnnnnnnnnnnnnnnnnnnnnnnnnnnnnnnnnnnnnnnnnnnnnnnnnnnnnnnnnnnnnnnnnnnnnnnnnnnnnnnnnnnnnnnnnnnnnnnnnnnnnnnnnnnnnnnnnnnnnnnnnnnnnnnnnnnnnnnnnnnnnnnnnnnnnnnnnnnnnnnnnnnnnnnnnnnnnnnnnnnnnnnnnnnnnnnnnnnnnnnnnnnnnnnnnnnnnnnnnnnnnnnnnnnnnnnnnnnnnnnnnnnnnnnnnnnnnnnnnnnnnnnnnnnnnnnnnnnnnnnnnnnnnnnnnnnnnnnnnnnnnnnnnnnnnnnnnnnnnnnnnnnnnnnnnnnnnnnnnnnnnnnnnnnnnnnnnnnnnnnnnnnnnnnnnnnnnnnnnnnnnnnnnnnnnnnnnnnnnnnnnnnnnnnnnnnnnnnnnnnnnnnnnnnnnnnnnnnnnnnnnnnnnnnnnnnnnnnnnnnnnnnnnnnnnnnnnnnnnnnnnnnnnnnnnnnnnnnnnnnnnnnnnnnnnnnnnnnnnnnnnnnnnnnnnnnnnnnnnnnnnnnnnnnnnnnnnnnnnnnnnnnnnnnnnnnnnnnnnnnnnnnnnnnnnnnnnnnnnnnnnnnnnnnnnnnnnnnnnnnnnnnnnnnnnnnnnnnnnnnnnnnnnnnnnnnnnnnnnnnnnnnnnnnnnnnnnnnnnnnnnnnnnnnnnnnnnnnnnnnnnnnnnnnnnnnnnnnnnnnnnnnnnnnnnnnnnnnnnnnnnnnnnnnnnnnnnnnnnnnnnnnnnnnnnnnnnnnnnnnnnnnnnnnnnnnnnnnnnnnnnnnnnnnnnnnnnnnnnnnnnnnnnnnnnnnnnnnnnnnnnnnnnnnnnnnnnnnnnnnnnnnnnnnnnnnnnnnnnnnnnnnnnnnnnnnnnnnnnnnnnnnnnnnnnnnnnnnnnnnnnnnnnnnnnnnnnnnnnnnnnnnnnnnnnnnnnnnnnnnnnnnnnnnnnnnnnnnnnnnnnnnnnnnnnnnnnnnnnnnnnnnnnnnnnnnnnnnnnnnnnnnnnnnnnnnnnnnnnnnnnnnnnnnnnnnnnnnnnnnnnnnnnnnnnnnnnnnnnnnnnnnnnnnnnnnnnnnnnnnnnnnnnnnnnnnnnnnnnnnnnnnnnnnnnnnnnnnnnnnnnnnnnnnnnnnnnnnnnnnnnnnnnnnnnnnnnnnnnnnnnnnnnnnnnnnnnnnnnnnnnnnnnnnnnnnnnnnnnnnnnnnnnnnnnnnnnnnnnnnnnnnnnnnnnnnnnnnnnnnnnnnnnnnnnnnnnnnnnnnnnnnnnnnnnnnnnnnnnnnnnnnnnnnnnnnnnnnnnnnnnnnnnnnnnnnnnnnnnnnnnnnnnnnnnnnnnnnnnnnnnnnnnnnnnnnnnnnnnnnnnnnnnnnnnnnnnnnnnnnnnnnnnnnnnnnnnnnnnnnnnnnnnnnnnnnnnnnnnnnnnnnnnnnnnnnnnnnnnnnnnnnnnnnnnnnnnnnnnnnnnnnnnnnnnnnnnnnnnnnnnnnnnnnnnnnnnnnnnnnnnnnnnnnnnnnnnnnnnnnnnnnnnnnnnnnnnnnnnnnnnnnnnnnnnnnnnnnnnnnnnnnnnnnnnnnnnnnnnnnnnnnnnnnnnnnnnnnnnnnnnnnnnnnnnnnnnnnnnnnnnnnnnnnnnnnnnnnnnnnnnnnnnnnnnnnnnnnnnnnnnnnnnnnnnnnnnnnnnnnnnnnnnnnnnnnnnnnnnnnnnnnnnnnnnnnnnnnnnnnnnnnnnnnnnnnnnnnnnnnnnnnnnnnnnnnnnnnnnnnnnnnnnnnnnnnnnnnnnnnnnnnnnnnnnnnnnnnnnnnnnnnnnnnnnnnnnnnnnnnnnnnnnnnnnnnnnnnnnnnnnnnnnnnnnnnnnnnnnnnnnnnnnnnnnnnnnnnnnnnnnnnnnnnnnnnnnnnnnnnnnnnnnnnnnnnnnnnnnnnnnnnnnnnnnnnnnnnnnnnnnnnnnnnnnnnnnnnnnnnnnnnnnnnnnnnnnnnnnnnnnnnnnnnnnnnnnnnnnnnnnnnnnnnnnnnnnnnnnnnnnnnnnnnnnnnnnnnnnnnnnnnnnnnnnnnnnnnnnnnnnnnnnnnnnnnnnnnnnnnnnnnnnnnnnnnnnnnnnnnnnnnnnnnnnnnnnnnnnnnnnnnnnnnnnnnnnnnnnnnnnnnnnnnnnnnnnnnnnnnnnnnnnnnnnnnnnnnnnnnnnnnnnnnnnnnnnnnnnnnnnnnnnnnnnnnnnnnnnnnnnnnnnnnnnnnnnnnnnnnnnnnnnnnnnnnnnnnnnnnnnnnnnnnnnnnnnnnnnnnnnnnnnnnnnnnnnnnnnnnnnnnnnnnnnnnnnnnnnnnnnnnnnnnnnnnnnnnnnnnnnnnnnnnnnnnnnnnnnnnnnnnnnnnnnnnnnnnnnnnnnnnnnnnnnnnnnnnnnnnnnnnnnnnnnnnnnnnnnnnnnnnnnnnnnnnnnnnnnnnnnnnnnnnnnnnnnnnnnnnnnnnnnnnnnnnnnnnnnnnnnnnnnnnnnnnnnnnnnnnnnnnnnnnnnnnnnnnnnnnnnnnnnnnnnnnnnnnnnnnnnnnnnnnnnnnnnnnnnnnnnnnnnnnnnnnnnnnnnnnnnnnnnnnnnnnnnnnnnnnnnnnnnnnnnnnnnnnnnnnnnnnnnnnnnnnnnnnnnnnnnnnnnnnnnnnnnnnnnnnnnnnnnnnnnnnnnnnnnnnnnnnnnnnnnnnnnnnnnnnnnnnnnnnnnnnnnnnnnnnnnnnnnnnnnnnnnnnnnnnnnnnnnnnnnnnnnnnnnnnnnnnnnnnnnnnnnnnnnnnnnnnnnnnnnnnnnnnnnnnnnnnnnnnnnnnnnnnnnnnnnnnnnnnnnnnnnnnnnnnnnnnnnnnnnnnnnnnnnnnnnnnnnnnnnnnnnnnnnnnnnnnnnnnnnnnnnnnnnnnnnnnnnnnnnnnnnnnnnnnnnnnnnnnnnnnnnnnnnnnnnnnnnnnnnnnnnnnnnnnnnnnnnnnnnnnnnnnnnnnnnnnnnnnnnnnnnnnnnnnnnnnnnnnnnnnnnnnnnnnnnnnnnnnnnnnnnnnnnnnnnnnnnnnnnnnnnnnnnnnnnnnnnnnnnnnnnnnnnnnnnnnnnnnnnnnnnnnnnnnnnnnnnnnnnnnnnnnnnnnnnnnnnnnnnnnnnnnnnnnnnnnnnnnnnnnnnnnnnnnnnnnnnnnnnnnnnnnnnnnnnnnnnnnnnnnnnnnnnnnnnnnnnnnnnnnnnnnnnnnnnnnnnnnnnnnnnnnnnnnnnnnnnnnnnnnnnnnnnnnnnnnnnnnnnnnnnnnnnnnnnnnnnnnnnnnnnnnnnnnnnnnnnnnnnnnnnnnnnnnnnnnnnnnnnnnnnnnnnnnnnnnnnnnnnnnnnnnnnnnnnnnnnnnnnnnnnnnnnnnnnnnnnnnnnnnnnnnnnnnnnnnnnnnnnnnnnnnnnnnnnnnnnnnnnnnnnnnnnnnnnnnnnnnnnnnnnnnnnnnnnnnnnnnnnnnnnnnnnnnnnnnnnnnnnnnnnnnnnnnnnnnnnnnnnnnnnnnnnnnnnnnnnnnnnnnnnnnnnnnnnnnnnnnnnnnnnnnnnnnnnnnnnnnnnnnnnnnnnnnnnnnnnnnnnnnnnnnnnnnnnnnnnnnnnnnnnnnnnnnnnnnnnnnnnnnnnnnnnnnnnnnnnnnnnnnnnnnnnnnnnnnnnnnnnnnnnnnnnnnnnnnnnnnnnnnnnnnnnnnnnnnnnnnnnnnnnnnnnnnnnnnnnnnnnnnnnnnnnnnnnnnnnnnnnnnnnnnnnnnnnnnnnnnnnnnnnnnnnnnnnnnnnnnnnnnnnnnnnnnnnnnnnnnnnnnnnnnnnnnnnnnnnnnnnnnnnnnnnnnnnnnnnnnnnnnnnnnnnnnnnnnnnnnnnnnnnnnnnnnnnnnnnnnnnnnnnnnnnnnnnnnnnnnnnnnnnnnnnnnnnnnnnnnnnnnnnnnnnnnnnnnnnnnnnnnnnnnnnnnnnnnnnnnnnnnnnnnnnnnnnnnnnnnnnnnnnnnnnnnnnnnnnnnnnnnnnnnnnnnnnnnnnnnnnnnnnnnnnnnnnnnnnnnnnnnnnnnnnnnnnnnnnnnnnnnnnnnnnnnnnnnnnnnnnnnnnnnnnnnnnnnnnnnnnnnnnnnnnnnnnnnnnnnnnnnnnnnnnnnnnnnnnnnnnnnnnnnnnnnnnnnnnnnnnnnnnnnnnnnnnnnnnnnnnnnnnnnnnnnnnnnnnnnnnnnnnnnnnnnnnnnnnnnnnnnnnnnnnnnnnnnnnnnnnnnnnnnnnnnnnnnnnnnnnnnnnnnnnnnnnnnnnnnnnnnnnnnnnnnnnnnnnnnnnnnnnnnnnnnnnnnnnnnnnnnnnnnnnnnnnnnnnnnnnnnnnnnnnnnnnnnnnnnnnnnnnnnnnnnnnnnnnnnnnnnnnnnnnnnnnnnnnnnnnnnnnnnnnnnnnnnnnnnnnnnnnnnnnnnnnnnnnnnnnnnnnnnnnnnnnnnnnnnnnnnnnnnnnnnnnnnnnnnnnnnnnnnnnnnnnnnnnnnnnnnnnnnnnnnnnnnnnnnnnnnnnnnnnnnnnnnnnnnnnnnnnnnnnnnnnnnnnnnnnnnnnnnnnnnnnnnnnnnnnnnnnnnnnnnnnnnnnnnnnnnnnnnnnnnnnnnnnnnnnnnnnnnnnnnnnnnnnnnnnnnnnnnnnnnnnnnnnnnnnnnnnnnnnnnnnnnnnnnnnnnnnnnnnnnnnnnnnnnnnnnnnnnnnnnnnnnnnnnnnnnnnnnnnnnnnnnnnnnnnnnnnnnnnnnnnnnnnnnnnnnnnnnnnnnnnnnnnnnnnnnnnnnnnnnnnnnnnnnnnnnnnnnnnnnnnnnnnnnnnnnnnnnnnnnnnnnnnnnnnnnnnnnnnnnnnnnnnnnnnnnnnnnnnnnnnnnnnnnnnnnnnnnnnnnnnnnnnnnnnnnnnnnnnnnnnnnnnnnnnnnnnnnnnnnnnnnnnnnnnnnnnnnnnnnnnnnnnnnnnnnnnnnnnnnnnnnnnnnnnnnnnnnnnnnnnnnnnnnnnnnnnnnnnnnnnnnnnnnnnnnnnnnnnnnnnnnnnnnnnnnnnnnnnnnnnnnnnnnnnnnnnnnnnnnnnnnnnnnnnnnnnnnnnnnnnnnnnnnnnnnnnnnnnnnnnnnnnnnnnnnnnnnnnnnnnnnnnnnnnnnnnnnnnnnnnnnnnnnnnnnnnnnnnnnnnnnnnnnnnnnnnnnnnnnnnnnnnnnnnnnnnnnnnnnnnnnnnnnnnnnnnnnnnnnnnnnnnnnnnnnnnnnnnnnnnnnnnnnnnnnnnnnnnnnnnnnnnnnnnnnnnnnnnnnnnnnnnnnnnnnnnnnnnnnnnnnnnnnnnnnnnnnnnnnnnnnnnnnnnnnnnnnnnnnnnnnnnnnnnnnnnnnnnnnnnnnnnnnnnnnnnnnnnnnnnnnnnnnnnnnnnnnnnnnnnnnnnnnnnnnnnnnnnnnnnnnnnnnnnnnnnnnnnnnnnnnnnnnnnnnnnnnnnnnnnnnnnnnnnnnnnnnnnnnnnnnnnnnnnnnnnnnnnnnnnnnnnnnnnnnnnnnnnnnnnnnnnnnnnnnnnnnnnnnnnnnnnnnnnnnnnnnnnnnnnnnnnnnnnnnnnnnnnnnnnnnnnnnnnnnnnnnnnnnnnnnnnnnnnnnnnnnnnnnnnnnnnnnnnnnnnnnnnnnnnnnnnnnnnnnnnnnnnnnnnnnnnnnnnnnnnnnnnnnnnnnnnnnnnnnnnnnnnnnnnnnnnnnnnnnnnnnnnnnnnnnnnnnnnnnnnnnnnnnnnnnnnnnnnnnnnnnnnnnnnnnnnnnnnnnnnnnnnnnnnnnnnnnnnnnnnnnnnnnnnnnnnnnnnnnnnnnnnnnnnnnnnnnnnnnnnnnnnnnnnnnnnnnnnnnnnnnnnnnnnnnnnnnnnnnnnnnnnnnnnnnnnnnnnnnnnnnnnnnnnnnnnnnnnnnnnnnnnnnnnnnnnnnnnnnnnnnnnnnnnnnnnnnnnnnnnnnnnnnnnnnnnnnnnnnnnnnnnnnnnnnnnnnnnnnnnnnnnnnnnnnnnnnnnnnnnnnnnnnnnnnnnnnnnnnnnnnnnnnnnnnnnnnnnnnnnnnnnnnnnnnnnnnnnnnnnnnnnnnnnnnnnnnnnnnnnnnnnnnnnnnnnnnnnnnnnnnnnnnnnnnnnnnnnnnnnnnnnnnnnnnnnnnnnnnnnnnnnnnnnnnnnnnnnnnnnnnnnnnnnnnnnnnnnnnnnnnnnnnnnnnnnnnnnnnnnnnnnnnnnnnnnnnnnnnnnnnnnnnnnnnnnnnnnnnnnnnnnnnnnnnnnnnnnnnnnnnnnnnnnnnnnnnnnnnnnnnnnnnnnnnnnnnnnnnnnnnnnnnnnnnnnnnnnnnnnnnnnnnnnnnnnnnnnnnnnnnnnnnnnnnnnnnnnnnnnnnnnnnnnnnnnnnnnnnnnnnnnnnnnnnnnnnnnnnnnnnnnnnnnnnnnnnnnnnnnnnnnnnnnnnnnnnnnnnnnnnnnnnnnnnnnnnnnnnnnnnnnnnnnnnnnnnnnnnnnnnnnnnnnnnnnnnnnnnnnnnnnnnnnnnnnnnnnnnnnnnnnnnnnnnnnnnnnnnnnnnnnnnnnnnnnnnnnnnnnnnnnnnnnnnnnnnnnnnnnnnnnnnnnnnnnnnnnnnnnnnnnnnnnnnnnnnnnnnnnnnnnnnnnnnnnnnnnnnnnnnnnnnnnnnnnnnnnnnnnnnnnnnnnnnnnnnnnnnnnnnnnnnnnnnnnnnnnnnnnnnnnnnnnnnnnnnnnnnnnnnnnnnnnnnnnnnnnnnnnnnnnnnnnnnnnnnnnnnnnnnnnnnnnnnnnnnnnnnnnnnnnnnnnnnnnnnnnnnnnnnnnnnnnnnnnnnnnnnnnnnnnnnnnnnnnnnnnnnnnnnnnnnnnnnnnnnnnnnnnnnnnnnnnnnnnnnnnnnnnnnnnnnnnnnnnnnnnnnnnnnnnnnnnnnnnnnnnnnnnnnnnnnnnnnnnnnnnnnnnnnnnnnnnnnnnnnnnnnnnnnnnnnnnnnnnnnnnnnnnnnnnnnnnnnnnnnnnnnnnnnnnnnnnnnnnnnnnnnnnnnnnnnnnnnnnnnnnnnnnnnnnnnnnnnnnnnnnnnnnnnnnnnnnnnnnnnnnnnnnnnnnnnnnnnnnnnnnnnnnnnnnnnnnnnnnnnnnnnnnnnnnnnnnnnnnnnnnnnnnnnnnnnnnnnnnnnnnnnnnnnnnnnnnnnnnnnnnnnnnnnnnnnnnnnnnnnnnnnnnnnnnnnnnnnnnnnnnnnnnnnnnnnnnnnnnnnnnnnnnnnnnnnnnnnnnnnnnnnnnnnnnnnnnnnnnnnnnnnnnnnnnnnnnnnnnnnnnnnnnnnnnnnnnnnnnnnnnnnnnnnnnnnnnnnnnnnnnnnnnnnnnnnnnnnnnnnnnnnnnnnnnnnnnnnnnnnnnnnnnnnnnnnnnnnnnnnnnnnnnnnnnnnnnnnnnnnnnnnnnnnnnnnnnnnnnnnnnnnnnnnnnnnnnnnnnnnnnnnnnnnnnnnnnnnnnnnnnnnnnnnnnnnnnnnnnnnnnnnnnnnnnnnnnnnnnnnnnnnnnnnnnnnnnnnnnnnnnnnnnnnnnnnnnnnnnnnnnnnnnnnnnnnnnnnnnnnnnnnnnnnnnnnnnnnnnnnnnnnnnnnnnnnnnnnnnnnnnnnnnnnnnnnnnnnnnnnnnnnnnnnnnnnnnnnnnnnnnnnnnnnnnnnnnnnnnnnnnnnnnnnnnnnnnnnnnnnnnnnnnnnnnnnnnnnnnnnnnnnnnnnnnnnnnnnnnnnnnnnnnnnnnnnnnnnnnnnnnnnnnnnnnnnnnnnnnnnnnnnnnnnnnnnnnnnnnnnnnnnnnnnnnnnnnnnnnnnnnnnnnnnnnnnnnnnnnnnnnnnnnnnnnnnnnnnnnnnnnnnnnnnnnnnnnnnnnnnnnnnnnnnnnnnnnnnnnnnnnnnnnnnnnnnnnnnnnnnnnnnnnnnnnnnnnnnnnnnnnnnnnnnnnnnnnnnnnnnnnnnnnnnnnnnnnnnnnnnnnnnnnnnnnnnnnnnnnnnnnnnnnnnnnnnnnnnnnnnnnnnnnnnnnnnnnnnnnnnnnnnnnnnnnnnnnnnnnnnnnnnnnnnnnnnnnnnnnnnnnnnnnnnnnnnnnnnnnnnnnnnnnnnnnnnnnnnnnnnnnnnnnnnnnnnnnnnnnnnnnnnnnnnnnnnnnnnnnnnnnnnnnnnnnnnnnnnnnnnnnnnnnnnnnnnnnnnnnnnnnnnnnnnnnnnnnnnnnnnnnnnnnnnnnnnnnnnnnnnnnnnnnnnnnnnnnnnnnnnnnnnnnnnnnnnnnnnnnnnnnnnnnnnnnnnnnnnnnnnnnnnnnnnnnnnnnnnnnnnnnnnnnnnnnnnnnnnnnnnnnnnnnnnnnnnnnnnnnnnnnnnnnnnnnnnnnnnnnnnnnnnnnnnnnnnnnnnnnnnnnnnnnnnnnnnnnnnnnnnnnnnnnnnnnnnnnnnnnnnnnnnnnnnnnnnnnnnnnnnnnnnnnnnnnnnnnnnnnnnnnnnnnnnnnnnnnnnnnnnnnnnnnnnnnnnnnnnnnnnnnnnnnnnnnnnnnnnnnnnnnnnnnnnnnnnnnnnnnnnnnnnnnnnnnnnnnnnnnnnnnnnnnnnnnnnnnnnnnnnnnnnnnnnnnnnnnnnnnnnnnnnnnnnnnnnnnnnnnnnnnnnnnnnnnnnnnnnnnnnnnnnnnnnnnnnnnnnnnnnnnnnnnnnnnnnnnnnnnnnnnnnnnnnnnnnnnnnnnnnnnnnnnnnnnnnnnnnnnnnnnnnnnnnnnnnnnnnnnnnnnnnnnnnnnnnnnnnnnnnnnnnnnnnnnnnnnnnnnnnnnnnnnnnnnnnnnnnnnnnnnnnnnnnnnnnnnnnnnnnnnnnnnnnnnnnnnnnnnnnnnnnnnnnnnnnnnnnnnnnnnnnnnnnnnnnnnnnnnnnnnnnnnnnnnnnnnnnnnnnnnnnnnnnnnnnnnnnnnnnnnnnnnnnnnnnnnnnnnnnnnnnnnnnnnnnnnnnnnnnnnnnnnnnnnnnnnnnnnnnnnnnnnnnnnnnnnnnnnnnnnnnnnnnnnnnnnnnnnnnnnnnnnnnnnnnnnnnnnnnnnnnnnnnnnnnnnnnnnnnnnnnnnnnnnnnnnnnnnnnnnnnnnnnnnnnnnnnnnnnnnnnnnnnnnnnnnnnnnnnnnnnnnnnnnnnnnnnnnnnnnnnnnnnnnnnnnnnnnnnnnnnnnnnnnnnnnnnnnnnnnnnnnnnnnnnnnnnnnnnnnnnnnnnnnnnnnnnnnnnnnnnnnnnnnnnnnnnnnnnnnnnnnnnnnnnnnnnnnnnnnnnnnnnnnnnnnnnnnnnnnnnnnnnnnnnnnnnnnnnnnnnnnnnnnnnnnnnnnnnnnnnnnnnnnnnnnnnnnnnnnnnnnnnnnnnnnnnnnnnnnnnnnnnnnnnnnnnnnnnnnnnnnnnnnnnnnnnnnnnnnnnnnnnnnnnnnnnnnnnnnnnnnnnnnnnnnnnnnnnnnnnnnnnnnnnnnnnnnnnnnnnnnnnnnnnnnnnnnnnnnnnnnnnnnnnnnnnnnnnnnnnnnnnnnnnnnnnnnnnnnnnnnnnnnnnnnnnnnnnnnnnnnnnnnnnnnnnnnnnnnnnnnnnnnnnnnnnnnnnnnnnnnnnnnnnnnnnnnnnnnnnnnnnnnnnnnnnnnnnnnnnnnnnnnnnnnnnnnnnnnnnnnnnnnnnnnnnnnnnnnnnnnnnnnnnnnnnnnnnnnnnnnnnnnnnnnnnnnnnnnnnnnnnnnnnnnnnnnnnnnnnnnnnnnnnnnnnnnnnnnnnnnnnnnnnnnnnnnnnnnnnnnnnnnnnnnnnnnnnnnnnnnnnnnnnnnnnnnnnnnnnnnnnnnnnnnnnnnnnnnnnnnnnnnnnnnnnnnnnnnnnnnnnnnnnnnnnnnnnnnnnnnnnnnnnnnnnnnnnnnnnnnnnnnnnnnnnnnnnnnnnnnnnnnnnnnnnnnnnnnnnnnnnnnnnnnnnnnnnnnnnnnnnnnnnnnnnnnnnnnnnnnnnnnnnnnnnnnnnnnnnnnnnnnnnnnnnnnnnnnnnnnnnnnnnnnnnnnnnnnnnnnnnnnnnnnnnnnnnnnnnnnnnnnnnnnnnnnnnnnnnnnnnnnnnnnnnnnnnnnnnnnnnnnnnnnnnnnnnnnnnnnnnnnnnnnnnnnnnnnnnnnnnnnnnnnnnnnnnnnnnnnnnnnnnnnnnnnnnnnnnnnnnnnnnnnnnnnnnnnnnnnnnnnnnnnnnnnnnnnnnnnnnnnnnnnnnnnnnnnnnnnnnnnnnnnnnnnnnnnnnnnnnnnnnnnnnnnnnnnnnnnnnnnnnnnnnnnnnnnnnnnnnnnnnnnnnnnnnnnnnnnnnnnnnnnnnnnnnnnnnnnnnnnnnnnnnnnnnnnnnnnnnnnnnnnnnnnnnnnnnnnnnnnnnnnnnnnnnnnnnnnnnnnnnnnnnnnnnnnnnnnnnnnnnnnnnnnnnnnnnnnnnnnnnnnnnnnnnnnnnnnnnnnnnnnnnnnnnnnnnnnnnnnnnnnnnnnnnnnnnnnnnnnnnnnnnnnnnnnnnnnnnnnnnnnnnnnnnnnnnnnnnnnnnnnnnnnnnnnnnnnnnnnnnnnnnnnnnnnnnnnnnnnnnnnnnnnnnnnnnnnnnnnnnnnnnnnnnnnnnnnnnnnnnnnnnnnnnnnnnnnnnnnnnnnnnnnnnnnnnnnnnnnnnnnnnnnnnnnnnnnnnnnnnnnnnnnnnnnnnnnnnnnnnnnnnnnnnnnnnnnnnnnnnnnnnnnnnnnnnnnnnnnnnnnnnnnnnnnnnnnnnnnnnnnnnnnnnnnnnnnnnnnnnnnnnnnnnnnnnnnnnnnnnnnnnnnnnnnnnnnnnnnnnnnnnnnnnnnnnnnnnnnnnnnnnnnnnnnnnnnnnnnnnnnnnnnnnnnnnnnnnnnnnnnnnnnnnnnnnnnnnnnnnnnnnnnnnnnnnnnnnnnnnnnnnnnnnnnnnnnnnnnnnnnnnnnnnnnnnnnnnnnnnnnnnnnnnnnnnnnnnnnnnnnnnnnnnnnnnnnnnnnnnnnnnnnnnnnnnnnnnnnnnnnnnnnnnnnnnnnnnnnnnnnnnnnnnnnnnnnnnnnnnnnnnnnnnnnnnnnnnnnnnnnnnnnnnnnnnnnnnnnnnnnnnnnnnnnnnnnnnnnnnnnnnnnnnnnnnnnnnnnnnnnnnnnnnnnnnnnnnnnnnnnnnnnnnnnnnnnnnnnnnnnnnnnnnnnnnnnnnnnnnnnnnnnnnnnnnnnnnnnnnnnnnnnnnnnnnnnnnnnnnnnnnnnnnnnnnnnnnnnnnnnnnnnnnnnnnnnnnnnnnnnnnnnnnnnnnnnnnnnnnnnnnnnnnnnnnnnnnnnnnnnnnnnnnnnnnnnnnnnnnnnnnnnnnnnnnnnnnnnnnnnnnnnnnnnnnnnnnnnnnnnnnnnnnnnnnnnnnnnnnnnnnnnnnnnnnnnnnnnnnnnnnnnnnnnnnnnnnnnnnnnnnnnnnnnnnnnnnnnnnnnnnnnnnnnnnnnnnnnnnnnnnnnnnnnnnnnnnnnnnnnnnnnnnnnnnnnnnnnnnnnnnnnnnnnnnnnnnnnnnnnnnnnnnnnnnnnnnnnnnnnnnnnnnnnnnnnnnnnnnnnnnnnnnnnnnnnnnnnnnnnnnnnnnnnnnnnnnnnnnnnnnnnnnnnnnnnnnnnnnnnnnnnnnnnnnnnnnnnnnnnnnnnnnnnnnnnnnnnnnnnnnnnnnnnnnnnnnnnnnnnnnnnnnnnnnnnnnnnnnnnnnnnnnnnnnnnnnnnnnnnnnnnnnnnnnnnnnnnnnnnnnnnnnnnnnnnnnnnnnnnnnnnnnnnnnnnnnnnnnnnnnnnnnnnnnnnnnnnnnnnnnnnnnnnnnnnnnnnnnnnnnnnnnnnnnnnnnnnnnnnnnnnnnnnnnnnnnnnnnnnnnnnnnnnnnnnnnnnnnnnnnnnnnnnnnnnnnnnnnnnnnnnnnnnnnnnnnnnnnnnnnnnnnnnnnnnnnnnnnnnnnnnnnnnnnnnnnnnnnnnnnnnnnnnnnnnnnnnnnnnnnnnnnnnnnnnnnnnnnnnnnnnnnnnnnnnnnnnnnnnnnnnnnnnnnnnnnnnnnnnnnnnnnnnnnnnnnnnnnnnnnnnnnnnnnnnnnnnnnnnnnnnnnnnnnnnnnnnnnnnnnnnnnnnnnnnnnnnnnnnnnnnnnnnnnnnnnnnnnnnnnnnnnnnnnnnnnnnnnnnnnnnnnnnnnnnnnnnnnnnnnnnnnnnnnnnnnnnnnnnnnnnnnnnnnnnnnnnnnnnnnnnnnnnnnnnnnnnnnnnnnnnnnnnnnnnnnnnnnnnnnnnnnnnnnnnnnnnnnnnnnnnnnnnnnnnnnnnnnnnnnnnnnnnnnnnnnnnnnnnnnnnnnnnnnnnnnnnnnnnnnnnnnnnnnnnnnnnnnnnnnnnnnnnnnnnnnnnnnnnnnnnnnnnnnnnnnnnnnnnnnnnnnnnnnnnnnnnnnnnnnnnnnnnnnnnnnnnnnnnnnnnnnnnnnnnnnnnnnnnnnnnnnnnnnnnnnnnnnnnnnnnnnnnnnnnnnnnnnnnnnnnnnnnnnnnnnnnnnnnnnnnnnnnnnnnnnnnnnnnnnnnnnnnnnnnnnnnnnnnnnnnnnnnnnnnnnnnnnnnnnnnnnnnnnnnnnnnnnnnnnnnnnnnnnnnnnnnnnnnnnnnnnnnnnnnnnnnnnnnnnnnnnnnnnnnnnnnnnnnnnnnnnnnnnnnnnnnnnnnnnnnnnnnnnnnnnnnnnnnnnnnnnnnnnnnnnnnnnnnnnnnnnnnnnnnnnnnnnnnnnnnnnnnnnnnnnnnnnnnnnnnnnnnnnnnnnnnnnnnnnnnnnnnnnnnnnnnnnnnnnnnnnnnnnnnnnnnnnnnnnnnnnnnnnnnnnnnnnnnnnnnnnnnnnnnnnnnnnnnnnnnnnnnnnnnnnnnnnnnnnnnnnnnnnnnnnnnnnnnnnnnnnnnnnnnnnnnnnnnnnnnnnnnnnnnnnnnnnnnnnnnnnnnnnnnnnnnnnnnnnnnnnnnnnnnnnnnnnnnnnnnnnnnnnnnnnnnnnnnnnnnnnnnnnnnnnnnnnnnnnnnnnnnnnnnnnnnnnnnnnnnnnnnnnnnnnnnnnnnnnnnnnnnnnnnnnnnnnnnnnnnnnnnnnnnnnnnnnnnnnnnnnnnnnnnnnnnnnnnnnnnnnnnnnnnnnnnnnnnnnnnnnnnnnnnnnnnnnnnnnnnnnnnnnnnnnnnnnnnnnnnnnnnnnnnnnnnnnnnnnnnnnnnnnnnnnnnnnnnnnnnnnnnnnnnnnnnnnnnnnnnnnnnnnnnnnnnnnnnnnnnnnnnnnnnnnnnnnnnnnnnnnnnnnnnnnnnnnnnnnnnnnnnnnnnnnnnnnnnnnnnnnnnnnnnnnnnnnnnnnnnnnnnnnnnnnnnnnnnnnnnnnnnnnnnnnnnnnnnnnnnnnnnnnnnnnnnnnnnnnnnnnnnnnnnnnnnnnnnnnnnnnnnnnnnnnnnnnnnnnnnnnnnnnnnnnnnnnnnnnnnnnnnnnnnnnnnnnnnnnnnnnnnnnnnnnnnnnnnnnnnnnnnnnnnnnnnnnnnnnnnnnnnnnnnnnnnnnnnnnnnnnnnnnnnnnnnnnnnnnnnnnnnnnnnnnnnnnnnnnnnnnnnnnnnnnnnnnnnnnnnnnnnnnnnnnnnnnnnnnnnnnnnnnnnnnnnnnnnnnnnnnnnnnnnnnnnnnnnnnnnnnnnnnnnnnnnnnnnnnnnnnnnnnnnnnnnnnnnnnnnnnnnnnnnnnnnnnnnnnnnnnnnnnnnnnnnnnnnnnnnnnnnnnnnnnnnnnnnnnnnnnnnnnnnnnnnnnnnnnnnnnnnnnnnnnnnnnnnnnnnnnnnnnnnnnnnnnnnnnnnnnnnnnnnnnnnnnnnnnnnnnnnnnnnnnnnnnnnnnnnnnnnnnnnnnnnnnnnnnnnnnnnnnnnnnnnnnnnnnnnnnnnnnnnnnnnnnnnnnnnnnnnnnnnnnnnnnnnnnnnnnnnnnnnnnnnnnnnnnnnnnnnnnnnnnnnnnnnnnnnnnnnnnnnnnnnnnnnnnnnnnnnnnnnnnnnnnnnnnnnnnnnnnnnnnnnnnnnnnnnnnnnnnnnnnnnnnnnnnnnnnnnnnnnnnnnnnnnnnnnnnnnnnnnnnnnnnnnnnnnnnnnnnnnnnnnnnnnnnnnnnnnnnnnnnnnnnnnnnnnnnnnnnnnnnnnnnnnnnnnnnnnnnnnnnnnnnnnnnnnnnnnnnnnnnnnnnnnnnnnnnnnnnnnnnnnnnnnnnnnnnnnnnnnnnnnnnnnnnnnnnnnnnnnnnnnnnnnnnnnnnnnnnnnnnnnnnnnnnnnnnnnnnnnnnnnnnnnnnnnnnnnnnnnnnnnnnnnnnnnnnnnnnnnnnnnnnnnnnnnnnnnnnnnnnnnnnnnnnnnnnnnnnnnnnnnnnnnnnnnnnnnnnnnnnnnnnnnnnnnnnnnnnnnnnnnnnnnnnnnnnnnnnnnnnnnnnnnnnnnnnnnnnnnnnnnnnnnnnnnnnnnnnnnnnnnnnnnnnnnnnnnnnnnnnnnnnnnnnnnnnnnnnnnnnnnnnnnnnnnnnnnnnnnnnnnnnnnnnnnnnnnnnnnnnnnnnnnnnnnnnnnnnnnnnnnnnnnnnnnnnnnnnnnnnnnnnnnnnnnnnnnnnnnnnnnnnnnnnnnnnnnnnnnnnnnnnnnnnnnnnnnnnnnnnnnnnnnnnnnnnnnnnnnnnnnnnnnnnnnnnnnnnnnnnnnnnnnnnnnnnnnnnnnnnnnnnnnnnnnnnnnnnnnnnnnnnnnnnnnnnnnnnnnnnnnnnnnnnnnnnnnnnnnnnnnnnnnnnnnnnnnnnnnnnnnnnnnnnnnnnnnnnnnnnnnnnnnnnnnnnnnnnnnnnnnnnnnnnnnnnnnnnnnnnnnnnnnnnnnnnnnnnnnnnnnnnnnnnnnnnnnnnnnnnnnnnnnnnnnnnnnnnnnnnnnnnnnnnnnnnnnnnnnnnnnnnnnnnnnnnnnnnnnnnnnnnnnnnnnnnnnnnnnnnnnnnnnnnnnnnnnnnnnnnnnnnnnnnnnnnnnnnnnnnnnnnnnnnnnnnnnnnnnnnnnnnnnnnnnnnnnnnnnnnnnnnnnnnnnnnnnnnnnnnnnnnnnnnnnnnnnnnnnnnnnnnnnnnnnnnnnnnnnnnnnnnnnnnnnnnnnnnnnnnnnnnnnnnnnnnnnnnnnnnnnnnnnnnnnnnnnnnnnnnnnnnnnnnnnnnnnnnnnnnnnnnnnnnnnnnnnnnnnnnnnnnnnnnnnnnnnnnnnnnnnnnnnnnnnnnnnnnnnnnnnnnnnnnnnnnnnnnnnnnnnnnnnnnnnnnnnnnnnnnnnnnnnnnnnnnnnnnnnnnnnnnnnnnnnnnnnnnnnnnnnnnnnnnnnnnnnnnnnnnnnnnnnnnnnnnnnnnnnnnnnnnnnnnnnnnnnnnnnnnnnnnnnnnnnnnnnnnnnnnnnnnnnnnnnnnnnnnnnnnnnnnnnnnnnnnnnnnnnnnnnnnnnnnnnnnnnnnnnnnnnnnnnnnnnnnnnnnnnnnnnnnnnnnnnnnnnnnnnnnnnnnnnnnnnnnnnnnnnnnnnnnnnnnnnnnnnnnnnnnnnnnnnnnnnnnnnnnnnnnnnnnnnnnnnnnnnnnnnnnnnnnnnnnnnnnnnnnnnnnnnnnnnnnnnnnnnnnnnnnnnnnnnnnnnnnnnnnnnnnnnnnnnnnnnnnnnnnnnnnnnnnnnnnnnnnnnnnnnnnnnnnnnnnnnnnnnnnnnnnnnnnnnnnnnnnnnnnnnnnnnnnnnnnnnnnnnnnnnnnnnnnnnnnnnnnnnnnnnnnnnnnnnnnnnnnnnnnnnnnnnnnnnnnnnnnnnnnnnnnnnnnnnnnnnnnnnnnnnnnnnnnnnnnnnnnnnnnnnnnnnnnnnnnnnnnnnnnnnnnnnnnnnnnnnnnnnnnnnnnnnnnnnnnnnnnnnnnnnnnnnnnnnnnnnnnnnnnnnnnnnnnnnnnnnnnnnnnnnnnnnnnnnnnnnnnnnnnnnnnnnnnnnnnnnnnnnnnnnnnnnnnnnnnnnnnnnnnnnnnnnnnnnnnnnnnnnnnnnnnnnnnnnnnnnnnnnnnnnnnnnnnnnnnnnnnnnnnnnnnnnnnnnnnnnnnnnnnnnnnnnnnnnnnnnnnnnnnnnnnnnnnnnnnnnnnnnnnnnnnnnnnnnnnnnnnnnnnnnnnnnnnnnnnnnnnnnnnnnnnnnnnnnnnnnnnnnnnnnnnnnnnnnnnnnnnnnnnnnnnnnnnnnnnnnnnnnnnnnnnnnnnnnnnnnnnnnnnnnnnnnnnnnnnnnnnnnnnnnnnnnnnnnnnnnnnnnnnnnnnnnnnnnnnnnnnnnnnnnnnnnnnnnnnnnnnnnnnnnnnnnnnnnnnnnnnnnnnnnnnnnnnnnnnnnnnnnnnnnnnnnnnnnnnnnnnnnnnnnnnnnnnnnnnnnnnnnnnnnnnnnnnnnnnnnnnnnnnnnnnnnnnnnnnnnnnnnnnnnnnnnnnnnnnnnnnnnnnnnnnnnnnnnnnnnnnnnnnnnnnnnnnnnnnnnnnnnnnnnnnnnnnnnnnnnnnnnnnnnnnnnnnnnnnnnnnnnnnnnnnnnnnnnnnnnnnnnnnnnnnnnnnnnnnnnnnnnnnnnnnnnnnnnnnnnnnnnnnnnnnnnnnnnnnnnnnnnnnnnnnnnnnnnnnnnnnnnnnnnnnnnnnnnnnnnnnnnnnnnnnnnnnnnnnnnnnnnnnnnnnnnnnnnnnnnnnnnnnnnnnnnnnnnnnnnnnnnnnnnnnnnnnnnnnnnnnnnnnnnnnnnnnnnnnnnnnnnnnnnnnnnnnnnnnnnnnnnnnnnnnnnnnnnnnnnnnnnnnnnnnnnnnnnnnnnnnnnnnnnnnnnnnnnnnnnnnnnnnnnnnnnnnnnnnnnnnnnnnnnnnnnnnnnnnnnnnnnnnnnnnnnnnnnnnnnnnnnnnnnnnnnnnnnnnnnnnnnnnnnnnnnnnnnnnnnnnnnnnnnnnnnnnnnnnnnnnnnnnnnnnnnnnnnnnnnnnnnnnnnnnnnnnnnnnnnnnnnnnnnnnnnnnnnnnnnnnnnnnnnnnnnnnnnnnnnnnnnnnnnnnnnnnnnnnnnnnnnnnnnnnnnnnnnnnnnnnnnnnnnnnnnnnnnnnnnnnnnnnnnnnnnnnnnnnnnnnnnnnnnnnnnnnnnnnnnnnnnnnnnnnnnnnnnnnnnnnnnnnnnnnnnnnnnnnnnnnnnnnnnnnnnnnnnnnnnnnnnnnnnnnnnnnnnnnnnnnnnnnnnnnnnnnnnnnnnnnnnnnnnnnnnnnnnnnnnnnnnnnnnnnnnnnnnnnnnnnnnnnnnnnnnnnnnnnnnnnnnnnnnnnnnnnnnnnnnnnnnnnnnnnnnnnnnnnnnnnnnnnnnnnnnnnnnnnnnnnnnnnnnnnnnnnnnnnnnnnnnnnnnnnnnnnnnnnnnnnnnnnnnnnnnnnnnnnnnnnnnnnnnnnnnnnnnnnnnnnnnnnnnnnnnnnnnnnnnnnnnnnnnnnnnnnnnnnnnnnnnnnnnnnnnnnnnnnnnnnnnnnnnnnnnnnnnnnnnnnnnnnnnnnnnnnnnnnnnnnnnnnnnnnnnnnnnnnnnnnnnnnnnnnnnnnnnnnnnnnnnnnnnnnnnnnnnnnnnnnnnnnnnnnnnnnnnnnnnnnnnnnnnnnnnnnnnnnnnnnnnnnnnnnnnnnnnnnnnnnnnnnnnnnnnnnnnnnnnnnnnnnnnnnnnnnnnnnnnnnnnnnnnnnnnnnnnnnnnnnnnnnnnnnnnnnnnnnnnnnnnnnnnnnnnnnnnnnnnnnnnnnnnnnnnnnnnnnnnnnnnnnnnnnnnnnnnnnnnnnnnnnnnnnnnnnnnnnnnnnnnnnnnnnnnnnnnnnnnnnnnnnnnnnnnnnnnnnnnnnnnnnnnnnnnnnnnnnnnnnnnnnnnnnnnnnnnnnnnnnnnnnnnnnnnnnnnnnnnnnnnnnnnnnnnnnnnnnnnnnnnnnnnnnnnnnnnnnnnnnnnnnnnnnnnnnnnnnnnnnnnnnnnnnnnnnnnnnnnnnnnnnnnnnnnnnnnnnnnnnnnnnnnnnnnnnnnnnnnnnnnnnnnnnnnnnnnnnnnnnnnnnnnnnnnnnnnnnnnnnnnnnnnnnnnnnnnnnnnnnnnnnnnnnnnnnnnnnnnnnnnnnnnnnnnnnnnnnnnnnnnnnnnnnnnnnnnnnnnnnnnnnnnnnnnnnnnnnnnnnnnnnnnnnnnnnnnnnnnnnnnnnnnnnnnnnnnnnnnnnnnnnnnnnnnnnnnnnnnnnnnnnnnnnnnnnnnnnnnnnnnnnnnnnnnnnnnnnnnnnnnnnnnnnnnnnnnnnnnnnnnnnnnnnnnnnnnnnnnnnnnnnnnnnnnnnnnnnnnnnnnnnnnnnnnnnnnnnnnnnnnnnnnnnnnnnnnnnnnnnnnnnnnnnnnnnnnnnnnnnnnnnnnnnnnnnnnnnnnnnnnnnnnnnnnnnnnnnnnnnnnnnnnnnnnnnnnnnnnnnnnnnnnnnnnnnnnnnnnnnnnnnnnnnnnnnnnnnnnnnnnnnnnnnnnnnnnnnnnnnnnnnnnnnnnnnnnnnnnnnnnnnnnnnnnnnnnnnnnnnnnnnnnnnnnnnnnnnnnnnnnnnnnnnnnnnnnnnnnnnnnnnnnnnnnnnnnnnnnnnnnnnnnnnnnnnnnnnnnnnnnnnnnnnnnnnnnnnnnnnnnnnnnnnnnnnnnnnnnnnnnnnnnnnnnnnnnnnnnnnnnnnnnnnnnnnnnnnnnnnnnnnnnnnnnnnnnnnnnnnnnnnnnnnnnnnnnnnnnnnnnnnnnnnnnnnnnnnnnnnnnnnnnnnnnnnnnnnnnnnnnnnnnnnnnnnnnnnnnnnnnnnnnnnnnnnnnnnnnnnnnnnnnnnnnnnnnnnnnnnnnnnnnnnnnnnnnnnnnnnnnnnnnnnnnnnnnnnnnnnnnnnnnnnnnnnnnnnnnnnnnnnnnnnnnnnnnnnnnnnnnnnnnnnnnnnnnnnnnnnnnnnnnnnnnnnnnnnnnnnnnnnnnnnnnnnnnnnnnnnnnnnnnnnnnnnnnnnnnnnnnnnnnnnnnnnnnnnnnnnnnnnnnnnnnnnnnnnnnnnnnnnnnnnnnnnnnnnnnnnnnnnnnnnnnnnnnnnnnnnnnnnnnnnnnnnnnnnnnnnnnnnnnnnnnnnnnnnnnnnnnnnnnnnnnnnnnnnnnnnnnnnnnnnnnnnnnnnnnnnnnnnnnnnnnnnnnnnnnnnnnnnnnnnnnnnnnnnnnnnnnnnnnnnnnnnnnnnnnnnnnnnnnnnnnnnnnnnnnnnnnnnnnnnnnnnnnnnnnnnnnnnnnnnnnnnnnnnnnnnnnnnnnnnnnnnnnnnnnnnnnnnnnnnnnnnnnnnnnnnnnnnnnnnnnnnnnnnnnnnnnnnnnnnnnnnnnnnnnnnnnnnnnnnnnnnnnnnnnnnnnnnnnnnnnnnnnnnnnnnnnnnnnnnnnnnnnnnnnnnnnnnnnnnnnnnnnnnnnnnnnnnnnnnnnnnnnnnnnnnnnnnnnnnnnnnnnnnnnnnnnnnnnnnnnnnnnnnnnnnnnnnnnnnnnnnnnnnnnnnnnnnnnnnnnnnnnnnnnnnnnnnnnnnnnnnnnnnnnnnnnnnnnnnnnnnnnnnnnnnnnnnnnnnnnnnnnnnnnnnnnnnnnnnnnnnnnnnnnnnnnnnnnnnnnnnnnnnnnnnnnnnnnnnnnnnnnnnnnnnnnnnnnnnnnnnnnnnnnnnnnnnnnnnnnnnnnnnnnnnnnnnnnnnnnnnnnnnnnnnnnnnnnnnnnnnnnnnnnnnnnnnnnnnnnnnnnnnnnnnnnnnnnnnnnnnnnnnnnnnnnnnnnnnnnnnnnnnnnnnnnnnnnnnnnnnnnnnnnnnnnnnnnnnnnnnnnnnnnnnnnnnnnnnnnnnnnnnnnnnnnnnnnnnnnnnnnnnnnnnnnnnnnnnnnnnnnnnnnnnnnnnnnnnnnnnnnnnnnnnnnnnnnnnnnnnnnnnnnnnnnnnnnnnnnnnnnnnnnnnnnnnnnnnnnnnnnnnnnnnnnnnnnnnnnnnnnnnnnnnnnnnnnnnnnnnnnnnnnnnnnnnnnnnnnnnnnnnnnnnnnnnnnnnnnnnnnnnnnnnnnnnnnnnnnnnnnnnnnnnnnnnnnnnnnnnnnnnnnnnnnnnnnnnnnnnnnnnnnnnnnnnnnnnnnnnnnnnnnnnnnnnnnnnnnnnnnnnnnnnnnnnnnnnnnnnnnnnnnnnnnnnnnnnnnnnnnnnnnnnnnnnnnnnnnnnnnnnnnnnnnnnnnnnnnnnnnnnnnnnnnnnnnnnnnnnnnnnnnnnnnnnnnnnnnnnnnnnnnnnnnnnnnnnnnnnnnnnnnnnnnnnnnnnnnnnnnnnnnnnnnnnnnnnnnnnnnnnnnnnnnnnnnnnnnnnnnnnnnnnnnnnnnnnnnnnnnnnnnnnnnnnnnnnnnnnnnnnnnnnnnnnnnnnnnnnnnnnnnnnnnnnnnnnnnnnnnnnnnnnnnnnnnnnnnnnnnnnnnnnnnnnnnnnnnnnnnnnnnnnnnnnnnnnnnnnnnnnnnnnnnnnnnnnnnnnnnnnnnnnnnnnnnnnnnnnnnnnnnnnnnnnnnnnnnnnnnnnnnnnnnnnnnnnnnnnnnnnnnnnnnnnnnnnnnnnnnnnnnnnnnnnnnnnnnnnnnnnnnnnnnnnnnnnnnnnnnnnnnnnnnnnnnnnnnnnnnnnnnnnnnnnnnnnnnnnnnnnnnnnnnnnnnnnnnnnnnnnnnnnnnnnnnnnnnnnnnnnnnnnnnnnnnnnnnnnnnnnnnnnnnnnnnnnnnnnnnnnnnnnnnnnnnnnnnnnnnnnnnnnnnnnnnnnnnnnnnnnnnnnnnnnnnnnnnnnnnnnnnnnnnnnnnnnnnnnnnnnnnnnnnnnnnnnnnnnnnnnnnnnnnnnnnnnnnnnnnnnnnnnnnnnnnnnnnnnnnnnnnnnnnnnnnnnnnnnnnnnnnnnnnnnnnnnnnnnnnnnnnnnnnnnnnnnnnnnnnnnnnnnnnnnnnnnnnnnnnnnnnnnnnnnnnnnnnnnnnnnnnnnnnnnnnnnnnnnnnnnnnnnnnnnnnnnnnnnnnnnnnnnnnnnnnnnnnnnnnnnnnnnnnnnnnnnnnnnnnnnnnnnnnnnnnnnnnnnnnnnnnnnnnnnnnnnnnnnnnnnnnnnnnnnnnnnnnnnnnnnnnnnnnnnnnnnnnnnnnnnnnnnnnnnnnnnnnnnnnnnnnnnnnnnnnnnnnnnnnnnnnnnnnnnnnnnnnnnnnnnnnnnnnnnnnnnnnnnnnnnnnnnnnnnnnnnnnnnnnnnnnnnnnnnnnnnnnnnnnnnnnnnnnnnnnnnnnnnnnnnnnnnnnnnnnnnnnnnnnnnnnnnnnnnnnnnnnnnnnnnnnnnnnnnnnnnnnnnnnnnnnnnnnnnnnnnnnnnnnnnnnnnnnnnnnnnnnnnnnnnnnnnnnnnnnnnnnnnnnnnnnnnnnnnnnnnnnnnnnnnnnnnnnnnnnnnnnnnnnnnnnnnnnnnnnnnnnnnnnnnnnnnnnnnnnnnnnnnnnnnnnnnnnnnnnnnnnnnnnnnnnnnnnnnnnnnnnnnnnnnnnnnnnnnnnnnnnnnnnnnnnnnnnnnnnnnnnnnnnnnnnnnnnnnnnnnnnnnnnnnnnnnnnnnnnnnnnnnnnnnnnnnnnnnnnnnnnnnnnnnnnnnnnnnnnnnnnnnnnnnnnnnnnnnnnnnnnnnnnnnnnnnnnnnnnnnnnnnnnnnnnnnnnnnnnnnnnnnnnnnnnnnnnnnnnnnnnnnnnnnnnnnnnnnnnnnnnnnnnnnnnnnnnnnnnnnnnnnnnnnnnnnnnnnnnnnnnnnnnnnnnnnnnnnnnnnnnnnnnnnnnnnnnnnnnnnnnnnnnnnnnnnnnnnnnnnnnnnnnnnnnnnnnnnnnnnnnnnnnnnnnnnnnnnnnnnnnnnnnnnnnnnnnnnnnnnnnnnnnnnnnnnnnnnnnnnnnnnnnnnnnnnnnnnnnnnnnnnnnnnnnnnnnnnnnnnnnnnnnnnnnnnnnnnnnnnnnnnnnnnnnnnnnnnnnnnnnnnnnnnnnnnnnnnnnnnnnnnnnnnnnnnnnnnnnnnnnnnnnnnnnnnnnnnnnnnnnnnnnnnnnnnnnnnnnnnnnnnnnnnnnnnnnnnnnnnnnnnnnnnnnnnnnnnnnnnnnnnnnnnnnnnnnnnnnnnnnnnnnnnnnnnnnnnnnnnnnnnnnnnnnnnnnnnnnnnnnnnnnnnnnnnnnnnnnnnnnnnnnnnnnnnnnnnnnnnnnnnnnnnnnnnnnnnnnnnnnnnnnnnnnnnnnnnnnnnnnnnnnnnnnnnnnnnnnnnnnnnnnnnnnnnnnnnnnnnnnnnnnnnnnnnnnnnnnnnnnnnnnnnnnnnnnnnnnnnnnnnnnnnnnnnnnnnnnnnnnnnnnnnnnnnnnnnnnnnnnnnnnnnnnnnnnnnnnnnnnnnnnnnnnnnnnnnnnnnnnnnnnnnnnnnnnnnnnnnnnnnnnnnnnnnnnnnnnnnnnnnnnnnnnnnnnnnnnnnnnnnnnnnnnnnnnnnnnnnnnnnnnnnnnnnnnnnnnnnnnnnnnnnnnnnnnnnnnnnnnnnnnnnnnnnnnnnnnnnnnnnnnnnnnnnnnnnnnnnnnnnnnnnnnnnnnnnnnnnnnnnnnnnnnnnnnnnnnnnnnnnnnnnnnnnnnnnnnnnnnnnnnnnnnnnnnnnnnnnnnnnnnnnnnnnnnnnnnnnnnnnnnnnnnnnnnnnnnnnnnnnnnnnnnnnnnnnnnnnnnnnnnnnnnnnnnnnnnnnnnnnnnnnnnnnnnnnnnnnnnnnnnnnnnnnnnnnnnnnnnnnnnnnnnnnnnnnnnnnnnnnnnnnnnnnnnnnnnnnnnnnnnnnnnnnnnnnnnnnnnnnnnnnnnnnnnnnnnnnnnnnnnnnnnnnnnnnnnnnnnnnnnnnnnnnnnnnnnnnnnnnnnnnnnnnnnnnnnnnnnnnnnnnnnnnnnnnnnnnnnnnnnnnnnnnnnnnnnnnnnnnnnnnnnnnnnnnnnnnnnnnnnnnnnnnnnnnnnnnnnnnnnnnnnnnnnnnnnnnnnnnnnnnnnnnnnnnnnnnnnnnnnnnnnnnnnnnnnnnnnnnnnnnnnnnnnnnnnnnnnnnnnnnnnnnnnnnnnnnnnnnnnnnnnnnnnnnnnnnnnnnnnnnnnnnnnnnnnnnnnnnnnnnnnnnnnnnnnnnnnnnnnnnnnnnnnnnnnnnnnnnnnnnnnnnnnnnnnnnnnnnnnnnnnnnnnnnnnnnnnnnnnnnnnnnnnnnnnnnnnnnnnnnnnnnnnnnnnnnnnnnnnnnnnnnnnnnnnnnnnnnnnnnnnnnnnnnnnnnnnnnnnnnnnnnnnnnnnnnnnnnnnnnnnnnnnnnnnnnnnnnnnnnnnnnnnnnnnnnnnnnnnnnnnnnnnnnnnnnnnnnnnnnnnnnnnnnnnnnnnnnnnnnnnnnnnnnnnnnnnnnnnnnnnnnnnnnnnnnnnnnnnnnnnnnnnnnnnnnnnnnnnnnnnnnnnnnnnnnnnnnnnnnnnnnnnnnnnnnnnnnnnnnnnnnnnnnnnnnnnnnnnnnnnnnnnnnnnnnnnnnnnnnnnnnnnnnnnnnnnnnnnnnnnnnnnnnnnnnnnnnnnnnnnnnnnnnnnnnnnnnnnnnnnnnnnnnnnnnnnnnnnnnnnnnnnnnnnnnnnnnnnnnnnnnnnnnnnnnnnnnnnnnnnnnnnnnnnnnnnnnnnnnnnnnnnnnnnnnnnnnnnnnnnnnnnnnnnnnnnnnnnnnnnnnnnnnnnnnnnnnnnnnnnnnnnnnnnnnnnnnnnnnnnnnnnnnnnnnnnnnnnnnnnnnnnnnnnnnnnnnnnnnnnnnnnnnnnnnnnnnnnnnnnnnnnnnnnnnnnnnnnnnnnnnnnnnnnnnnnnnnnnnnnnnnnnnnnnnnnnnnnnnnnnnnnnnnnnnnnnnnnnnnnnnnnnnnnnnnnnnnnnnnnnnnnnnnnnnnnnnnnnnnnnnnnnnnnnnnnnnnnnnnnnnnnnnnnnnnnnnnnnnnnnnnnnnnnnnnnnnnnnnnnnnnnnnnnnnnnnnnnnnnnnnnnnnnnnnnnnnnnnnnnnnnnnnnnnnnnnnnnnnnnnnnnnnnnnnnnnnnnnnnnnnnnnnnnnnnnnnnnnnnnnnnnnnnnnnnnnnnnnnnnnnnnnnnnnnnnnnnnnnnnnnnnnnnnnnnnnnnnnnnnnnnnnnnnnnnnnnnnnnnnnnnnnnnnnnnnnnnnnnnnnnnnnnnnnnnnnnnnnnnnnnnnnnnnnnnnnnnnnnnnnnnnnnnnnnnnnnnnnnnnnnnnnnnnnnnnnnnnnnnnnnnnnnnnnnnnnnnnnnnnnnnnnnnnnnnnnnnnnnnnnnnnnnnnnnnnnnnnnnnnnnnnnnnnnnnnnnnnnnnnnnnnnnnnnnnnnnnnnnnnnnnnnnnnnnnnnnnnnnnnnnnnnnnnnnnnnnnnnnnnnnnnnnnnnnnnnnnnnnnnnnnnnnnnnnnnnnnnnnnnnnnnnnnnnnnnnnnnnnnnnnnnnnnnnnnnnnnnnnnnnnnnnnnnnnnnnnnnnnnnnnnnnnnnnnnnnnnnnnnnnnnnnnnnnnnnnnnnnnnnnnnnnnnnnnnnnnnnnnnnnnnnnnnnnnnnnnnnnnnnnnnnnnnnnnnnnnnnnnnnnnnnnnnnnnnnnnnnnnnnnnnnnnnnnnnnnnnnnnnnnnnnnnnnnnnnnnnnnnnnnnnnnnnnnnnnnnnnnnnnnnnnnnnnnnnnnnnnnnnnnnnnnnnnnnnnnnnnnnnnnnnnnnnnnnnnnnnnnnnnnnnnnnnnnnnnnnnnnnnnnnnnnnnnnnnnnnnnnnnnnnnnnnnnnnnnnnnnnnnnnnnnnnnnnnnnnnnnnnnnnnnnnnnnnnnnnnnnnnnnnnnnnnnnnnnnnnnnnnnnnnnnnnnnnnnnnnnnnnnnnnnnnnnnnnnnnnnnnnnnnnnnnnnnnnnnnnnnnnnnnnnnnnnnnnnnnnnnnnnnnnnnnnnnnnnnnnnnnnnnnnnnnnnnnnnnnnnnnnnnnnnnnnnnnnnnnnnnnnnnnnnnnnnnnnnnnnnnnnnnnnnnnnnnnnnnnnnnnnnnnnnnnnnnnnnnnnnnnnnnnnnnnnnnnnnnnnnnnnnnnnnnnnnnnnnnnnnnnnnnnnnnnnnnnnnnnnnnnnnnnnnnnnnnnnnnnnnnnnnnnnnnnnnnnnnnnnnnnnnnnnnnnnnnnnnnnnnnnnnnnnnnnnnnnnnnnnnnnnnnnnnnnnnnnnnnnnnnnnnnnnnnnnnnnnnnnnnnnnnnnnnnnnnnnnnnnnnnnnnnnnnnnnnnnnnnnnnnnnnnnnnnnnnnnnnnnnnnnnnnnnnnnnnnnnnnnnnnnnnnnnnnnnnnnnnnnnnnnnnnnnnnnnnnnnnnnnnnnnnnnnnnnnnnnnnnnnnnnnnnnnnnnnnnnnnnnnnnnnnnnnnnnnnnnnnnnnnnnnnnnnnnnnnnnnnnnnnnnnnnnnnnnnnnnnnnnnnnnnnnnnnnnnnnnnnnnnnnnnnnnnnnnnnnnnnnnnnnnnnnnnnnnnnnnnnnnnnnnnnnnnnnnnnnnnnnnnnnnnnnnnnnnnnnnnnnnnnnnnnnnnnnnnnnnnnnnnnnnnnnnnnnnnnnnnnnnnnnnnnnnnnnnnnnnnnnnnnnnnnnnnnnnnnnnnnnnnnnnnnnnnnnnnnnnnnnnnnnnnnnnnnnnnnnnnnnnnnnnnnnnnnnnnnnnnnnnnnnnnnnnnnnnnnnnnnnnnnnnnnnnnnnnnnnnnnnnnnnnnnnnnnnnnnnnnnnnnnnnnnnnnnnnnnnnnnnnnnnnnnnnnnnnnnnnnnnnnnnnnnnnnnnnnnnnnnnnnnnnnnnnnnnnnnnnnnnnnnnnnnnnnnnnnnnnnnnnnnnnnnnnnnnnnnnnnnnnnnnnnnnnnnnnnnnnnnnnnnnnnnnnnnnnnnnnnnnnnnnnnnnnnnnnnnnnnnnnnnnnnnnnnnnnnnnnnnnnnnnnnnnnnnnnnnnnnnnnnnnnnnnnnnnnnnnnnnnnnnnnnnnnnnnnnnnnnnnnnnnnnnnnnnnnnnnnnnnnnnnnnnnnnnnnnnnnnnnnnnnnnnnnnnnnnnnnnnnnnnnnnnnnnnnnnnnnnnnnnnnnnnnnnnnnnnnnnnnnnnnnnnnnnnnnnnnnnnnnnnnnnnnnnnnnnnnnnnnnnnnnnnnnnnnnnnnnnnnnnnnnnnnnnnnnnnnnnnnnnnnnnnnnnnnnnnnnnnnnnnnnnnnnnnnnnnnnnnnnnnnnnnnnnnnnnnnnnnnnnnnnnnnnnnnnnnnnnnnnnnnnnnnnnnnnnnnnnnnnnnnnnnnnnnnnnnnnnnnnnnnnnnnnnnnnnnnnnnnnnnnnnnnnnnnnnnnnnnnnnnnnnnnnnnnnnnnnnnnnnnnnnnnnnnnnnnnnnnnnnnnnnnnnnnnnnnnnnnnnnnnnnnnnnnnnnnnnnnnnnnnnnnnnnnnnnnnnnnnnnnnnnnnnnnnnnnnnnnnnnnnnnnnnnnnnnnnnnnnnnnnnnnnnnnnnnnnnnnnnnnnnnnnnnnnnnnnnnnnnnnnnnnnnnnnnnnnnnnnnnnnnnnnnnnnnnnnnnnnnnnnnnnnnnnnnnnnnnnnnnnnnnnnnnnnnnnnnnnnnnnnnnnnnnnnnnnnnnnnnnnnnnnnnnnnnnnnnnnnnnnnnnnnnnnnnnnnnnnnnnnnnnnnnnnnnnnnnnnnnnnnnnnnnnnnnnnnnnnnnnnnnnnnnnnnnnnnnnnnnnnnnnnnnnnnnnnnnnnnnnnnnnnnnnnnnnnnnnnnnnnnnnnnnnnnnnnnnnnnnnnnnnnnnnnnnnnnnnnnnnnnnnnnnnnnnnnnnnnnnnnnnnnnnnnnnnnnnnnnnnnnnnnnnnnnnnnnnnnnnnnnnnnnnnnnnnnnnnnnnnnnnnnnnnnnnnnnnnnnnnnnnnnnnnnnnnnnnnnnnnnnnnnnnnnnnnnnnnnnnnnnnnnnnnnnnnnnnnnnnnnnnnnnnnnnnnnnnnnnnnnnnnnnnnnnnnnnnnnnnnnnnnnnnnnnnnnnnnnnnnnnnnnnnnnnnnnnnnnnnnnnnnnnnnnnnnnnnnnnnnnnnnnnnnnnnnnnnnnnnnnnnnnnnnnnnnnnnnnnnnnnnnnnnnnnnnnnnnnnnnnnnnnnnnnnnnnnnnnnnnnnnnnnnnnnnnnnnnnnnnnnnnnnnnnnnnnnnnnnnnnnnnnnnnnnnnnnnnnnnnnnnnnnnnnnnnnnnnnnnnnnnnnnnnnnnnnnnnnnnnnnnnnnnnnnnnnnnnnnnnnnnnnnnnnnnnnnnnnnnnnnnnnnnnnnnnnnnnnnnnnnnnnnnnnnnnnnnnnnnnnnnnnnnnnnnnnnnnnnnnnnnnnnnnnnnnnnnnnnnnnnnnnnnnnnnnnnnnnnnnnnnnnnnnnnnnnnnnnnnnnnnnnnnnnnnnnnnnnnnnnnnnnnnnnnnnnnnnnnnnnnnnnnnnnnnnnnnnnnnnnnnnnnnnnnnnnnnnnnnnnnnnnnnnnnnnnnnnnnnnnnnnnnnnnnnnnnnnnnnnnnnnnnnnnnnnnnnnnnnnnnnnnnnnnnnnnnnnnnnnnnnnnnnnnnnnnnnnnnnnnnnnnnnnnnnnnnnnnnnnnnnnnnnnnnnnnnnnnnnnnnnnnnnnnnnnnnnnnnnnnnnnnnnnnnnnnnnnnnnnnnnnnnnnnnnnnnnnnnnnnnnnnnnnnnnnnnnnnnnnnnnnnnnnnnnnnnnnnnnnnnnnnnnnnnnnnnnnnnnnnnnnnnnnnnnnnnnnnnnnnnnnnnnnnnnnnnnnnnnnnnnnnnnnnnnnnnnnnnnnnnnnnnnnnnnnnnnnnnnnnnnnnnnnnnnnnnnnnnnnnnnnnnnnnnnnnnnnnnnnnnnnnnnnnnnnnnnnnnnnnnnnnnnnnnnnnnnnnnnnnnnnnnnnnnnnnnnnnnnnnnnnnnnnnnnnnnnnnnnnnnnnnnnnnnnnnnnnnnnnnnnnnnnnnnnnnnnnnnnnnnnnnnnnnnnnnnnnnnnnnnnnnnnnnnnnnnnnnnnnnnnnnnnnnnnnnnnnnnnnnnnnnnnnnnnnnnnnnnnnnnnnnnnnnnnnnnnnnnnnnnnnnnnnnnnnnnnnnnnnnnnnnnnnnnnnnnnnnnnnnnnnnnnnnnnnnnnnnnnnnnnnnnnnnnnnnnnnnnnnnnnnnnnnnnnnnnnnnnnnnnnnnnnnnnnnnnnnnnnnnnnnnnnnnnnnnnnnnnnnnnnnnnnnnnnnnnnnnnnnnnnnnnnnnnnnnnnnnnnnnnnnnnnnnnnnnnnnnnnnnnnnnnnnnnnnnnnnnnnnnnnnnnnnnnnnnnnnnnnnnnnnnnnnnnnnnnnnnnnnnnnnnnnnnnnnnnnnnnnnnnnnnnnnnnnnnnnnnnnnnnnnnnnnnnnnnnnnnnnnnnnnnnnnnnnnnnnnnnnnnnnnnnnnnnnnnnnnnnnnnnnnnnnnnnnnnnnnnnnnnnnnnnnnnnnnnnnnnnnnnnnnnnnnnnnnnnnnnnnnnnnnnnnnnnnnnnnnnnnnnnnnnnnnnnnnnnnnnnnnnnnnnnnnnnnnnnnnnnnnnnnnnnnnnnnnnnnnnnnnnnnnnnnnnnnnnnnnnnnnnnnnnnnnnnnnnnnnnnnnnnnnnnnnnnnnnnnnnnnnnnnnnnnnnnnnnnnnnnnnnnnnnnnnnnnnnnnnnnnnnnnnnnnnnnnnnnnnnnnnnnnnnnnnnnnnnnnnnnnnnnnnnnnnnnnnnnnnnnnnnnnnnnnnnnnnnnnnnnnnnnnnnnnnnnnnnnnnnnnnnnnnnnnnnnnnnnnnnnnnnnnnnnnnnnnnnnnnnnnnnnnnnnnnnnnnnnnnnnnnnnnnnnnnnnnnnnnnnnnnnnnnnnnnnnnnnnnnnnnnnnnnnnnnnnnnnnnnnnnnnnnnnnnnnnnnnnnnnnnnnnnnnnnnnnnnnnnnnnnnnnnnnnnnnnnnnnnnnnnnnnnnnnnnnnnnnnnnnnnnnnnnnnnnnnnnnnnnnnnnnnnnnnnnnnnnnnnnnnnnnnnnnnnnnnnnnnnnnnnnnnnnnnnnnnnnnnnnnnnnnnnnnnnnnnnnnnnnnnnnnnnnnnnnnnnnnnnnnnnnnnnnnnnnnnnnnnnnnnnnnnnnnnnnnnnnnnnnnnnnnnnnnnnnnnnnnnnnnnnnnnnnnnnnnnnnnnnnnnnnnnnnnnnnnnnnnnnnnnnnnnnnnnnnnnnnnnnnnnnnnnnnnnnnnnnnnnnnnnnnnnnnnnnnnnnnnnnnnnnnnnnnnnnnnnnnnnnnnnnnnnnnnnnnnnnnnnnnnnnnnnnnnnnnnnnnnnnnnnnnnnnnnnnnnnnnnnnnnnnnnnnnnnnnnnnnnnnnnnnnnnnnnnnnnnnnnnnnnnnnnnnnnnnnnnnnnnnnnnnnnnnnnnnnnnnnnnnnnnnnnnnnnnnnnnnnnnnnnnnnnnnnnnnnnnnnnnnnnnnnnnnnnnnnnnnnnnnnnnnnnnnnnnnnnnnnnnnnnnnnnnnnnnnnnnnnnnnnnnnnnnnnnnnnnnnnnnnnnnnnnnnnnnnnnnnnnnnnnnnnnnnnnnnnnnnnnnnnnnnnnnnnnnnnnnnnnnnnnnnnnnnnnnnnnnnnnnnnnnnnnnnnnnnnnnnnnnnnnnnnnnnnnnnnnnnnnnnnnnnnnnnnnnnnnnnnnnnnnnnnnnnnnnnnnnnnnnnnnnnnnnnnnnnnnnnnnnnnnnnnnnnnnnnnnnnnnnnnnnnnnnnnnnnnnnnnnnnnnnnnnnnnnnnnnnnnnnnnnnnnnnnnnnnnnnnnnnnnnnnnnnnnnnnnnnnnnnnnnnnnnnnnnnnnnnnnnnnnnnnnnnnnnnnnnnnnnnnnnnnnnnnnnnnnnnnnnnnnnnnnnnnnnnnnnnnnnnnnnnnnnnnnnnnnnnnnnnnnnnnnnnnnnnnnnnnnnnnnnnnnnnnnnnnnnnnnnnnnnnnnnnnnnnnnnnnnnnnnnnnnnnnnnnnnnnnnnnnnnnnnnnnnnnnnnnnnnnnnnnnnnnnnnnnnnnnnnnnnnnnnnnnnnnnnnnnnnnnnnnnnnnnnnnnnnnnnnnnnnnnnnnnnnnnnnnnnnnnnnnnnnnnnnnnnnnnnnnnnnnnnnnnnnnnnnnnnnnnnnnnnnnnnnnnnnnnnnnnnnnnnnnnnnnnnnnnnnnnnnnnnnnnnnnnnnnnnnnnnnnnnnnnnnnnnnnnnnnnnnnnnnnnnnnnnnnnnnnnnnnnnnnnnnnnnnnnnnnnnnnnnnnnnnnnnnnnnnnnnnnnnnnnnnnnnnnnnnnnnnnnnnnnnnnnnnnnnnnnnnnnnnnnnnnnnnnnnnnnnnnnnnnnnnnnnnnnnnnnnnnnnnnnnnnnnnnccggcaccgcccttcacctacgacggtgctgactgatgcagtgatatttggtgaaaaacccctacctgtaatgcgttttgaggtggtgtccgtgtcggataaggcttcgggtcgcctccctggtgctttgcctgaaaaccgctcacccttggccttattgcgccctgagaaagcgatgccatgcaagggacattctgggctcgcacacatcgacaagggatgcccgttgaggcaaacgtgccgacaaaacccccgtactctcttaccaataaaggctttccgaaattcaggcttcattaaaccatctccccctctccgtggcgctggccgccgatatgtgtccaacggacatcccgtgcaacagctgagatcgttgggcgtgtcgccccggcaaaatcggcagtattggccgatgcccttataaacgtcgctcttgttcgccatatctacccccccaatcagacacacctgccttgcaaagtgtgtataagtgtttccccgtttcccttttttcataaaaccccgatgaatacttacctagaagagggaaacacctgttcgaaaaccgtttccctcccgtttcccagtgtttcctttttccaggcatgagggaaacgagggaaacgcctgggaaacacccccgtttccctttaaaacccgcattaatattgattgaatatatatttgggaaacagggaaacggtaatatccccttttgccgggtcatggttcgcccctctcgggttttccgtacatggcatcctctggagggaggagccatttcccctgaatgtcacgttgcgcctgaccaaccttttccatcttatagagaagcgctttggtcgcaccgtaatccttgtggagagcatctttgatctcagtgatagataggggccgatccgcttctttcaggacatctcggatctgcaccctctctctactcatttgaagttcggcgctatccccgagccacgtccaaagaccccgctctttatcgaattgcagatcgcccttgcggtcctcggtatccctccccgtgatgaacagggttgctttcgattgatgccggtcaggctttttcaagttccacaatgtgtccgcacaccctgtcaacccggtactgcccgagacattgtgcaacgggtcagatgactcctgttttcggtcgtggtggattaaaatgatcgcaatggaatatgcggcggccaattgttgaaacggctccaggtctttgtaatccccctcatatatggagtcatgcttccccttgatcggcctgatcttttgaagcgtgtcgatgacgataaggcgtgcatcatcttggtgccccttgatccacgtttccaggaagtctatggtattcgggcctttcccgccgcccatgagagggatgtcgttacagaaatacgccctggttggtggagatgcgtcccccaaaatcttgtccaagcggctcttgaagcggcgtggactgtcttccaaggcacagtgcagcacactcccaaccgatgtctcgaagtgcccgagtgcctgcatccccgacgcaatcgcaacggataggcccattgtgagccagctcttcccgatctttggagccccactgaggatggccaggccttccgggagaatatcctcgatgatgtatctcggctccggtagttccatctctacgagggttgcgaaggatatgatcgaaggggccttgtcgctggcaggcgatgcttcagtcggttcggtcggtttctcttgtggctgctgatacaatgaagtgcgctgaatgatctcgttcaactcggcctgaacctgttcccggctcttgccccgtgcccagtcactaaagtccgagccatcgtcagcgaatggatgcaagtcgatgattttcacggatctgcagtgtctgctcaggaactcggctttttctttcgcgtaccggcggcccgctgtgtcggcatccgcaaagatgatgatgtcgctatccctgagaggctcgtgaatgctggcttcagtgcagtgctttaggaatcctgattggttcggaaatgttgtgggtaaatatccgtaagatagggctgtctcagcatccctctcaccctcgcaaacaaacaccgtctcaccgggtctgttcacgagcaggtgcacgttgtagagcgtgggtcgcaccccttccattttccaggtgtaagatccatcaggagcgatgccagtttgcatgaaccggtcacccttaacctcagtgtcgaagcggatcttcgccgatagaggatggccgtgttcatcgcagtaggtgtaagtgttccggatttttctttgccgatgcgacgtctttgaggtttgagttatggttgttttgtggctgccattcccggaaggcgtgatgcccaattcctgacatgattccttgaacgagagtccctttgtccactgcaaatactcgatcccgtcaccctttgcatcgcattggcggcaccagtatcgtccctgttgcggccagactctgaatcggtcattaccaccgcattttggacacggtcctgcgtattcacctccatcggttgtcgctttccattttacggtcgtatatcgattaattagctcaaggaattggtttccattgattttttgcgatttcatcgctatacttcccccaccataaaaacccaagaatgtaataattgttccggcctcccagccggatttttctttgtttacggttttctttcaggcaacctgtggatccaatcctctaggtcttctcggctgcaccgcaagagacgtccccctggggttgtgcgaaaagttggcccctcgccttgttcgagccatcgagcgagcgttcgaaggctgacccccagcatttgcgccacttgggttttattcagcatcatctccatttttcttctcccttctaccttccatgacaggcggtttatggtaaaaaaaatcactgggcatttttaacgaattcgagccatcggcgggcacttacgaacagatgagattcacatgggccgggcccaagatagtcctctgcttcactaagaaacaggctctcgggcatgaaccggatcagtcgccgaggcagtcgagacccatgagcccagtcgagaacacagtccgcaaagcaataaaactcttggtgctcgatatattcctgcatcggccgatcactcaaaggctgaaaattctcaaacacgattggggtctttttcatttgctgcccacctccccccccgtggactgaaacatcgttaaatcggacaccgtgcgaaaatagcgtatgcagaatgcccacaacaacctggtcggattcgctcaagacacaacctctgccaggtccgcacggaggggcgacgtaaacctctgggcggaaaactcctgcggtcatccattgaaaaatcgtgttgggtttgatgaatggaaacactgtctttgtcaccgatctaatcgttttcataatattatactacctgctatggcgtgcggtgtcaagccataaaaaggaaatataaaaacaaacagttaagataaacaaacaattaaaagttgtggggaaattgggaagtttggtgagatgtcgccccccaaaggatagggggtagggggggtattttccggatagggggtggggtgaggcagtcggaggggaccggggactattgccccagttgatgaagcgaaggtattgttggtttcttctgggggtgtctaatcccacagcgctatcgggccttcgatatccatctccatcgtctccccgcacctcggacaagggcccggatcattccatggcgttacatcctttgccccacagaccgggcatgacaagtctgggaggaaatcgtgcctgagtctcgtcgggttatgccgcagcactccgctggggtccgtagaaataaggcaatcgctgagtccatggcaatgtggacatgagaccgtttgaaccactgactcaaatccgcagtcaatgccgcctgaaatgtgctcaaccctgtaaccgcaatcagggcataggaaagaaagcgatctacccatgtgtgcctcctctgaatttcagtcttccacgattgtttttaatgccttcaagtcggtatcgcaatgatcgttgcctccaggccatcgagctgtttctgctgctctctccaaaacttgaccagcaacaactcacacttccttgcggccaactcttgactcccggcaaagagaaaatgcgtgccatatctgacctcaaatgcgctgatgctctccaccgctgccctagggttaagttggctccgatagttgcctgttgcgagttgcgcgtatccctcctccaggatgacggcaaagtaatccaatgcttgtgaccgctccagttctcgctcgaacctggcccggcccttgcccaggcatccaaccaggtcatcaagtgtttttcgttcgattgcgatcatggtttcgagcccgtccacgctatagtctcccgtgtccagcttcctgacgatcatgggggccttgaaatactcatcccaggcgaccgctggttctctcgaatcctttatgaggaccggcccctccatacctcatccccccaaaccactaattttacgaccagcactccagcaagactagacagactcgtccctgaactcttcgatgcaccctgccaaatacagatagtctcgggcatcagggtctccattttcaatacgggtccgacattcccccaagatctcccgccatgatctcattgaaaaaacttctatctcacgttcactatcaacatcccaacatcgccgcttgaacatcacgccaaactcaccgattgcaaatgtgtctaacaaccgctccagaaccacataagcattgcggagggagtggggagcgctgcgataatcatcaagattgaatacgctgccatacccatggtggttcagaaaatcctttgcgtcactgaatccacaataccgacccagaaattctgtgtgcccggaaatacaatgatccgaccacaagatacactcggaggctagactggaatactcccacttataatcgtcatcgacctgactgacgaataacataaggtccccataggcattggatagctcctcaagtgtaatctccggcaacattttcggattccgcgcattttcctgttctaagatccgctcgcttttcatgatcctctactgttgtttcctcgtcgtgattttcttaagatccggtgtccttatcgagttcaaaggacagcttcggctgcccgaagaagtgccagagtgctgagtccacaatatgagaaactgaaacgccgtcttggtacatctcctgaagtctatcatagagaacaccgtcgatcgtgatggctaacttctcccggcgccccactttgtgctttttaacgatcggtgctcgtggtgccatccgctgtgtcatcgctcctcctgattcgttcatcgagcatttcttttaaccggcccagttggtcgggtgtttgttgcctcaaatccttcagtagctcctgaaactcggggctctcgtcaatcggtgggagcgccctcctgcgttttttctttgccatggtgtcctccctcttatgcagccttgagaaactgtcgcacggtgcccctcgtaaactctctcccagccctgttgaacagtccctcagacgccagcttggtgatgatttttctctcagagtatccttgactgtggagccgctggatgcgctgaatgacccgctgctcatcagcattctcgatcacgttcccggcatcatcgaactggaacccatacggcgcatgacgggaaacacgacccccgagctctcgtttccgagcaagtgcaaaacgggtattcagtgcgatctttttccgctcgaatgtggccatcgccgcccgcatcgtgaacagcatctcctgggccgggtcggtcagatccacttcaccgccttcggataccaggtgcagcttgactccctttttggcgcattgcttgcccagccggatcgccccctcagtctccctgttgagccgatcgagcttcaccgtgagcaggtgctggacgttcttccttgagacgagctcttggatctctttgaacttggggcggtcctcgtctttaccggatgcaccctcgactccgacatggacaatttcaaggcccagaactgccgcatactgacggcaccgggattcctgcgcctcaaggctgatcccgtgctttcgctgctcatcggtgcttacccggcaatagatcgctgctctcatgggcctgacctccataataaggattgaaaacatcatacccccgcacttatcagttgtcaacagaaacaatattcttatacaactaatatatcttttctaactcttattacattacgtattttcaagaaattggtactcaaccgttcccttgcggaccagtttgcggactcccgtccgtgttacattctctcaagaggctgaatggtttgcgcattcaggctgtcgccccggaggtcgtgtcgaccctcgcaatggaaaactcggcttcgcaggatcgccgtagtcgcacgatctcccccaggcaacaacaaggtttacccggaggtcataggcccggaaatcgccccatattgcggcagtcgtcctctgtggtcctttcccaaaaaacctcattaataaacgctaaaatacttttttagattcgaatgactttttttgtcgtacttgatgactcgtttgtcctaatttgacacatgttactgatattttgtccccccgaggggagaaaggagatgcgaagatgatgaggatgatattgatagcggttattttgacgatgtttgcaggatctgggtggggacaaaataagcaggtccgtgatgccaatggtcgccttgtggagacttggagccaaaagggaaacaccacgcaggtgcgggataaaaatggtagtttgcttgaaacaaggacacagcacggcggcaacattgatgttcgggaccgcaacggacggcttataagaacagagaagattggcaagtgacttgccactgggcaattagcagatggttgacttctgaagttttgtcgctctcgtcctcagagggggctctatttatcttgagcccatgggcccttaagataaaaataagcaagtgttttcgccatctaagaactcccgtccctctggtctgtgattccaatgttgctacgatttagagcgcgttgtactggccaacacgaacaaaaaatgacgacaacattaaaaaataacttctcatttgtgtcctcatttgacaatttggtttggtatcagtttcggaaaaccctatctgtgcgggggcgatctgaagtggtcccggtcatagaagcacacgtaacacttttccatcagtcaccactgaaactcgttgagcgaagaactccaaagcaaccgcaaggggaacaaatgagtatcaaggatcaaaaagggaattcctggaacccagatcaaataatgattgcggaccgagtcttgccttactattttctcagacgaaaggaggaccatgacgcagaaaaccgatcactataacctgttgttagaggattggattcccgtactttggaacgatggtcgatacagccgggtcggaatcattgaagcactcacgcaatcaggccgaattcgacagattgcttcctcaaacccaatgggtcgtatcgcgattgtaagatttctgctggctttactgtattggtgccgagggaatccgactgaagggagggaatcaggctttcatacttctttccctgaaacgtggttctcgaaattggacgccaaccaaagcctattttcgctcttcagagacgagaaacgattctatcagtttccaccttccaagaatgccaagaagctctctgcaaattatctaatccatgagataccaacggggaccaacaagaggcattttcgccactctaccgatggcacaaatggattatgtccagcgtgctgcgccgagggattgttgcgactcccaatgttcgccacctcgggaggacggggtaagcctccgggtataaatggaaaacctccactctacgtcattccacagtgtacatcacttgcagcaacgctgagactttcatggctatcagcatcgaatcaggggtttcccgcttgggaaaagcctgatttggaactcccaaaaactggggtggtccctattctcgtcggtctgacatggctgccgaggcgagtctggcttgacaaccctgaagattgttcggctgcttgcatttcctgcgggcgcagagatcgtctcgtacgaatgtgtgtattcgaaggcatcgggagcaccaagacaaatcctgaagattcgggccgaacttggcaagatccccatcttattttgactgacatcgctaaaggctcctctcgggcccttgctgtgcgtgatgcacttggtgcaagtgatggcgcttctgggcagtgggcaatgattgcggctggcatacttcaaaaccaagaatcaacagacaccatgcatcacggaatccaggatagcggagctgaggggaagcacgtcaaagcatggattgttggcttttcaaccgttcagaacgacaaatacctggaagcaagagaatacctgatgccatattcattgtatccgtcccaggttcctaataaccttgaacaacttgaacgatggcaaaaagagtcgcgaaggattggaaaacaactagctgggattgtgggagggaagcttaaaggagacacagcgatctcttctattcgccatcatattgaggaaaaggtctcggttaaggtgccagagttacttgtgggagaggagggcacatggaaccaagcggcacaagaatacaaaacgataatggtttcaatcgccaaatcgctgtcacctggtttcacctcatcagcattactaaagaggattcgaatagctggtctgaagccaaatatgagtccgaaagaaaaggagggtgaacagccgaaaggcagcaaaggaggagacaagtgactccgacggatcagtacattcatgtcttaactcggctcaagttaggagacttaggacttttgagagcaaacgcaggcaagaggcttgatgagtcggtgagaggctttgatctctttgcaggcctttggtggccattgcgacaaagaaacgaacgggttccccgccgagaagtggcatggctcattgcgaagctctacgcttttcgtcccatcccgcattcagctgggacttaccttgctcttcagttgggacggtctcagccaatcgaacctagggcacaacaaaaataccggcaagcattcgataggatgctggcccttccagtcaaccagattgagccggccttgcaatgggcgcttggtagggtcgcatcaaccagagattttggactagattgggtcaacctgacggatgaactctccatttgggaacgggaaacaacccgcctcaaatgggctacagcattcctaagaatcaacgaaagggcatagaaatgttaattgagattcatgtcattcaaaatcatagccccgctaatctaaaccgcgatgacctaggcgctcccaagacgtgctattttggtggggtaatgcgctcccgcatctcaagccaatgtcttaaacgaagtatccgtatgaatgatgagttcaaacaactcctaggcggagttcggacccggcagcttgcaaaagtcattggcgacaaagttgatggtcaagccaataccaggaaacgtgcggcaaggattcttgaaaagtgtgggattaaaactaaggacgattctaagagcgacatgctggtctataccactcgtgaggcgatcagcgagatggcaggaattctgcagagtgaccatggcaaaacagatgaacaactggcagaggagtttggcaaagtgatagttggacggacagctgtaccagacatcgccctcagtggcagaatgttggaaacgggcgtactccaagacacggcagtggaggctgcacttcaggttgctcatgcgatttccacacacgaagctcgtcctgaggtcgattactatgtggctacagatgatatcccgggccatgatgcaggcgccggctatgtagacgaagccatgttctcctccgcgtgtttctataagtacttctcaattcactgggagacgctcataaaaaatcttcaaggttataatggaaaggaagagcagttggcagcccatacggttggtaggttcatccgaactgctgcagtggccaatccctcgggtaaacaaaacagcttcgcagcacataatccaccagatggaatgctggtagaaatcaaggaagctcccataagctatgctaatgctttcgcgagtcctgtagcctatggtactcgtgacatcatctcccaaagcgttgcccaattggggcaatacgttagagatcttgatacgggatatggcaaaccgcaacagagattctggttttccccaaatctgcgccaccatttgaccgtgatcgaaaataagcaagaatgttctctttcggagaacaacttcaaatcgctggacgaattgattaccacagtgctcgacgccatgggccacgattggaaagcagttcagaaggccgtcattagcccggagtgggctcaatgagtgccaagacactttttcttcgcttagaaggaccgcttcaatcctgggggggtcaggaatcgaagtttgtcattcgtcgtacttcgcggtctcctactaaatcgggagtgttcggaatcctttgtgcagctttgggaatccccagacctttggcgcacaaagaatggcttccaacacttgccacactgcacatgggtgttcgcattgatgagccaggtgtacggtggtgggactatcatacggtgggcgcacgaatgcctatggccattgctgagggggaaggaaagaccaagcctggagcaatgctcactaggcgtgaatatctctgcgatgcatccttcctcgtcgcgctacagggcgagcaaagcctcgttgaaaagctagaggccgcaatccgacgtccccaatcgacgctttaccttggacgaaagtcatgcttgccatctcgtcccatgttacaatatcctcttggagattttcctgaccttggttctgccctgaaatcagcaccttggtctccccggttaaaaactgatcttgtcccccaagttgtcgagtgtcttctcgattggcagccaactccggaccagcctcatgcaccagatgatgcatttgtttgttttgatgtgccactaacgttcgagcctccagcgcatggccctcgatttgtcatccgccagcagtatagtgtcgggtctccaggcgagattaatgtcgcatcaaaggccctccagaatccaacacccccaccacttcgaccgcgagcagattaccgtaattcagaatacacaaagatgcgggaggagcgactaagacgtgattgccacctctgtgttttctgcaaatcgcctgccaccacagttcagcatgtcacatatcgtcacgccggtggaggagagcgtcttgatgaattaagagccctctgtaggctctgccatgactcagtaactatgattgaatatggtttgggaatgggtattgatcgcatcgacccgtgtgacccaatttggcgaagactaatcatagaaaagagagaccagatcgtaaattttcgttcattagagacccgtcggcgtcgcctgaaaccagaggaggtggaatagccatgtatctgtcttgtctcttgataaacgtgggcagcaatcccgatcggcctcgccccggacgattatggcttcgaaacatgtacagggtccatcaacgtttgtgcatggggtttccatcgagagatcgcaaaacccaagaccctgattttctaaatccgtacaggccatatgacttcattcctgctcagtatccgactagccatccacaccaagacagttcctcgagagaggcaaaggcagttcatgttcctagaaataacacacaaggattcctttaccgggtcgaccctctctcaaataccggtcgagcgatgatcctcgtacaatctggtgtgatgcctgactggcattatgcctttcagaacgcctgccatattcttggggcaccaccagaagtgaaaccataccaccctcagtttgaggctggccaatgcttgaggttccgcctcgttgccaacccgttaaggaaagtgagcaggaattctttgggtgcatctggcaagccttttgacgaaggctggcagggcaaagaagtacctgtgcccactgcagagcttgacaagtggttggagcgccgagccgagcccagctggacttgtccgaagaattccgaaagcactcaacgaccaccgggctttcgattgcagaccatcagtattgtacgaacaggatacgtttacgttaaccacggacaagatcaaactggcgggcgtagaattcggttagctcgatacgagggaagcctgatggtaaccgattccgaaaattttcgaaatacgatctcccgtgggattggccccggtaaagcctttgggtttgggctcttgtcagttgctcccatgtaactccaaatttagtagagactacatgagaattcaggatctccatttactgccaaaattcagggacggttggagctatctctacgtagagcactgcaagattgagcaggaaagtaggtcagtagctctgtttgatgcttcgggaaaggtacctgtcccctgcgcaactctttgtctgctgatgctcggcccaggaacgagcattacccacgcagcagtgacggctttggcagacaatggttgtttggtttgctggtgcggcgaacagggtgttcggttttacgcctacgggcagggaaaaacccgtcgcgcccataatctacttcaccaagcaagactctgggcgaatgatgagttgcggctcaaggtcgttcgaaaaatgtattcgatgcggtttgataccaccctagaggactctctaacattgcgccagattcggggcaaagagggagtaagggtccgcgatgcgtattctcgagccagccgtgagaccggtgtgccatggagtggacggaactatgaccggacgaactggaattccggcgatcccgtaaatcgtgcgctctccgcagcaaacagctgtctctacggtatttgtcatgctggcatacttgctctggggctctctccggccttgggtttcatccatacagggaaaatgctctcattcgtctatgacgtagctgacctgtacaagacggaagtctccgttccgatcgcctttcaaatggcgtcccagggatccgaccagcttgaaagccgggtaaggaaagcgatcagagacaagttgaaagaaaccaagcttcttaagagtattgtttcagacattcactctgtcttggatctcgggacaaaggaccgctgtctacgagaggatgcagatttcgatgccgacccttcagtgccgggcgggttgtgggatttgggtggagaaacaaatgagggtgggatgaactatggagatactatcgacataggagaaaacggtgacagtggttattcttgaaaaggttccgggcggtctccgaggggaactgacacgatggatgcttgaggccaaagcaggggttttcgtcggtagcgtttcagggatggtgagagaccttttatggaagaagatctgcgaagaatcacgaggtggctctgttgtgatgattttcagcgacaacgctgaacaaggattttctgttaggatgatgggagagccgagcaggcatgtcgttgacttcgaggggctatcgctcatacgagtcccctgttgatgcggcttttgtcagtatgttccccacgcacgtgggggtgaaccgccgtaattgtggcgcccgacccggataatgtgatgttccccacgcacgtgggggtgaaccggattggatcaaaccacgcagaaaacgctgttaatgttccccacgcacgtgggggtgaaccggtatcaataccccacatcctgtggtaatcattatgtt

SEQ ID NO: 1008 - DNA, 106687 bp, Artificial Sequence
  Synthetic Oligonucleotide
  misc_feature (1)..(92978): n is a, c, g, or t
nnnnnnnnnnnnnnnnnnnnnnnnnnnnnnnnnnnnnnnnnnnnnnnnnnnnnnnnnnnnnnnnnnnnnnnnnnnnnnnnnnnnnnnnnnnnnnnnnnnnnnnnnnnnnnnnnnnnnnnnnnnnnnnnnnnnnnnnnnnnnnnnnnnnnnnnnnnnnnnnnnnnnnnnnnnnnnnnnnnnnnnnnnnnnnnnnnnnnnnnnnnnnnnnnnnnnnnnnnnnnnnnnnnnnnnnnnnnnnnnnnnnnnnnnnnnnnnnnnnnnnnnnnnnnnnnnnnnnnnnnnnnnnnnnnnnnnnnnnnnnnnnnnnnnnnnnnnnnnnnnnnnnnnnnnnnnnnnnnnnnnnnnnnnnnnnnnnnnnnnnnnnnnnnnnnnnnnnnnnnnnnnnnnnnnnnnnnnnnnnnnnnnnnnnnnnnnnnnnnnnnnnnnnnnnnnnnnnnnnnnnnnnnnnnnnnnnnnnnnnnnnnnnnnnnnnnnnnnnnnnnnnnnnnnnnnnnnnnnnnnnnnnnnnnnnnnnnnnnnnnnnnnnnnnnnnnnnnnnnnnnnnnnnnnnnnnnnnnnnnnnnnnnnnnnnnnnnnnnnnnnnnnnnnnnnnnnnnnnnnnnnnnnnnnnnnnnnnnnnnnnnnnnnnnnnnnnnnnnnnnnnnnnnnnnnnnnnnnnnnnnnnnnnnnnnnnnnnnnnnnnnnnnnnnnnnnnnnnnnnnnnnnnnnnnnnnnnnnnnnnnnnnnnnnnnnnnnnnnnnnnnnnnnnnnnnnnnnnnnnnnnnnnnnnnnnnnnnnnnnnnnnnnnnnnnnnnnnnnnnnnnnnnnnnnnnnnnnnnnnnnnnnnnnnnnnnnnnnnnnnnnnnnnnnnnnnnnnnnnnnnnnnnnnnnnnnnnnnnnnnnnnnnnnnnnnnnnnnnnnnnnnnnnnnnnnnnnnnnnnnnnnnnnnnnnnnnnnnnnnnnnnnnnnnnnnnnnnnnnnnnnnnnnnnnnnnnnnnnnnnnnnnnnnnnnnnnnnnnnnnnnnnnnnnnnnnnnnnnnnnnnnnnnnnnnnnnnnnnnnnnnnnnnnnnnnnnnnnnnnnnnnnnnnnnnnnnnnnnnnnnnnnnnnnnnnnnnnnnnnnnnnnnnnnnnnnnnnnnnnnnnnnnnnnnnnnnnnnnnnnnnnnnnnnnnnnnnnnnnnnnnnnnnnnnnnnnnnnnnnnnnnnnnnnnnnnnnnnnnnnnnnnnnnnnnnnnnnnnnnnnnnnnnnnnnnnnnnnnnnnnnnnnnnnnnnnnnnnnnnnnnnnnnnnnnnnnnnnnnnnnnnnnnnnnnnnnnnnnnnnnnnnnnnnnnnnnnnnnnnnnnnnnnnnnnnnnnnnnnnnnnnnnnnnnnnnnnnnnnnnnnnnnnnnnnnnnnnnnnnnnnnnnnnnnnnnnnnnnnnnnnnnnnnnnnnnnnnnnnnnnnnnnnnnnnnnnnnnnnnnnnnnnnnnnnnnnnnnnnnnnnnnnnnnnnnnnnnnnnnnnnnnnnnnnnnnnnnnnnnnnnnnnnnnnnnnnnnnnnnnnnnnnnnnnnnnnnnnnnnnnnnnnnnnnnnnnnnnnnnnnnnnnnnnnnnnnnnnnnnnnnnnnnnnnnnnnnnnnnnnnnnnnnnnnnnnnnnnnnnnnnnnnnnnnnnnnnnnnnnnnnnnnnnnnnnnnnnnnnnnnnnnnnnnnnnnnnnnnnnnnnnnnnnnnnnnnnnnnnnnnnnnnnnnnnnnnnnnnnnnnnnnnnnnnnnnnnnnnnnnnnnnnnnnnnnnnnnnnnnnnnnnnnnnnnnnnnnnnnnnnnnnnnnnnnnnnnnnnnnnnnnnnnnnnnnnnnnnnnnnnnnnnnnnnnnnnnnnnnnnnnnnnnnnnnnnnnnnnnnnnnnnnnnnnnnnnnnnnnnnnnnnnnnnnnnnnnnnnnnnnnnnnnnnnnnnnnnnnnnnnnnnnnnnnnnnnnnnnnnnnnnnnnnnnnnnnnnnnnnnnnnnnnnnnnnnnnnnnnnnnnnnnnnnnnnnnnnnnnnnnnnnnnnnnnnnnnnnnnnnnnnnnnnnnnnnnnnnnnnnnnnnnnnnnnnnnnnnnnnnnnnnnnnnnnnnnnnnnnnnnnnnnnnnnnnnnnnnnnnnnnnnnnnnnnnnnnnnnnnnnnnnnnnnnnnnnnnnnnnnnnnnnnnnnnnnnnnnnnnnnnnnnnnnnnnnnnnnnnnnnnnnnnnnnnnnnnnnnnnnnnnnnnnnnnnnnnnnnnnnnnnnnnnnnnnnnnnnnnnnnnnnnnnnnnnnnnnnnnnnnnnnnnnnnnnnnnnnnnnnnnnnnnnnnnnnnnnnnnnnnnnnnnnnnnnnnnnnnnnnnnnnnnnnnnnnnnnnnnnnnnnnnnnnnnnnnnnnnnnnnnnnnnnnnnnnnnnnnnnnnnnnnnnnnnnnnnnnnnnnnnnnnnnnnnnnnnnnnnnnnnnnnnnnnnnnnnnnnnnnnnnnnnnnnnnnnnnnnnnnnnnnnnnnnnnnnnnnnnnnnnnnnnnnnnnnnnnnnnnnnnnnnnnnnnnnnnnnnnnnnnnnnnnnnnnnnnnnnnnnnnnnnnnnnnnnnnnnnnnnnnnnnnnnnnnnnnnnnnnnnnnnnnnnnnnnnnnnnnnnnnnnnnnnnnnnnnnnnnnnnnnnnnnnnnnnnnnnnnnnnnnnnnnnnnnnnnnnnnnnnnnnnnnnnnnnnnnnnnnnnnnnnnnnnnnnnnnnnnnnnnnnnnnnnnnnnnnnnnnnnnnnnnnnnnnnnnnnnnnnnnnnnnnnnnnnnnnnnnnnnnnnnnnnnnnnnnnnnnnnnnnnnnnnnnnnnnnnnnnnnnnnnnnnnnnnnnnnnnnnnnnnnnnnnnnnnnnnnnnnnnnnnnnnnnnnnnnnnnnnnnnnnnnnnnnnnnnnnnnnnnnnnnnnnnnnnnnnnnnnnnnnnnnnnnnnnnnnnnnnnnnnnnnnnnnnnnnnnnnnnnnnnnnnnnnnnnnnnnnnnnnnnnnnnnnnnnnnnnnnnnnnnnnnnnnnnnnnnnnnnnnnnnnnnnnnnnnnnnnnnnnnnnnnnnnnnnnnnnnnnnnnnnnnnnnnnnnnnnnnnnnnnnnnnnnnnnnnnnnnnnnnnnnnnnnnnnnnnnnnnnnnnnnnnnnnnnnnnnnnnnnnnnnnnnnnnnnnnnnnnnnnnnnnnnnnnnnnnnnnnnnnnnnnnnnnnnnnnnnnnnnnnnnnnnnnnnnnnnnnnnnnnnnnnnnnnnnnnnnnnnnnnnnnnnnnnnnnnnnnnnnnnnnnnnnnnnnnnnnnnnnnnnnnnnnnnnnnnnnnnnnnnnnnnnnnnnnnnnnnnnnnnnnnnnnnnnnnnnnnnnnnnnnnnnnnnnnnnnnnnnnnnnnnnnnnnnnnnnnnnnnnnnnnnnnnnnnnnnnnnnnnnnnnnnnnnnnnnnnnnnnnnnnnnnnnnnnnnnnnnnnnnnnnnnnnnnnnnnnnnnnnnnnnnnnnnnnnnnnnnnnnnnnnnnnnnnnnnnnnnnnnnnnnnnnnnnnnnnnnnnnnnnnnnnnnnnnnnnnnnnnnnnnnnnnnnnnnnnnnnnnnnnnnnnnnnnnnnnnnnnnnnnnnnnnnnnnnnnnnnnnnnnnnnnnnnnnnnnnnnnnnnnnnnnnnnnnnnnnnnnnnnnnnnnnnnnnnnnnnnnnnnnnnnnnnnnnnnnnnnnnnnnnnnnnnnnnnnnnnnnnnnnnnnnnnnnnnnnnnnnnnnnnnnnnnnnnnnnnnnnnnnnnnnnnnnnnnnnnnnnnnnnnnnnnnnnnnnnnnnnnnnnnnnnnnnnnnnnnnnnnnnnnnnnnnnnnnnnnnnnnnnnnnnnnnnnnnnnnnnnnnnnnnnnnnnnnnnnnnnnnnnnnnnnnnnnnnnnnnnnnnnnnnnnnnnnnnnnnnnnnnnnnnnnnnnnnnnnnnnnnnnnnnnnnnnnnnnnnnnnnnnnnnnnnnnnnnnnnnnnnnnnnnnnnnnnnnnnnnnnnnnnnnnnnnnnnnnnnnnnnnnnnnnnnnnnnnnnnnnnnnnnnnnnnnnnnnnnnnnnnnnnnnnnnnnnnnnnnnnnnnnnnnnnnnnnnnnnnnnnnnnnnnnnnnnnnnnnnnnnnnnnnnnnnnnnnnnnnnnnnnnnnnnnnnnnnnnnnnnnnnnnnnnnnnnnnnnnnnnnnnnnnnnnnnnnnnnnnnnnnnnnnnnnnnnnnnnnnnnnnnnnnnnnnnnnnnnnnnnnnnnnnnnnnnnnnnnnnnnnnnnnnnnnnnnnnnnnnnnnnnnnnnnnnnnnnnnnnnnnnnnnnnnnnnnnnnnnnnnnnnnnnnnnnnnnnnnnnnnnnnnnnnnnnnnnnnnnnnnnnnnnnnnnnnnnnnnnnnnnnnnnnnnnnnnnnnnnnnnnnnnnnnnnnnnnnnnnnnnnnnnnnnnnnnnnnnnnnnnnnnnnnnnnnnnnnnnnnnnnnnnnnnnnnnnnnnnnnnnnnnnnnnnnnnnnnnnnnnnnnnnnnnnnnnnnnnnnnnnnnnnnnnnnnnnnnnnnnnnnnnnnnnnnnnnnnnnnnnnnnnnnnnnnnnnnnnnnnnnnnnnnnnnnnnnnnnnnnnnnnnnnnnnnnnnnnnnnnnnnnnnnnnnnnnnnnnnnnnnnnnnnnnnnnnnnnnnnnnnnnnnnnnnnnnnnnnnnnnnnnnnnnnnnnnnnnnnnnnnnnnnnnnnnnnnnnnnnnnnnnnnnnnnnnnnnnnnnnnnnnnnnnnnnnnnnnnnnnnnnnnnnnnnnnnnnnnnnnnnnnnnnnnnnnnnnnnnnnnnnnnnnnnnnnnnnnnnnnnnnnnnnnnnnnnnnnnnnnnnnnnnnnnnnnnnnnnnnnnnnnnnnnnnnnnnnnnnnnnnnnnnnnnnnnnnnnnnnnnnnnnnnnnnnnnnnnnnnnnnnnnnnnnnnnnnnnnnnnnnnnnnnnnnnnnnnnnnnnnnnnnnnnnnnnnnnnnnnnnnnnnnnnnnnnnnnnnnnnnnnnnnnnnnnnnnnnnnnnnnnnnnnnnnnnnnnnnnnnnnnnnnnnnnnnnnnnnnnnnnnnnnnnnnnnnnnnnnnnnnnnnnnnnnnnnnnnnnnnnnnnnnnnnnnnnnnnnnnnnnnnnnnnnnnnnnnnnnnnnnnnnnnnnnnnnnnnnnnnnnnnnnnnnnnnnnnnnnnnnnnnnnnnnnnnnnnnnnnnnnnnnnnnnnnnnnnnnnnnnnnnnnnnnnnnnnnnnnnnnnnnnnnnnnnnnnnnnnnnnnnnnnnnnnnnnnnnnnnnnnnnnnnnnnnnnnnnnnnnnnnnnnnnnnnnnnnnnnnnnnnnnnnnnnnnnnnnnnnnnnnnnnnnnnnnnnnnnnnnnnnnnnnnnnnnnnnnnnnnnnnnnnnnnnnnnnnnnnnnnnnnnnnnnnnnnnnnnnnnnnnnnnnnnnnnnnnnnnnnnnnnnnnnnnnnnnnnnnnnnnnnnnnnnnnnnnnnnnnnnnnnnnnnnnnnnnnnnnnnnnnnnnnnnnnnnnnnnnnnnnnnnnnnnnnnnnnnnnnnnnnnnnnnnnnnnnnnnnnnnnnnnnnnnnnnnnnnnnnnnnnnnnnnnnnnnnnnnnnnnnnnnnnnnnnnnnnnnnnnnnnnnnnnnnnnnnnnnnnnnnnnnnnnnnnnnnnnnnnnnnnnnnnnnnnnnnnnnnnnnnnnnnnnnnnnnnnnnnnnnnnnnnnnnnnnnnnnnnnnnnnnnnnnnnnnnnnnnnnnnnnnnnnnnnnnnnnnnnnnnnnnnnnnnnnnnnnnnnnnnnnnnnnnnnnnnnnnnnnnnnnnnnnnnnnnnnnnnnnnnnnnnnnnnnnnnnnnnnnnnnnnnnnnnnnnnnnnnnnnnnnnnnnnnnnnnnnnnnnnnnnnnnnnnnnnnnnnnnnnnnnnnnnnnnnnnnnnnnnnnnnnnnnnnnnnnnnnnnnnnnnnnnnnnnnnnnnnnnnnnnnnnnnnnnnnnnnnnnnnnnnnnnnnnnnnnnnnnnnnnnnnnnnnnnnnnnnnnnnnnnnnnnnnnnnnnnnnnnnnnnnnnnnnnnnnnnnnnnnnnnnnnnnnnnnnnnnnnnnnnnnnnnnnnnnnnnnnnnnnnnnnnnnnnnnnnnnnnnnnnnnnnnnnnnnnnnnnnnnnnnnnnnnnnnnnnnnnnnnnnnnnnnnnnnnnnnnnnnnnnnnnnnnnnnnnnnnnnnnnnnnnnnnnnnnnnnnnnnnnnnnnnnnnnnnnnnnnnnnnnnnnnnnnnnnnnnnnnnnnnnnnnnnnnnnnnnnnnnnnnnnnnnnnnnnnnnnnnnnnnnnnnnnnnnnnnnnnnnnnnnnnnnnnnnnnnnnnnnnnnnnnnnnnnnnnnnnnnnnnnnnnnnnnnnnnnnnnnnnnnnnnnnnnnnnnnnnnnnnnnnnnnnnnnnnnnnnnnnnnnnnnnnnnnnnnnnnnnnnnnnnnnnnnnnnnnnnnnnnnnnnnnnnnnnnnnnnnnnnnnnnnnnnnnnnnnnnnnnnnnnnnnnnnnnnnnnnnnnnnnnnnnnnnnnnnnnnnnnnnnnnnnnnnnnnnnnnnnnnnnnnnnnnnnnnnnnnnnnnnnnnnnnnnnnnnnnnnnnnnnnnnnnnnnnnnnnnnnnnnnnnnnnnnnnnnnnnnnnnnnnnnnnnnnnnnnnnnnnnnnnnnnnnnnnnnnnnnnnnnnnnnnnnnnnnnnnnnnnnnnnnnnnnnnnnnnnnnnnnnnnnnnnnnnnnnnnnnnnnnnnnnnnnnnnnnnnnnnnnnnnnnnnnnnnnnnnnnnnnnnnnnnnnnnnnnnnnnnnnnnnnnnnnnnnnnnnnnnnnnnnnnnnnnnnnnnnnnnnnnnnnnnnnnnnnnnnnnnnnnnnnnnnnnnnnnnnnnnnnnnnnnnnnnnnnnnnnnnnnnnnnnnnnnnnnnnnnnnnnnnnnnnnnnnnnnnnnnnnnnnnnnnnnnnnnnnnnnnnnnnnnnnnnnnnnnnnnnnnnnnnnnnnnnnnnnnnnnnnnnnnnnnnnnnnnnnnnnnnnnnnnnnnnnnnnnnnnnnnnnnnnnnnnnnnnnnnnnnnnnnnnnnnnnnnnnnnnnnnnnnnnnnnnnnnnnnnnnnnnnnnnnnnnnnnnnnnnnnnnnnnnnnnnnnnnnnnnnnnnnnnnnnnnnnnnnnnnnnnnnnnnnnnnnnnnnnnnnnnnnnnnnnnnnnnnnnnnnnnnnnnnnnnnnnnnnnnnnnnnnnnnnnnnnnnnnnnnnnnnnnnnnnnnnnnnnnnnnnnnnnnnnnnnnnnnnnnnnnnnnnnnnnnnnnnnnnnnnnnnnnnnnnnnnnnnnnnnnnnnnnnnnnnnnnnnnnnnnnnnnnnnnnnnnnnnnnnnnnnnnnnnnnnnnnnnnnnnnnnnnnnnnnnnnnnnnnnnnnnnnnnnnnnnnnnnnnnnnnnnnnnnnnnnnnnnnnnnnnnnnnnnnnnnnnnnnnnnnnnnnnnnnnnnnnnnnnnnnnnnnnnnnnnnnnnnnnnnnnnnnnnnnnnnnnnnnnnnnnnnnnnnnnnnnnnnnnnnnnnnnnnnnnnnnnnnnnnnnnnnnnnnnnnnnnnnnnnnnnnnnnnnnnnnnnnnnnnnnnnnnnnnnnnnnnnnnnnnnnnnnnnnnnnnnnnnnnnnnnnnnnnnnnnnnnnnnnnnnnnnnnnnnnnnnnnnnnnnnnnnnnnnnnnnnnnnnnnnnnnnnnnnnnnnnnnnnnnnnnnnnnnnnnnnnnnnnnnnnnnnnnnnnnnnnnnnnnnnnnnnnnnnnnnnnnnnnnnnnnnnnnnnnnnnnnnnnnnnnnnnnnnnnnnnnnnnnnnnnnnnnnnnnnnnnnnnnnnnnnnnnnnnnnnnnnnnnnnnnnnnnnnnnnnnnnnnnnnnnnnnnnnnnnnnnnnnnnnnnnnnnnnnnnnnnnnnnnnnnnnnnnnnnnnnnnnnnnnnnnnnnnnnnnnnnnnnnnnnnnnnnnnnnnnnnnnnnnnnnnnnnnnnnnnnnnnnnnnnnnnnnnnnnnnnnnnnnnnnnnnnnnnnnnnnnnnnnnnnnnnnnnnnnnnnnnnnnnnnnnnnnnnnnnnnnnnnnnnnnnnnnnnnnnnnnnnnnnnnnnnnnnnnnnnnnnnnnnnnnnnnnnnnnnnnnnnnnnnnnnnnnnnnnnnnnnnnnnnnnnnnnnnnnnnnnnnnnnnnnnnnnnnnnnnnnnnnnnnnnnnnnnnnnnnnnnnnnnnnnnnnnnnnnnnnnnnnnnnnnnnnnnnnnnnnnnnnnnnnnnnnnnnnnnnnnnnnnnnnnnnnnnnnnnnnnnnnnnnnnnnnnnnnnnnnnnnnnnnnnnnnnnnnnnnnnnnnnnnnnnnnnnnnnnnnnnnnnnnnnnnnnnnnnnnnnnnnnnnnnnnnnnnnnnnnnnnnnnnnnnnnnnnnnnnnnnnnnnnnnnnnnnnnnnnnnnnnnnnnnnnnnnnnnnnnnnnnnnnnnnnnnnnnnnnnnnnnnnnnnnnnnnnnnnnnnnnnnnnnnnnnnnnnnnnnnnnnnnnnnnnnnnnnnnnnnnnnnnnnnnnnnnnnnnnnnnnnnnnnnnnnnnnnnnnnnnnnnnnnnnnnnnnnnnnnnnnnnnnnnnnnnnnnnnnnnnnnnnnnnnnnnnnnnnnnnnnnnnnnnnnnnnnnnnnnnnnnnnnnnnnnnnnnnnnnnnnnnnnnnnnnnnnnnnnnnnnnnnnnnnnnnnnnnnnnnnnnnnnnnnnnnnnnnnnnnnnnnnnnnnnnnnnnnnnnnnnnnnnnnnnnnnnnnnnnnnnnnnnnnnnnnnnnnnnnnnnnnnnnnnnnnnnnnnnnnnnnnnnnnnnnnnnnnnnnnnnnnnnnnnnnnnnnnnnnnnnnnnnnnnnnnnnnnnnnnnnnnnnnnnnnnnnnnnnnnnnnnnnnnnnnnnnnnnnnnnnnnnnnnnnnnnnnnnnnnnnnnnnnnnnnnnnnnnnnnnnnnnnnnnnnnnnnnnnnnnnnnnnnnnnnnnnnnnnnnnnnnnnnnnnnnnnnnnnnnnnnnnnnnnnnnnnnnnnnnnnnnnnnnnnnnnnnnnnnnnnnnnnnnnnnnnnnnnnnnnnnnnnnnnnnnnnnnnnnnnnnnnnnnnnnnnnnnnnnnnnnnnnnnnnnnnnnnnnnnnnnnnnnnnnnnnnnnnnnnnnnnnnnnnnnnnnnnnnnnnnnnnnnnnnnnnnnnnnnnnnnnnnnnnnnnnnnnnnnnnnnnnnnnnnnnnnnnnnnnnnnnnnnnnnnnnnnnnnnnnnnnnnnnnnnnnnnnnnnnnnnnnnnnnnnnnnnnnnnnnnnnnnnnnnnnnnnnnnnnnnnnnnnnnnnnnnnnnnnnnnnnnnnnnnnnnnnnnnnnnnnnnnnnnnnnnnnnnnnnnnnnnnnnnnnnnnnnnnnnnnnnnnnnnnnnnnnnnnnnnnnnnnnnnnnnnnnnnnnnnnnnnnnnnnnnnnnnnnnnnnnnnnnnnnnnnnnnnnnnnnnnnnnnnnnnnnnnnnnnnnnnnnnnnnnnnnnnnnnnnnnnnnnnnnnnnnnnnnnnnnnnnnnnnnnnnnnnnnnnnnnnnnnnnnnnnnnnnnnnnnnnnnnnnnnnnnnnnnnnnnnnnnnnnnnnnnnnnnnnnnnnnnnnnnnnnnnnnnnnnnnnnnnnnnnnnnnnnnnnnnnnnnnnnnnnnnnnnnnnnnnnnnnnnnnnnnnnnnnnnnnnnnnnnnnnnnnnnnnnnnnnnnnnnnnnnnnnnnnnnnnnnnnnnnnnnnnnnnnnnnnnnnnnnnnnnnnnnnnnnnnnnnnnnnnnnnnnnnnnnnnnnnnnnnnnnnnnnnnnnnnnnnnnnnnnnnnnnnnnnnnnnnnnnnnnnnnnnnnnnnnnnnnnnnnnnnnnnnnnnnnnnnnnnnnnnnnnnnnnnnnnnnnnnnnnnnnnnnnnnnnnnnnnnnnnnnnnnnnnnnnnnnnnnnnnnnnnnnnnnnnnnnnnnnnnnnnnnnnnnnnnnnnnnnnnnnnnnnnnnnnnnnnnnnnnnnnnnnnnnnnnnnnnnnnnnnnnnnnnnnnnnnnnnnnnnnnnnnnnnnnnnnnnnnnnnnnnnnnnnnnnnnnnnnnnnnnnnnnnnnnnnnnnnnnnnnnnnnnnnnnnnnnnnnnnnnnnnnnnnnnnnnnnnnnnnnnnnnnnnnnnnnnnnnnnnnnnnnnnnnnnnnnnnnnnnnnnnnnnnnnnnnnnnnnnnnnnnnnnnnnnnnnnnnnnnnnnnnnnnnnnnnnnnnnnnnnnnnnnnnnnnnnnnnnnnnnnnnnnnnnnnnnnnnnnnnnnnnnnnnnnnnnnnnnnnnnnnnnnnnnnnnnnnnnnnnnnnnnnnnnnnnnnnnnnnnnnnnnnnnnnnnnnnnnnnnnnnnnnnnnnnnnnnnnnnnnnnnnnnnnnnnnnnnnnnnnnnnnnnnnnnnnnnnnnnnnnnnnnnnnnnnnnnnnnnnnnnnnnnnnnnnnnnnnnnnnnnnnnnnnnnnnnnnnnnnnnnnnnnnnnnnnnnnnnnnnnnnnnnnnnnnnnnnnnnnnnnnnnnnnnnnnnnnnnnnnnnnnnnnnnnnnnnnnnnnnnnnnnnnnnnnnnnnnnnnnnnnnnnnnnnnnnnnnnnnnnnnnnnnnnnnnnnnnnnnnnnnnnnnnnnnnnnnnnnnnnnnnnnnnnnnnnnnnnnnnnnnnnnnnnnnnnnnnnnnnnnnnnnnnnnnnnnnnnnnnnnnnnnnnnnnnnnnnnnnnnnnnnnnnnnnnnnnnnnnnnnnnnnnnnnnnnnnnnnnnnnnnnnnnnnnnnnnnnnnnnnnnnnnnnnnnnnnnnnnnnnnnnnnnnnnnnnnnnnnnnnnnnnnnnnnnnnnnnnnnnnnnnnnnnnnnnnnnnnnnnnnnnnnnnnnnnnnnnnnnnnnnnnnnnnnnnnnnnnnnnnnnnnnnnnnnnnnnnnnnnnnnnnnnnnnnnnnnnnnnnnnnnnnnnnnnnnnnnnnnnnnnnnnnnnnnnnnnnnnnnnnnnnnnnnnnnnnnnnnnnnnnnnnnnnnnnnnnnnnnnnnnnnnnnnnnnnnnnnnnnnnnnnnnnnnnnnnnnnnnnnnnnnnnnnnnnnnnnnnnnnnnnnnnnnnnnnnnnnnnnnnnnnnnnnnnnnnnnnnnnnnnnnnnnnnnnnnnnnnnnnnnnnnnnnnnnnnnnnnnnnnnnnnnnnnnnnnnnnnnnnnnnnnnnnnnnnnnnnnnnnnnnnnnnnnnnnnnnnnnnnnnnnnnnnnnnnnnnnnnnnnnnnnnnnnnnnnnnnnnnnnnnnnnnnnnnnnnnnnnnnnnnnnnnnnnnnnnnnnnnnnnnnnnnnnnnnnnnnnnnnnnnnnnnnnnnnnnnnnnnnnnnnnnnnnnnnnnnnnnnnnnnnnnnnnnnnnnnnnnnnnnnnnnnnnnnnnnnnnnnnnnnnnnnnnnnnnnnnnnnnnnnnnnnnnnnnnnnnnnnnnnnnnnnnnnnnnnnnnnnnnnnnnnnnnnnnnnnnnnnnnnnnnnnnnnnnnnnnnnnnnnnnnnnnnnnnnnnnnnnnnnnnnnnnnnnnnnnnnnnnnnnnnnnnnnnnnnnnnnnnnnnnnnnnnnnnnnnnnnnnnnnnnnnnnnnnnnnnnnnnnnnnnnnnnnnnnnnnnnnnnnnnnnnnnnnnnnnnnnnnnnnnnnnnnnnnnnnnnnnnnnnnnnnnnnnnnnnnnnnnnnnnnnnnnnnnnnnnnnnnnnnnnnnnnnnnnnnnnnnnnnnnnnnnnnnnnnnnnnnnnnnnnnnnnnnnnnnnnnnnnnnnnnnnnnnnnnnnnnnnnnnnnnnnnnnnnnnnnnnnnnnnnnnnnnnnnnnnnnnnnnnnnnnnnnnnnnnnnnnnnnnnnnnnnnnnnnnnnnnnnnnnnnnnnnnnnnnnnnnnnnnnnnnnnnnnnnnnnnnnnnnnnnnnnnnnnnnnnnnnnnnnnnnnnnnnnnnnnnnnnnnnnnnnnnnnnnnnnnnnnnnnnnnnnnnnnnnnnnnnnnnnnnnnnnnnnnnnnnnnnnnnnnnnnnnnnnnnnnnnnnnnnnnnnnnnnnnnnnnnnnnnnnnnnnnnnnnnnnnnnnnnnnnnnnnnnnnnnnnnnnnnnnnnnnnnnnnnnnnnnnnnnnnnnnnnnnnnnnnnnnnnnnnnnnnnnnnnnnnnnnnnnnnnnnnnnnnnnnnnnnnnnnnnnnnnnnnnnnnnnnnnnnnnnnnnnnnnnnnnnnnnnnnnnnnnnnnnnnnnnnnnnnnnnnnnnnnnnnnnnnnnnnnnnnnnnnnnnnnnnnnnnnnnnnnnnnnnnnnnnnnnnnnnnnnnnnnnnnnnnnnnnnnnnnnnnnnnnnnnnnnnnnnnnnnnnnnnnnnnnnnnnnnnnnnnnnnnnnnnnnnnnnnnnnnnnnnnnnnnnnnnnnnnnnnnnnnnnnnnnnnnnnnnnnnnnnnnnnnnnnnnnnnnnnnnnnnnnnnnnnnnnnnnnnnnnnnnnnnnnnnnnnnnnnnnnnnnnnnnnnnnnnnnnnnnnnnnnnnnnnnnnnnnnnnnnnnnnnnnnnnnnnnnnnnnnnnnnnnnnnnnnnnnnnnnnnnnnnnnnnnnnnnnnnnnnnnnnnnnnnnnnnnnnnnnnnnnnnnnnnnnnnnnnnnnnnnnnnnnnnnnnnnnnnnnnnnnnnnnnnnnnnnnnnnnnnnnnnnnnnnnnnnnnnnnnnnnnnnnnnnnnnnnnnnnnnnnnnnnnnnnnnnnnnnnnnnnnnnnnnnnnnnnnnnnnnnnnnnnnnnnnnnnnnnnnnnnnnnnnnnnnnnnnnnnnnnnnnnnnnnnnnnnnnnnnnnnnnnnnnnnnnnnnnnnnnnnnnnnnnnnnnnnnnnnnnnnnnnnnnnnnnnnnnnnnnnnnnnnnnnnnnnnnnnnnnnnnnnnnnnnnnnnnnnnnnnnnnnnnnnnnnnnnnnnnnnnnnnnnnnnnnnnnnnnnnnnnnnnnnnnnnnnnnnnnnnnnnnnnnnnnnnnnnnnnnnnnnnnnnnnnnnnnnnnnnnnnnnnnnnnnnnnnnnnnnnnnnnnnnnnnnnnnnnnnnnnnnnnnnnnnnnnnnnnnnnnnnnnnnnnnnnnnnnnnnnnnnnnnnnnnnnnnnnnnnnnnnnnnnnnnnnnnnnnnnnnnnnnnnnnnnnnnnnnnnnnnnnnnnnnnnnnnnnnnnnnnnnnnnnnnnnnnnnnnnnnnnnnnnnnnnnnnnnnnnnnnnnnnnnnnnnnnnnnnnnnnnnnnnnnnnnnnnnnnnnnnnnnnnnnnnnnnnnnnnnnnnnnnnnnnnnnnnnnnnnnnnnnnnnnnnnnnnnnnnnnnnnnnnnnnnnnnnnnnnnnnnnnnnnnnnnnnnnnnnnnnnnnnnnnnnnnnnnnnnnnnnnnnnnnnnnnnnnnnnnnnnnnnnnnnnnnnnnnnnnnnnnnnnnnnnnnnnnnnnnnnnnnnnnnnnnnnnnnnnnnnnnnnnnnnnnnnnnnnnnnnnnnnnnnnnnnnnnnnnnnnnnnnnnnnnnnnnnnnnnnnnnnnnnnnnnnnnnnnnnnnnnnnnnnnnnnnnnnnnnnnnnnnnnnnnnnnnnnnnnnnnnnnnnnnnnnnnnnnnnnnnnnnnnnnnnnnnnnnnnnnnnnnnnnnnnnnnnnnnnnnnnnnnnnnnnnnnnnnnnnnnnnnnnnnnnnnnnnnnnnnnnnnnnnnnnnnnnnnnnnnnnnnnnnnnnnnnnnnnnnnnnnnnnnnnnnnnnnnnnnnnnnnnnnnnnnnnnnnnnnnnnnnnnnnnnnnnnnnnnnnnnnnnnnnnnnnnnnnnnnnnnnnnnnnnnnnnnnnnnnnnnnnnnnnnnnnnnnnnnnnnnnnnnnnnnnnnnnnnnnnnnnnnnnnnnnnnnnnnnnnnnnnnnnnnnnnnnnnnnnnnnnnnnnnnnnnnnnnnnnnnnnnnnnnnnnnnnnnnnnnnnnnnnnnnnnnnnnnnnnnnnnnnnnnnnnnnnnnnnnnnnnnnnnnnnnnnnnnnnnnnnnnnnnnnnnnnnnnnnnnnnnnnnnnnnnnnnnnnnnnnnnnnnnnnnnnnnnnnnnnnnnnnnnnnnnnnnnnnnnnnnnnnnnnnnnnnnnnnnnnnnnnnnnnnnnnnnnnnnnnnnnnnnnnnnnnnnnnnnnnnnnnnnnnnnnnnnnnnnnnnnnnnnnnnnnnnnnnnnnnnnnnnnnnnnnnnnnnnnnnnnnnnnnnnnnnnnnnnnnnnnnnnnnnnnnnnnnnnnnnnnnnnnnnnnnnnnnnnnnnnnnnnnnnnnnnnnnnnnnnnnnnnnnnnnnnnnnnnnnnnnnnnnnnnnnnnnnnnnnnnnnnnnnnnnnnnnnnnnnnnnnnnnnnnnnnnnnnnnnnnnnnnnnnnnnnnnnnnnnnnnnnnnnnnnnnnnnnnnnnnnnnnnnnnnnnnnnnnnnnnnnnnnnnnnnnnnnnnnnnnnnnnnnnnnnnnnnnnnnnnnnnnnnnnnnnnnnnnnnnnnnnnnnnnnnnnnnnnnnnnnnnnnnnnnnnnnnnnnnnnnnnnnnnnnnnnnnnnnnnnnnnnnnnnnnnnnnnnnnnnnnnnnnnnnnnnnnnnnnnnnnnnnnnnnnnnnnnnnnnnnnnnnnnnnnnnnnnnnnnnnnnnnnnnnnnnnnnnnnnnnnnnnnnnnnnnnnnnnnnnnnnnnnnnnnnnnnnnnnnnnnnnnnnnnnnnnnnnnnnnnnnnnnnnnnnnnnnnnnnnnnnnnnnnnnnnnnnnnnnnnnnnnnnnnnnnnnnnnnnnnnnnnnnnnnnnnnnnnnnnnnnnnnnnnnnnnnnnnnnnnnnnnnnnnnnnnnnnnnnnnnnnnnnnnnnnnnnnnnnnnnnnnnnnnnnnnnnnnnnnnnnnnnnnnnnnnnnnnnnnnnnnnnnnnnnnnnnnnnnnnnnnnnnnnnnnnnnnnnnnnnnnnnnnnnnnnnnnnnnnnnnnnnnnnnnnnnnnnnnnnnnnnnnnnnnnnnnnnnnnnnnnnnnnnnnnnnnnnnnnnnnnnnnnnnnnnnnnnnnnnnnnnnnnnnnnnnnnnnnnnnnnnnnnnnnnnnnnnnnnnnnnnnnnnnnnnnnnnnnnnnnnnnnnnnnnnnnnnnnnnnnnnnnnnnnnnnnnnnnnnnnnnnnnnnnnnnnnnnnnnnnnnnnnnnnnnnnnnnnnnnnnnnnnnnnnnnnnnnnnnnnnnnnnnnnnnnnnnnnnnnnnnnnnnnnnnnnnnnnnnnnnnnnnnnnnnnnnnnnnnnnnnnnnnnnnnnnnnnnnnnnnnnnnnnnnnnnnnnnnnnnnnnnnnnnnnnnnnnnnnnnnnnnnnnnnnnnnnnnnnnnnnnnnnnnnnnnnnnnnnnnnnnnnnnnnnnnnnnnnnnnnnnnnnnnnnnnnnnnnnnnnnnnnnnnnnnnnnnnnnnnnnnnnnnnnnnnnnnnnnnnnnnnnnnnnnnnnnnnnnnnnnnnnnnnnnnnnnnnnnnnnnnnnnnnnnnnnnnnnnnnnnnnnnnnnnnnnnnnnnnnnnnnnnnnnnnnnnnnnnnnnnnnnnnnnnnnnnnnnnnnnnnnnnnnnnnnnnnnnnnnnnnnnnnnnnnnnnnnnnnnnnnnnnnnnnnnnnnnnnnnnnnnnnnnnnnnnnnnnnnnnnnnnnnnnnnnnnnnnnnnnnnnnnnnnnnnnnnnnnnnnnnnnnnnnnnnnnnnnnnnnnnnnnnnnnnnnnnnnnnnnnnnnnnnnnnnnnnnnnnnnnnnnnnnnnnnnnnnnnnnnnnnnnnnnnnnnnnnnnnnnnnnnnnnnnnnnnnnnnnnnnnnnnnnnnnnnnnnnnnnnnnnnnnnnnnnnnnnnnnnnnnnnnnnnnnnnnnnnnnnnnnnnnnnnnnnnnnnnnnnnnnnnnnnnnnnnnnnnnnnnnnnnnnnnnnnnnnnnnnnnnnnnnnnnnnnnnnnnnnnnnnnnnnnnnnnnnnnnnnnnnnnnnnnnnnnnnnnnnnnnnnnnnnnnnnnnnnnnnnnnnnnnnnnnnnnnnnnnnnnnnnnnnnnnnnnnnnnnnnnnnnnnnnnnnnnnnnnnnnnnnnnnnnnnnnnnnnnnnnnnnnnnnnnnnnnnnnnnnnnnnnnnnnnnnnnnnnnnnnnnnnnnnnnnnnnnnnnnnnnnnnnnnnnnnnnnnnnnnnnnnnnnnnnnnnnnnnnnnnnnnnnnnnnnnnnnnnnnnnnnnnnnnnnnnnnnnnnnnnnnnnnnnnnnnnnnnnnnnnnnnnnnnnnnnnnnnnnnnnnnnnnnnnnnnnnnnnnnnnnnnnnnnnnnnnnnnnnnnnnnnnnnnnnnnnnnnnnnnnnnnnnnnnnnnnnnnnnnnnnnnnnnnnnnnnnnnnnnnnnnnnnnnnnnnnnnnnnnnnnnnnnnnnnnnnnnnnnnnnnnnnnnnnnnnnnnnnnnnnnnnnnnnnnnnnnnnnnnnnnnnnnnnnnnnnnnnnnnnnnnnnnnnnnnnnnnnnnnnnnnnnnnnnnnnnnnnnnnnnnnnnnnnnnnnnnnnnnnnnnnnnnnnnnnnnnnnnnnnnnnnnnnnnnnnnnnnnnnnnnnnnnnnnnnnnnnnnnnnnnnnnnnnnnnnnnnnnnnnnnnnnnnnnnnnnnnnnnnnnnnnnnnnnnnnnnnnnnnnnnnnnnnnnnnnnnnnnnnnnnnnnnnnnnnnnnnnnnnnnnnnnnnnnnnnnnnnnnnnnnnnnnnnnnnnnnnnnnnnnnnnnnnnnnnnnnnnnnnnnnnnnnnnnnnnnnnnnnnnnnnnnnnnnnnnnnnnnnnnnnnnnnnnnnnnnnnnnnnnnnnnnnnnnnnnnnnnnnnnnnnnnnnnnnnnnnnnnnnnnnnnnnnnnnnnnnnnnnnnnnnnnnnnnnnnnnnnnnnnnnnnnnnnnnnnnnnnnnnnnnnnnnnnnnnnnnnnnnnnnnnnnnnnnnnnnnnnnnnnnnnnnnnnnnnnnnnnnnnnnnnnnnnnnnnnnnnnnnnnnnnnnnnnnnnnnnnnnnnnnnnnnnnnnnnnnnnnnnnnnnnnnnnnnnnnnnnnnnnnnnnnnnnnnnnnnnnnnnnnnnnnnnnnnnnnnnnnnnnnnnnnnnnnnnnnnnnnnnnnnnnnnnnnnnnnnnnnnnnnnnnnnnnnnnnnnnnnnnnnnnnnnnnnnnnnnnnnnnnnnnnnnnnnnnnnnnnnnnnnnnnnnnnnnnnnnnnnnnnnnnnnnnnnnnnnnnnnnnnnnnnnnnnnnnnnnnnnnnnnnnnnnnnnnnnnnnnnnnnnnnnnnnnnnnnnnnnnnnnnnnnnnnnnnnnnnnnnnnnnnnnnnnnnnnnnnnnnnnnnnnnnnnnnnnnnnnnnnnnnnnnnnnnnnnnnnnnnnnnnnnnnnnnnnnnnnnnnnnnnnnnnnnnnnnnnnnnnnnnnnnnnnnnnnnnnnnnnnnnnnnnnnnnnnnnnnnnnnnnnnnnnnnnnnnnnnnnnnnnnnnnnnnnnnnnnnnnnnnnnnnnnnnnnnnnnnnnnnnnnnnnnnnnnnnnnnnnnnnnnnnnnnnnnnnnnnnnnnnnnnnnnnnnnnnnnnnnnnnnnnnnnnnnnnnnnnnnnnnnnnnnnnnnnnnnnnnnnnnnnnnnnnnnnnnnnnnnnnnnnnnnnnnnnnnnnnnnnnnnnnnnnnnnnnnnnnnnnnnnnnnnnnnnnnnnnnnnnnnnnnnnnnnnnnnnnnnnnnnnnnnnnnnnnnnnnnnnnnnnnnnnnnnnnnnnnnnnnnnnnnnnnnnnnnnnnnnnnnnnnnnnnnnnnnnnnnnnnnnnnnnnnnnnnnnnnnnnnnnnnnnnnnnnnnnnnnnnnnnnnnnnnnnnnnnnnnnnnnnnnnnnnnnnnnnnnnnnnnnnnnnnnnnnnnnnnnnnnnnnnnnnnnnnnnnnnnnnnnnnnnnnnnnnnnnnnnnnnnnnnnnnnnnnnnnnnnnnnnnnnnnnnnnnnnnnnnnnnnnnnnnnnnnnnnnnnnnnnnnnnnnnnnnnnnnnnnnnnnnnnnnnnnnnnnnnnnnnnnnnnnnnnnnnnnnnnnnnnnnnnnnnnnnnnnnnnnnnnnnnnnnnnnnnnnnnnnnnnnnnnnnnnnnnnnnnnnnnnnnnnnnnnnnnnnnnnnnnnnnnnnnnnnnnnnnnnnnnnnnnnnnnnnnnnnnnnnnnnnnnnnnnnnnnnnnnnnnnnnnnnnnnnnnnnnnnnnnnnnnnnnnnnnnnnnnnnnnnnnnnnnnnnnnnnnnnnnnnnnnnnnnnnnnnnnnnnnnnnnnnnnnnnnnnnnnnnnnnnnnnnnnnnnnnnnnnnnnnnnnnnnnnnnnnnnnnnnnnnnnnnnnnnnnnnnnnnnnnnnnnnnnnnnnnnnnnnnnnnnnnnnnnnnnnnnnnnnnnnnnnnnnnnnnnnnnnnnnnnnnnnnnnnnnnnnnnnnnnnnnnnnnnnnnnnnnnnnnnnnnnnnnnnnnnnnnnnnnnnnnnnnnnnnnnnnnnnnnnnnnnnnnnnnnnnnnnnnnnnnnnnnnnnnnnnnnnnnnnnnnnnnnnnnnnnnnnnnnnnnnnnnnnnnnnnnnnnnnnnnnnnnnnnnnnnnnnnnnnnnnnnnnnnnnnnnnnnnnnnnnnnnnnnnnnnnnnnnnnnnnnnnnnnnnnnnnnnnnnnnnnnnnnnnnnnnnnnnnnnnnnnnnnnnnnnnnnnnnnnnnnnnnnnnnnnnnnnnnnnnnnnnnnnnnnnnnnnnnnnnnnnnnnnnnnnnnnnnnnnnnnnnnnnnnnnnnnnnnnnnnnnnnnnnnnnnnnnnnnnnnnnnnnnnnnnnnnnnnnnnnnnnnnnnnnnnnnnnnnnnnnnnnnnnnnnnnnnnnnnnnnnnnnnnnnnnnnnnnnnnnnnnnnnnnnnnnnnnnnnnnnnnnnnnnnnnnnnnnnnnnnnnnnnnnnnnnnnnnnnnnnnnnnnnnnnnnnnnnnnnnnnnnnnnnnnnnnnnnnnnnnnnnnnnnnnnnnnnnnnnnnnnnnnnnnnnnnnnnnnnnnnnnnnnnnnnnnnnnnnnnnnnnnnnnnnnnnnnnnnnnnnnnnnnnnnnnnnnnnnnnnnnnnnnnnnnnnnnnnnnnnnnnnnnnnnnnnnnnnnnnnnnnnnnnnnnnnnnnnnnnnnnnnnnnnnnnnnnnnnnnnnnnnnnnnnnnnnnnnnnnnnnnnnnnnnnnnnnnnnnnnnnnnnnnnnnnnnnnnnnnnnnnnnnnnnnnnnnnnnnnnnnnnnnnnnnnnnnnnnnnnnnnnnnnnnnnnnnnnnnnnnnnnnnnnnnnnnnnnnnnnnnnnnnnnnnnnnnnnnnnnnnnnnnnnnnnnnnnnnnnnnnnnnnnnnnnnnnnnnnnnnnnnnnnnnnnnnnnnnnnnnnnnnnnnnnnnnnnnnnnnnnnnnnnnnnnnnnnnnnnnnnnnnnnnnnnnnnnnnnnnnnnnnnnnnnnnnnnnnnnnnnnnnnnnnnnnnnnnnnnnnnnnnnnnnnnnnnnnnnnnnnnnnnnnnnnnnnnnnnnnnnnnnnnnnnnnnnnnnnnnnnnnnnnnnnnnnnnnnnnnnnnnnnnnnnnnnnnnnnnnnnnnnnnnnnnnnnnnnnnnnnnnnnnnnnnnnnnnnnnnnnnnnnnnnnnnnnnnnnnnnnnnnnnnnnnnnnnnnnnnnnnnnnnnnnnnnnnnnnnnnnnnnnnnnnnnnnnnnnnnnnnnnnnnnnnnnnnnnnnnnnnnnnnnnnnnnnnnnnnnnnnnnnnnnnnnnnnnnnnnnnnnnnnnnnnnnnnnnnnnnnnnnnnnnnnnnnnnnnnnnnnnnnnnnnnnnnnnnnnnnnnnnnnnnnnnnnnnnnnnnnnnnnnnnnnnnnnnnnnnnnnnnnnnnnnnnnnnnnnnnnnnnnnnnnnnnnnnnnnnnnnnnnnnnnnnnnnnnnnnnnnnnnnnnnnnnnnnnnnnnnnnnnnnnnnnnnnnnnnnnnnnnnnnnnnnnnnnnnnnnnnnnnnnnnnnnnnnnnnnnnnnnnnnnnnnnnnnnnnnnnnnnnnnnnnnnnnnnnnnnnnnnnnnnnnnnnnnnnnnnnnnnnnnnnnnnnnnnnnnnnnnnnnnnnnnnnnnnnnnnnnnnnnnnnnnnnnnnnnnnnnnnnnnnnnnnnnnnnnnnnnnnnnnnnnnnnnnnnnnnnnnnnnnnnnnnnnnnnnnnnnnnnnnnnnnnnnnnnnnnnnnnnnnnnnnnnnnnnnnnnnnnnnnnnnnnnnnnnnnnnnnnnnnnnnnnnnnnnnnnnnnnnnnnnnnnnnnnnnnnnnnnnnnnnnnnnnnnnnnnnnnnnnnnnnnnnnnnnnnnnnnnnnnnnnnnnnnnnnnnnnnnnnnnnnnnnnnnnnnnnnnnnnnnnnnnnnnnnnnnnnnnnnnnnnnnnnnnnnnnnnnnnnnnnnnnnnnnnnnnnnnnnnnnnnnnnnnnnnnnnnnnnnnnnnnnnnnnnnnnnnnnnnnnnnnnnnnnnnnnnnnnnnnnnnnnnnnnnnnnnnnnnnnnnnnnnnnnnnnnnnnnnnnnnnnnnnnnnnnnnnnnnnnnnnnnnnnnnnnnnnnnnnnnnnnnnnnnnnnnnnnnnnnnnnnnnnnnnnnnnnnnnnnnnnnnnnnnnnnnnnnnnnnnnnnnnnnnnnnnnnnnnnnnnnnnnnnnnnnnnnnnnnnnnnnnnnnnnnnnnnnnnnnnnnnnnnnnnnnnnnnnnnnnnnnnnnnnnnnnnnnnnnnnnnnnnnnnnnnnnnnnnnnnnnnnnnnnnnnnnnnnnnnnnnnnnnnnnnnnnnnnnnnnnnnnnnnnnnnnnnnnnnnnnnnnnnnnnnnnnnnnnnnnnnnnnnnnnnnnnnnnnnnnnnnnnnnnnnnnnnnnnnnnnnnnnnnnnnnnnnnnnnnnnnnnnnnnnnnnnnnnnnnnnnnnnnnnnnnnnnnnnnnnnnnnnnnnnnnnnnnnnnnnnnnnnnnnnnnnnnnnnnnnnnnnnnnnnnnnnnnnnnnnnnnnnnnnnnnnnnnnnnnnnnnnnnnnnnnnnnnnnnnnnnnnnnnnnnnnnnnnnnnnnnnnnnnnnnnnnnnnnnnnnnnnnnnnnnnnnnnnnnnnnnnnnnnnnnnnnnnnnnnnnnnnnnnnnnnnnnnnnnnnnnnnnnnnnnnnnnnnnnnnnnnnnnnnnnnnnnnnnnnnnnnnnnnnnnnnnnnnnnnnnnnnnnnnnnnnnnnnnnnnnnnnnnnnnnnnnnnnnnnnnnnnnnnnnnnnnnnnnnnnnnnnnnnnnnnnnnnnnnnnnnnnnnnnnnnnnnnnnnnnnnnnnnnnnnnnnnnnnnnnnnnnnnnnnnnnnnnnnnnnnnnnnnnnnnnnnnnnnnnnnnnnnnnnnnnnnnnnnnnnnnnnnnnnnnnnnnnnnnnnnnnnnnnnnnnnnnnnnnnnnnnnnnnnnnnnnnnnnnnnnnnnnnnnnnnnnnnnnnnnnnnnnnnnnnnnnnnnnnnnnnnnnnnnnnnnnnnnnnnnnnnnnnnnnnnnnnnnnnnnnnnnnnnnnnnnnnnnnnnnnnnnnnnnnnnnnnnnnnnnnnnnnnnnnnnnnnnnnnnnnnnnnnnnnnnnnnnnnnnnnnnnnnnnnnnnnnnnnnnnnnnnnnnnnnnnnnnnnnnnnnnnnnnnnnnnnnnnnnnnnnnnnnnnnnnnnnnnnnnnnnnnnnnnnnnnnnnnnnnnnnnnnnnnnnnnnnnnnnnnnnnnnnnnnnnnnnnnnnnnnnnnnnnnnnnnnnnnnnnnnnnnnnnnnnnnnnnnnnnnnnnnnnnnnnnnnnnnnnnnnnnnnnnnnnnnnnnnnnnnnnnnnnnnnnnnnnnnnnnnnnnnnnnnnnnnnnnnnnnnnnnnnnnnnnnnnnnnnnnnnnnnnnnnnnnnnnnnnnnnnnnnnnnnnnnnnnnnnnnnnnnnnnnnnnnnnnnnnnnnnnnnnnnnnnnnnnnnnnnnnnnnnnnnnnnnnnnnnnnnnnnnnnnnnnnnnnnnnnnnnnnnnnnnnnnnnnnnnnnnnnnnnnnnnnnnnnnnnnnnnnnnnnnnnnnnnnnnnnnnnnnnnnnnnnnnnnnnnnnnnnnnnnnnnnnnnnnnnnnnnnnnnnnnnnnnnnnnnnnnnnnnnnnnnnnnnnnnnnnnnnnnnnnnnnnnnnnnnnnnnnnnnnnnnnnnnnnnnnnnnnnnnnnnnnnnnnnnnnnnnnnnnnnnnnnnnnnnnnnnnnnnnnnnnnnnnnnnnnnnnnnnnnnnnnnnnnnnnnnnnnnnnnnnnnnnnnnnnnnnnnnnnnnnnnnnnnnnnnnnnnnnnnnnnnnnnnnnnnnnnnnnnnnnnnnnnnnnnnnnnnnnnnnnnnnnnnnnnnnnnnnnnnnnnnnnnnnnnnnnnnnnnnnnnnnnnnnnnnnnnnnnnnnnnnnnnnnnnnnnnnnnnnnnnnnnnnnnnnnnnnnnnnnnnnnnnnnnnnnnnnnnnnnnnnnnnnnnnnnnnnnnnnnnnnnnnnnnnnnnnnnnnnnnnnnnnnnnnnnnnnnnnnnnnnnnnnnnnnnnnnnnnnnnnnnnnnnnnnnnnnnnnnnnnnnnnnnnnnnnnnnnnnnnnnnnnnnnnnnnnnnnnnnnnnnnnnnnnnnnnnnnnnnnnnnnnnnnnnnnnnnnnnnnnnnnnnnnnnnnnnnnnnnnnnnnnnnnnnnnnnnnnnnnnnnnnnnnnnnnnnnnnnnnnnnnnnnnnnnnnnnnnnnnnnnnnnnnnnnnnnnnnnnnnnnnnnnnnnnnnnnnnnnnnnnnnnnnnnnnnnnnnnnnnnnnnnnnnnnnnnnnnnnnnnnnnnnnnnnnnnnnnnnnnnnnnnnnnnnnnnnnnnnnnnnnnnnnnnnnnnnnnnnnnnnnnnnnnnnnnnnnnnnnnnnnnnnnnnnnnnnnnnnnnnnnnnnnnnnnnnnnnnnnnnnnnnnnnnnnnnnnnnnnnnnnnnnnnnnnnnnnnnnnnnnnnnnnnnnnnnnnnnnnnnnnnnnnnnnnnnnnnnnnnnnnnnnnnnnnnnnnnnnnnnnnnnnnnnnnnnnnnnnnnnnnnnnnnnnnnnnnnnnnnnnnnnnnnnnnnnnnnnnnnnnnnnnnnnnnnnnnnnnnnnnnnnnnnnnnnnnnnnnnnnnnnnnnnnnnnnnnnnnnnnnnnnnnnnnnnnnnnnnnnnnnnnnnnnnnnnnnnnnnnnnnnnnnnnnnnnnnnnnnnnnnnnnnnnnnnnnnnnnnnnnnnnnnnnnnnnnnnnnnnnnnnnnnnnnnnnnnnnnnnnnnnnnnnnnnnnnnnnnnnnnnnnnnnnnnnnnnnnnnnnnnnnnnnnnnnnnnnnnnnnnnnnnnnnnnnnnnnnnnnnnnnnnnnnnnnnnnnnnnnnnnnnnnnnnnnnnnnnnnnnnnnnnnnnnnnnnnnnnnnnnnnnnnnnnnnnnnnnnnnnnnnnnnnnnnnnnnnnnnnnnnnnnnnnnnnnnnnnnnnnnnnnnnnnnnnnnnnnnnnnnnnnnnnnnnnnnnnnnnnnnnnnnnnnnnnnnnnnnnnnnnnnnnnnnnnnnnnnnnnnnnnnnnnnnnnnnnnnnnnnnnnnnnnnnnnnnnnnnnnnnnnnnnnnnnnnnnnnnnnnnnnnnnnnnnnnnnnnnnnnnnnnnnnnnnnnnnnnnnnnnnnnnnnnnnnnnnnnnnnnnnnnnnnnnnnnnnnnnnnnnnnnnnnnnnnnnnnnnnnnnnnnnnnnnnnnnnnnnnnnnnnnnnnnnnnnnnnnnnnnnnnnnnnnnnnnnnnnnnnnnnnnnnnnnnnnnnnnnnnnnnnnnnnnnnnnnnnnnnnnnnnnnnnnnnnnnnnnnnnnnnnnnnnnnnnnnnnnnnnnnnnnnnnnnnnnnnnnnnnnnnnnnnnnnnnnnnnnnnnnnnnnnnnnnnnnnnnnnnnnnnnnnnnnnnnnnnnnnnnnnnnnnnnnnnnnnnnnnnnnnnnnnnnnnnnnnnnnnnnnnnnnnnnnnnnnnnnnnnnnnnnnnnnnnnnnnnnnnnnnnnnnnnnnnnnnnnnnnnnnnnnnnnnnnnnnnnnnnnnnnnnnnnnnnnnnnnnnnnnnnnnnnnnnnnnnnnnnnnnnnnnnnnnnnnnnnnnnnnnnnnnnnnnnnnnnnnnnnnnnnnnnnnnnnnnnnnnnnnnnnnnnnnnnnnnnnnnnnnnnnnnnnnnnnnnnnnnnnnnnnnnnnnnnnnnnnnnnnnnnnnnnnnnnnnnnnnnnnnnnnnnnnnnnnnnnnnnnnnnnnnnnnnnnnnnnnnnnnnnnnnnnnnnnnnnnnnnnnnnnnnnnnnnnnnnnnnnnnnnnnnnnnnnnnnnnnnnnnnnnnnnnnnnnnnnnnnnnnnnnnnnnnnnnnnnnnnnnnnnnnnnnnnnnnnnnnnnnnnnnnnnnnnnnnnnnnnnnnnnnnnnnnnnnnnnnnnnnnnnnnnnnnnnnnnnnnnnnnnnnnnnnnnnnnnnnnnnnnnnnnnnnnnnnnnnnnnnnnnnnnnnnnnnnnnnnnnnnnnnnnnnnnnnnnnnnnnnnnnnnnnnnnnnnnnnnnnnnnnnnnnnnnnnnnnnnnnnnnnnnnnnnnnnnnnnnnnnnnnnnnnnnnnnnnnnnnnnnnnnnnnnnnnnnnnnnnnnnnnnnnnnnnnnnnnnnnnnnnnnnnnnnnnnnnnnnnnnnnnnnnnnnnnnnnnnnnnnnnnnnnnnnnnnnnnnnnnnnnnnnnnnnnnnnnnnnnnnnnnnnnnnnnnnnnnnnnnnnnnnnnnnnnnnnnnnnnnnnnnnnnnnnnnnnnnnnnnnnnnnnnnnnnnnnnnnnnnnnnnnnnnnnnnnnnnnnnnnnnnnnnnnnnnnnnnnnnnnnnnnnnnnnnnnnnnnnnnnnnnnnnnnnnnnnnnnnnnnnnnnnnnnnnnnnnnnnnnnnnnnnnnnnnnnnnnnnnnnnnnnnnnnnnnnnnnnnnnnnnnnnnnnnnnnnnnnnnnnnnnnnnnnnnnnnnnnnnnnnnnnnnnnnnnnnnnnnnnnnnnnnnnnnnnnnnnnnnnnnnnnnnnnnnnnnnnnnnnnnnnnnnnnnnnnnnnnnnnnnnnnnnnnnnnnnnnnnnnnnnnnnnnnnnnnnnnnnnnnnnnnnnnnnnnnnnnnnnnnnnnnnnnnnnnnnnnnnnnnnnnnnnnnnnnnnnnnnnnnnnnnnnnnnnnnnnnnnnnnnnnnnnnnnnnnnnnnnnnnnnnnnnnnnnnnnnnnnnnnnnnnnnnnnnnnnnnnnnnnnnnnnnnnnnnnnnnnnnnnnnnnnnnnnnnnnnnnnnnnnnnnnnnnnnnnnnnnnnnnnnnnnnnnnnnnnnnnnnnnnnnnnnnnnnnnnnnnnnnnnnnnnnnnnnnnnnnnnnnnnnnnnnnnnnnnnnnnnnnnnnnnnnnnnnnnnnnnnnnnnnnnnnnnnnnnnnnnnnnnnnnnnnnnnnnnnnnnnnnnnnnnnnnnnnnnnnnnnnnnnnnnnnnnnnnnnnnnnnnnnnnnnnnnnnnnnnnnnnnnnnnnnnnnnnnnnnnnnnnnnnnnnnnnnnnnnnnnnnnnnnnnnnnnnnnnnnnnnnnnnnnnnnnnnnnnnnnnnnnnnnnnnnnnnnnnnnnnnnnnnnnnnnnnnnnnnnnnnnnnnnnnnnnnnnnnnnnnnnnnnnnnnnnnnnnnnnnnnnnnnnnnnnnnnnnnnnnnnnnnnnnnnnnnnnnnnnnnnnnnnnnnnnnnnnnnnnnnnnnnnnnnnnnnnnnnnnnnnnnnnnnnnnnnnnnnnnnnnnnnnnnnnnnnnnnnnnnnnnnnnnnnnnnnnnnnnnnnnnnnnnnnnnnnnnnnnnnnnnnnnnnnnnnnnnnnnnnnnnnnnnnnnnnnnnnnnnnnnnnnnnnnnnnnnnnnnnnnnnnnnnnnnnnnnnnnnnnnnnnnnnnnnnnnnnnnnnnnnnnnnnnnnnnnnnnnnnnnnnnnnnnnnnnnnnnnnnnnnnnnnnnnnnnnnnnnnnnnnnnnnnnnnnnnnnnnnnnnnnnnnnnnnnnnnnnnnnnnnnnnnnnnnnnnnnnnnnnnnnnnnnnnnnnnnnnnnnnnnnnnnnnnnnnnnnnnnnnnnnnnnnnnnnnnnnnnnnnnnnnnnnnnnnnnnnnnnnnnnnnnnnnnnnnnnnnnnnnnnnnnnnnnnnnnnnnnnnnnnnnnnnnnnnnnnnnnnnnnnnnnnnnnnnnnnnnnnnnnnnnnnnnnnnnnnnnnnnnnnnnnnnnnnnnnnnnnnnnnnnnnnnnnnnnnnnnnnnnnnnnnnnnnnnnnnnnnnnnnnnnnnnnnnnnnnnnnnnnnnnnnnnnnnnnnnnnnnnnnnnnnnnnnnnnnnnnnnnnnnnnnnnnnnnnnnnnnnnnnnnnnnnnnnnnnnnnnnnnnnnnnnnnnnnnnnnnnnnnnnnnnnnnnnnnnnnnnnnnnnnnnnnnnnnnnnnnnnnnnnnnnnnnnnnnnnnnnnnnnnnnnnnnnnnnnnnnnnnnnnnnnnnnnnnnnnnnnnnnnnnnnnnnnnnnnnnnnnnnnnnnnnnnnnnnnnnnnnnnnnnnnnnnnnnnnnnnnnnnnnnnnnnnnnnnnnnnnnnnnnnnnnnnnnnnnnnnnnnnnnnnnnnnnnnnnnnnnnnnnnnnnnnnnnnnnnnnnnnnnnnnnnnnnnnnnnnnnnnnnnnnnnnnnnnnnnnnnnnnnnnnnnnnnnnnnnnnnnnnnnnnnnnnnnnnnnnnnnnnnnnnnnnnnnnnnnnnnnnnnnnnnnnnnnnnnnnnnnnnnnnnnnnnnnnnnnnnnnnnnnnnnnnnnnnnnnnnnnnnnnnnnnnnnnnnnnnnnnnnnnnnnnnnnnnnnnnnnnnnnnnnnnnnnnnnnnnnnnnnnnnnnnnnnnnnnnnnnnnnnnnnnnnnnnnnnnnnnnnnnnnnnnnnnnnnnnnnnnnnnnnnnnnnnnnnnnnnnnnnnnnnnnnnnnnnnnnnnnnnnnnnnnnnnnnnnnnnnnnnnnnnnnnnnnnnnnnnnnnnnnnnnnnnnnnnnnnnnnnnnnnnnnnnnnnnnnnnnnnnnnnnnnnnnnnnnnnnnnnnnnnnnnnnnnnnnnnnnnnnnnnnnnnnnnnnnnnnnnnnnnnnnnnnnnnnnnnnnnnnnnnnnnnnnnnnnnnnnnnnnnnnnnnnnnnnnnnnnnnnnnnnnnnnnnnnnnnnnnnnnnnnnnnnnnnnnnnnnnnnnnnnnnnnnnnnnnnnnnnnnnnnnnnnnnnnnnnnnnnnnnnnnnnnnnnnnnnnnnnnnnnnnnnnnnnnnnnnnnnnnnnnnnnnnnnnnnnnnnnnnnnnnnnnnnnnnnnnnnnnnnnnnnnnnnnnnnnnnnnnnnnnnnnnnnnnnnnnnnnnnnnnnnnnnnnnnnnnnnnnnnnnnnnnnnnnnnnnnnnnnnnnnnnnnnnnnnnnnnnnnnnnnnnnnnnnnnnnnnnnnnnnnnnnnnnnnnnnnnnnnnnnnnnnnnnnnnnnnnnnnnnnnnnnnnnnnnnnnnnnnnnnnnnnnnnnnnnnnnnnnnnnnnnnnnnnnnnnnnnnnnnnnnnnnnnnnnnnnnnnnnnnnnnnnnnnnnnnnnnnnnnnnnnnnnnnnnnnnnnnnnnnnnnnnnnnnnnnnnnnnnnnnnnnnnnnnnnnnnnnnnnnnnnnnnnnnnnnnnnnnnnnnnnnnnnnnnnnnnnnnnnnnnnnnnnnnnnnnnnnnnnnnnnnnnnnnnnnnnnnnnnnnnnnnnnnnnnnnnnnnnnnnnnnnnnnnnnnnnnnnnnnnnnnnnnnnnnnnnnnnnnnnnnnnnnnnnnnnnnnnnnnnnnnnnnnnnnnnnnnnnnnnnnnnnnnnnnnnnnnnnnnnnnnnnnnnnnnnnnnnnnnnnnnnnnnnnnnnnnnnnnnnnnnnnnnnnnnnnnnnnnnnnnnnnnnnnnnnnnnnnnnnnnnnnnnnnnnnnnnnnnnnnnnnnnnnnnnnnnnnnnnnnnnnnnnnnnnnnnnnnnnnnnnnnnnnnnnnnnnnnnnnnnnnnnnnnnnnnnnnnnnnnnnnnnnnnnnnnnnnnnnnnnnnnnnnnnnnnnnnnnnnnnnnnnnnnnnnnnnnnnnnnnnnnnnnnnnnnnnnnnnnnnnnnnnnnnnnnnnnnnnnnnnnnnnnnnnnnnnnnnnnnnnnnnnnnnnnnnnnnnnnnnnnnnnnnnnnnnnnnnnnnnnnnnnnnnnnnnnnnnnnnnnnnnnnnnnnnnnnnnnnnnnnnnnnnnnnnnnnnnnnnnnnnnnnnnnnnnnnnnnnnnnnnnnnnnnnnnnnnnnnnnnnnnnnnnnnnnnnnnnnnnnnnnnnnnnnnnnnnnnnnnnnnnnnnnnnnnnnnnnnnnnnnnnnnnnnnnnnnnnnnnnnnnnnnnnnnnnnnnnnnnnnnnnnnnnnnnnnnnnnnnnnnnnnnnnnnnnnnnnnnnnnnnnnnnnnnnnnnnnnnnnnnnnnnnnnnnnnnnnnnnnnnnnnnnnnnnnnnnnnnnnnnnnnnnnnnnnnnnnnnnnnnnnnnnnnnnnnnnnnnnnnnnnnnnnnnnnnnnnnnnnnnnnnnnnnnnnnnnnnnnnnnnnnnnnnnnnnnnnnnnnnnnnnnnnnnnnnnnnnnnnnnnnnnnnnnnnnnnnnnnnnnnnnnnnnnnnnnnnnnnnnnnnnnnnnnnnnnnnnnnnnnnnnnnnnnnnnnnnnnnnnnnnnnnnnnnnnnnnnnnnnnnnnnnnnnnnnnnnnnnnnnnnnnnnnnnnnnnnnnnnnnnnnnnnnnnnnnnnnnnnnnnnnnnnnnnnnnnnnnnnnnnnnnnnnnnnnnnnnnnnnnnnnnnnnnnnnnnnnnnnnnnnnnnnnnnnnnnnnnnnnnnnnnnnnnnnnnnnnnnnnnnnnnnnnnnnnnnnnnnnnnnnnnnnnnnnnnnnnnnnnnnnnnnnnnnnnnnnnnnnnnnnnnnnnnnnnnnnnnnnnnnnnnnnnnnnnnnnnnnnnnnnnnnnnnnnnnnnnnnnnnnnnnnnnnnnnnnnnnnnnnnnnnnnnnnnnnnnnnnnnnnnnnnnnnnnnnnnnnnnnnnnnnnnnnnnnnnnnnnnnnnnnnnnnnnnnnnnnnnnnnnnnnnnnnnnnnnnnnnnnnnnnnnnnnnnnnnnnnnnnnnnnnnnnnnnnnnnnnnnnnnnnnnnnnnnnnnnnnnnnnnnnnnnnnnnnnnnnnnnnnnnnnnnnnnnnnnnnnnnnnnnnnnnnnnnnnnnnnnnnnnnnnnnnnnnnnnnnnnnnnnnnnnnnnnnnnnnnnnnnnnnnnnnnnnnnnnnnnnnnnnnnnnnnnnnnnnnnnnnnnnnnnnnnnnnnnnnnnnnnnnnnnnnnnnnnnnnnnnnnnnnnnnnnnnnnnnnnnnnnnnnnnnnnnnnnnnnnnnnnnnnnnnnnnnnnnnnnnnnnnnnnnnnnnnnnnnnnnnnnnnnnnnnnnnnnnnnnnnnnnnnnnnnnnnnnnnnnnnnnnnnnnnnnnnnnnnnnnnnnnnnnnnnnnnnnnnnnnnnnnnnnnnnnnnnnnnnnnnnnnnnnnnnnnnnnnnnnnnnnnnnnnnnnnnnnnnnnnnnnnnnnnnnnnnnnnnnnnnnnnnnnnnnnnnnnnnnnnnnnnnnnnnnnnnnnnnnnnnnnnnnnnnnnnnnnnnnnnnnnnnnnnnnnnnnnnnnnnnnnnnnnnnnnnnnnnnnnnnnnnnnnnnnnnnnnnnnnnnnnnnnnnnnnnnnnnnnnnnnnnnnnnnnnnnnnnnnnnnnnnnnnnnnnnnnnnnnnnnnnnnnnnnnnnnnnnnnnnnnnnnnnnnnnnnnnnnnnnnnnnnnnnnnnnnnnnnnnnnnnnnnnnnnnnnnnnnnnnnnnnnnnnnnnnnnnnnnnnnnnnnnnnnnnnnnnnnnnnnnnnnnnnnnnnnnnnnnnnnnnnnnnnnnnnnnnnnnnnnnnnnnnnnnnnnnnnnnnnnnnnnnnnnnnnnnnnnnnnnnnnnnnnnnnnnnnnnnnnnnnnnnnnnnnnnnnnnnnnnnnnnnnnnnnnnnnnnnnnnnnnnnnnnnnnnnnnnnnnnnnnnnnnnnnnnnnnnnnnnnnnnnnnnnnnnnnnnnnnnnnnnnnnnnnnnnnnnnnnnnnnnnnnnnnnnnnnnnnnnnnnnnnnnnnnnnnnnnnnnnnnnnnnnnnnnnnnnnnnnnnnnnnnnnnnnnnnnnnnnnnnnnnnnnnnnnnnnnnnnnnnnnnnnnnnnnnnnnnnnnnnnnnnnnnnnnnnnnnnnnnnnnnnnnnnnnnnnnnnnnnnnnnnnnnnnnnnnnnnnnnnnnnnnnnnnnnnnnnnnnnnnnnnnnnnnnnnnnnnnnnnnnnnnnnnnnnnnnnnnnnnnnnnnnnnnnnnnnnnnnnnnnnnnnnnnnnnnnnnnnnnnnnnnnnnnnnnnnnnnnnnnnnnnnnnnnnnnnnnnnnnnnnnnnnnnnnnnnnnnnnnnnnnnnnnnnnnnnnnnnnnnnnnnnnnnnnnnnnnnnnnnnnnnnnnnnnnnnnnnnnnnnnnnnnnnnnnnnnnnnnnnnnnnnnnnnnnnnnnnnnnnnnnnnnnnnnnnnnnnnnnnnnnnnnnnnnnnnnnnnnnnnnnnnnnnnnnnnnnnnnnnnnnnnnnnnnnnnnnnnnnnnnnnnnnnnnnnnnnnnnnnnnnnnnnnnnnnnnnnnnnnnnnnnnnnnnnnnnnnnnnnnnnnnnnnnnnnnnnnnnnnnnnnnnnnnnnnnnnnnnnnnnnnnnnnnnnnnnnnnnnnnnnnnnnnnnnnnnnnnnnnnnnnnnnnnnnnnnnnnnnnnnnnnnnnnnnnnnnnnnnnnnnnnnnnnnnnnnnnnnnnnnnnnnnnnnnnnnnnnnnnnnnnnnnnnnnnnnnnnnnnnnnnnnnnnnnnnnnnnnnnnnnnnnnnnnnnnnnnnnnnnnnnnnnnnnnnnnnnnnnnnnnnnnnnnnnnnnnnnnnnnnnnnnnnnnnnnnnnnnnnnnnnnnnnnnnnnnnnnnnnnnnnnnnnnnnnnnnnnnnnnnnnnnnnnnnnnnnnnnnnnnnnnnnnnnnnnnnnnnnnnnnnnnnnnnnnnnnnnnnnnnnnnnnnnnnnnnnnnnnnnnnnnnnnnnnnnnnnnnnnnnnnnnnnnnnnnnnnnnnnnnnnnnnnnnnnnnnnnnnnnnnnnnnnnnnnnnnnnnnnnnnnnnnnnnnnnnnnnnnnnnnnnnnnnnnnnnnnnnnnnnnnnnnnnnnnnnnnnnnnnnnnnnnnnnnnnnnnnnnnnnnnnnnnnnnnnnnnnnnnnnnnnnnnnnnnnnnnnnnnnnnnnnnnnnnnnnnnnnnnnnnnnnnnnnnnnnnnnnnnnnnnnnnnnnnnnnnnnnnnnnnnnnnnnnnnnnnnnnnnnnnnnnnnnnnnnnnnnnnnnnnnnnnnnnnnnnnnnnnnnnnnnnnnnnnnnnnnnnnnnnnnnnnnnnnnnnnnnnnnnnnnnnnnnnnnnnnnnnnnnnnnnnnnnnnnnnnnnnnnnnnnnnnnnnnnnnnnnnnnnnnnnnnnnnnnnnnnnnnnnnnnnnnnnnnnnnnnnnnnnnnnnnnnnnnnnnnnnnnnnnnnnnnnnnnnnnnnnnnnnnnnnnnnnnnnnnnnnnnnnnnnnnnnnnnnnnnnnnnnnnnnnnnnnnnnnnnnnnnnnnnnnnnnnnnnnnnnnnnnnnnnnnnnnnnnnnnnnnnnnnnnnnnnnnnnnnnnnnnnnnnnnnnnnnnnnnnnnnnnnnnnnnnnnnnnnnnnnnnnnnnnnnnnnnnnnnnnnnnnnnnnnnnnnnnnnnnnnnnnnnnnnnnnnnnnnnnnnnnnnnnnnnnnnnnnnnnnnnnnnnnnnnnnnnnnnnnnnnnnnnnnnnnnnnnnnnnnnnnnnnnnnnnnnnnnnnnnnnnnnnnnnnnnnnnnnnnnnnnnnnnnnnnnnnnnnnnnnnnnnnnnnnnnnnnnnnnnnnnnnnnnnnnnnnnnnnnnnnnnnnnnnnnnnnnnnnnnnnnnnnnnnnnnnnnnnnnnnnnnnnnnnnnnnnnnnnnnnnnnnnnnnnnnnnnnnnnnnnnnnnnnnnnnnnnnnnnnnnnnnnnnnnnnnnnnnnnnnnnnnnnnnnnnnnnnnnnnnnnnnnnnnnnnnnnnnnnnnnnnnnnnnnnnnnnnnnnnnnnnnnnnnnnnnnnnnnnnnnnnnnnnnnnnnnnnnnnnnnnnnnnnnnnnnnnnnnnnnnnnnnnnnnnnnnnnnnnnnnnnnnnnnnnnnnnnnnnnnnnnnnnnnnnnnnnnnnnnnnnnnnnnnnnnnnnnnnnnnnnnnnnnnnnnnnnnnnnnnnnnnnnnnnnnnnnnnnnnnnnnnnnnnnnnnnnnnnnnnnnnnnnnnnnnnnnnnnnnnnnnnnnnnnnnnnnnnnnnnnnnnnnnnnnnnnnnnnnnnnnnnnnnnnnnnnnnnnnnnnnnnnnnnnnnnnnnnnnnnnnnnnnnnnnnnnnnnnnnnnnnnnnnnnnnnnnnnnnnnnnnnnnnnnnnnnnnnnnnnnnnnnnnnnnnnnnnnnnnnnnnnnnnnnnnnnnnnnnnnnnnnnnnnnnnnnnnnnnnnnnnnnnnnnnnnnnnnnnnnnnnnnnnnnnnnnnnnnnnnnnnnnnnnnnnnnnnnnnnnnnnnnnnnnnnnnnnnnnnnnnnnnnnnnnnnnnnnnnnnnnnnnnnnnnnnnnnnnnnnnnnnnnnnnnnnnnnnnnnnnnnnnnnnnnnnnnnnnnnnnnnnnnnnnnnnnnnnnnnnnnnnnnnnnnnnnnnnnnnnnnnnnnnnnnnnnnnnnnnnnnnnnnnnnnnnnnnnnnnnnnnnnnnnnnnnnnnnnnnnnnnnnnnnnnnnnnnnnnnnnnnnnnnnnnnnnnnnnnnnnnnnnnnnnnnnnnnnnnnnnnnnnnnnnnnnnnnnnnnnnnnnnnnnnnnnnnnnnnnnnnnnnnnnnnnnnnnnnnnnnnnnnnnnnnnnnnnnnnnnnnnnnnnnnnnnnnnnnnnnnnnnnnnnnnnnnnnnnnnnnnnnnnnnnnnnnnnnnnnnnnnnnnnnnnnnnnnnnnnnnnnnnnnnnnnnnnnnnnnnnnnnnnnnnnnnnnnnnnnnnnnnnnnnnnnnnnnnnnnnnnnnnnnnnnnnnnnnnnnnnnnnnnnnnnnnnnnnnnnnnnnnnnnnnnnnnnnnnnnnnnnnnnnnnnnnnnnnnnnnnnnnnnnnnnnnnnnnnnnnnnnnnnnnnnnnnnnnnnnnnnnnnnnnnnnnnnnnnnnnnnnnnnnnnnnnnnnnnnnnnnnnnnnnnnnnnnnnnnnnnnnnnnnnnnnnnnnnnnnnnnnnnnnnnnnnnnnnnnnnnnnnnnnnnnnnnnnnnnnnnnnnnnnnnnnnnnnnnnnnnnnnnnnnnnnnnnnnnnnnnnnnnnnnnnnnnnnnnnnnnnnnnnnnnnnnnnnnnnnnnnnnnnnnnnnnnnnnnnnnnnnnnnnnnnnnnnnnnnnnnnnnnnnnnnnnnnnnnnnnnnnnnnnnnnnnnnnnnnnnnnnnnnnnnnnnnnnnnnnnnnnnnnnnnnnnnnnnnnnnnnnnnnnnnnnnnnnnnnnnnnnnnnnnnnnnnnnnnnnnnnnnnnnnnnnnnnnnnnnnnnnnnnnnnnnnnnnnnnnnnnnnnnnnnnnnnnnnnnnnnnnnnnnnnnnnnnnnnnnnnnnnnnnnnnnnnnnnnnnnnnnnnnnnnnnnnnnnnnnnnnnnnnnnnnnnnnnnnnnnnnnnnnnnnnnnnnnnnnnnnnnnnnnnnnnnnnnnnnnnnnnnnnnnnnnnnnnnnnnnnnnnnnnnnnnnnnnnnnnnnnnnnnnnnnnnnnnnnnnnnnnnnnnnnnnnnnnnnnnnnnnnnnnnnnnnnnnnnnnnnnnnnnnnnnnnnnnnnnnnnnnnnnnnnnnnnnnnnnnnnnnnnnnnnnnnnnnnnnnnnnnnnnnnnnnnnnnnnnnnnnnnnnnnnnnnnnnnnnnnnnnnnnnnnnnnnnnnnnnnnnnnnnnnnnnnnnnnnnnnnnnnnnnnnnnnnnnnnnnnnnnnnnnnnnnnnnnnnnnnnnnnnnnnnnnnnnnnnnnnnnnnnnnnnnnnnnnnnnnnnnnnnnnnnnnnnnnnnnnnnnnnnnnnnnnnnnnnnnnnnnnnnnnnnnnnnnnnnnnnnnnnnnnnnnnnnnnnnnnnnnnnnnnnnnnnnnnnnnnnnnnnnnnnnnnnnnnnnnnnnnnnnnnnnnnnnnnnnnnnnnnnnnnnnnnnnnnnnnnnnnnnnnnnnnnnnnnnnnnnnnnnnnnnnnnnnnnnnnnnnnnnnnnnnnnnnnnnnnnnnnnnnnnnnnnnnnnnnnnnnnnnnnnnnnnnnnnnnnnnnnnnnnnnnnnnnnnnnnnnnnnnnnnnnnnnnnnnnnnnnnnnnnnnnnnnnnnnnnnnnnnnnnnnnnnnnnnnnnnnnnnnnnnnnnnnnnnnnnnnnnnnnnnnnnnnnnnnnnnnnnnnnnnnnnnnnnnnnnnnnnnnnnnnnnnnnnnnnnnnnnnnnnnnnnnnnnnnnnnnnnnnnnnnnnnnnnnnnnnnnnnnnnnnnnnnnnnnnnnnnnnnnnnnnnnnnnnnnnnnnnnnnnnnnnnnnnnnnnnnnnnnnnnnnnnnnnnnnnnnnnnnnnnnnnnnnnnnnnnnnnnnnnnnnnnnnnnnnnnnnnnnnnnnnnnnnnnnnnnnnnnnnnnnnnnnnnnnnnnnnnnnnnnnnnnnnnnnnnnnnnnnnnnnnnnnnnnnnnnnnnnnnnnnnnnnnnnnnnnnnnnnnnnnnnnnnnnnnnnnnnnnnnnnnnnnnnnnnnnnnnnnnnnnnnnnnnnnnnnnnnnnnnnnnnnnnnnnnnnnnnnnnnnnnnnnnnnnnnnnnnnnnnnnnnnnnnnnnnnnnnnnnnnnnnnnnnnnnnnnnnnnnnnnnnnnnnnnnnnnnnnnnnnnnnnnnnnnnnnnnnnnnnnnnnnnnnnnnnnnnnnnnnnnnnnnnnnnnnnnnnnnnnnnnnnnnnnnnnnnnnnnnnnnnnnnnnnnnnnnnnnnnnnnnnnnnnnnnnnnnnnnnnnnnnnnnnnnnnnnnnnnnnnnnnnnnnnnnnnnnnnnnnnnnnnnnnnnnnnnnnnnnnnnnnnnnnnnnnnnnnnnnnnnnnnnnnnnnnnnnnnnnnnnnnnnnnnnnnnnnnnnnnnnnnnnnnnnnnnnnnnnnnnnnnnnnnnnnnnnnnnnnnnnnnnnnnnnnnnnnnnnnnnnnnnnnnnnnnnnnnnnnnnnnnnnnnnnnnnnnnnnnnnnnnnnnnnnnnnnnnnnnnnnnnnnnnnnnnnnnnnnnnnnnnnnnnnnnnnnnnnnnnnnnnnnnnnnnnnnnnnnnnnnnnnnnnnnnnnnnnnnnnnnnnnnnnnnnnnnnnnnnnnnnnnnnnnnnnnnnnnnnnnnnnnnnnnnnnnnnnnnnnnnnnnnnnnnnnnnnnnnnnnnnnnnnnnnnnnnnnnnnnnnnnnnnnnnnnnnnnnnnnnnnnnnnnnnnnnnnnnnnnnnnnnnnnnnnnnnnnnnnnnnnnnnnnnnnnnnnnnnnnnnnnnnnnnnnnnnnnnnnnnnnnnnnnnnnnnnnnnnnnnnnnnnnnnnnnnnnnnnnnnnnnnnnnnnnnnnnnnnnnnnnnnnnnnnnnnnnnnnnnnnnnnnnnnnnnnnnnnnnnnnnnnnnnnnnnnnnnnnnnnnnnnnnnnnnnnnnnnnnnnnnnnnnnnnnnnnnnnnnnnnnnnnnnnnnnnnnnnnnnnnnnnnnnnnnnnnnnnnnnnnnnnnnnnnnnnnnnnnnnnnnnnnnnnnnnnnnnnnnnnnnnnnnnnnnnnnnnnnnnnnnnnnnnnnnnnnnnnnnnnnnnnnnnnnnnnnnnnnnnnnnnnnnnnnnnnnnnnnnnnnnnnnnnnnnnnnnnnnnnnnnnnnnnnnnnnnnnnnnnnnnnnnnnnnnnnnnnnnnnnnnnnnnnnnnnnnnnnnnnnnnnnnnnnnnnnnnnnnnnnnnnnnnnnnnnnnnnnnnnnnnnnnnnnnnnnnnnnnnnnnnnnnnnnnnnnnnnnnnnnnnnnnnnnnnnnnnnnnnnnnnnnnnnnnnnnnnnnnnnnnnnnnnnnnnnnnnnnnnnnnnnnnnnnnnnnnnnnnnnnnnnnnnnnnnnnnnnnnnnnnnnnnnnnnnnnnnnnnnnnnnnnnnnnnnnnnnnnnnnnnnnnnnnnnnnnnnnnnnnnnnnnnnnnnnnnnnnnnnnnnnnnnnnnnnnnnnnnnnnnnnnnnnnnnnnnnnnnnnnnnnnnnnnnnnnnnnnnnnnnnnnnnnnnnnnnnnnnnnnnnnnnnnnnnnnnnnnnnnnnnnnnnnnnnnnnnnnnnnnnnnnnnnnnnnnnnnnnnnnnnnnnnnnnnnnnnnnnnnnnnnnnnnnnnnnnnnnnnnnnnnnnnnnnnnnnnnnnnnnnnnnnnnnnnnnnnnnnnnnnnnnnnnnnnnnnnnnnnnnnnnnnnnnnnnnnnnnnnnnnnnnnnnnnnnnnnnnnnnnnnnnnnnnnnnnnnnnnnnnnnnnnnnnnnnnnnnnnnnnnnnnnnnnnnnnnnnnnnnnnnnnnnnnnnnnnnnnnnnnnnnnnnnnnnnnnnnnnnnnnnnnnnnnnnnnnnnnnnnnnnnnnnnnnnnnnnnnnnnnnnnnnnnnnnnnnnnnnnnnnnnnnnnnnnnnnnnnnnnnnnnnnnnnnnnnnnnnnnnnnnnnnnnnnnnnnnnnnnnnnnnnnnnnnnnnnnnnnnnnnnnnnnnnnnnnnnnnnnnnnnnnnnnnnnnnnnnnnnnnnnnnnnnnnnnnnnnnnnnnnnnnnnnnnnnnnnnnnnnnnnnnnnnnnnnnnnnnnnnnnnnnnnnnnnnnnnnnnnnnnnnnnnnnnnnnnnnnnnnnnnnnnnnnnnnnnnnnnnnnnnnnnnnnnnnnnnnnnnnnnnnnnnnnnnnnnnnnnnnnnnnnnnnnnnnnnnnnnnnnnnnnnnnnnnnnnnnnnnnnnnnnnnnnnnnnnnnnnnnnnnnnnnnnnnnnnnnnnnnnnnnnnnnnnnnnnnnnnnnnnnnnnnnnnnnnnnnnnnnnnnnnnnnnnnnnnnnnnnnnnnnnnnnnnnnnnnnnnnnnnnnnnnnnnnnnnnnnnnnnnnnnnnnnnnnnnnnnnnnnnnnnnnnnnnnnnnnnnnnnnnnnnnnnnnnnnnnnnnnnnnnnnnnnnnnnnnnnnnnnnnnnnnnnnnnnnnnnnnnnnnnnnnnnnnnnnnnnnnnnnnnnnnnnnnnnnnnnnnnnnnnnnnnnnnnnnnnnnnnnnnnnnnnnnnnnnnnnnnnnnnnnnnnnnnnnnnnnnnnnnnnnnnnnnnnnnnnnnnnnnnnnnnnnnnnnnnnnnnnnnnnnnnnnnnnnnnnnnnnnnnnnnnnnnnnnnnnnnnnnnnnnnnnnnnnnnnnnnnnnnnnnnnnnnnnnnnnnnnnnnnnnnnnnnnnnnnnnnnnnnnnnnnnnnnnnnnnnnnnnnnnnnnnnnnnnnnnnnnnnnnnnnnnnnnnnnnnnnnnnnnnnnnnnnnnnnnnnnnnnnnnnnnnnnnnnnnnnnnnnnnnnnnnnnnnnnnnnnnnnnnnnnnnnnnnnnnnnnnnnnnnnnnnnnnnnnnnnnnnnnnnnnnnnnnnnnnnnnnnnnnnnnnnnnnnnnnnnnnnnnnnnnnnnnnnnnnnnnnnnnnnnnnnnnnnnnnnnnnnnnnnnnnnnnnnnnnnnnnnnnnnnnnnnnnnnnnnnnnnnnnnnnnnnnnnnnnnnnnnnnnnnnnnnnnnnnnnnnnnnnnnnnnnnnnnnnnnnnnnnnnnnnnnnnnnnnnnnnnnnnnnnnnnnnnnnnnnnnnnnnnnnnnnnnnnnnnnnnnnnnnnnnnnnnnnnnnnnnnnnnnnnnnnnnnnnnnnnnnnnnnnnnnnnnnnnnnnnnnnnnnnnnnnnnnnnnnnnnnnnnnnnnnnnnnnnnnnnnnnnnnnnnnnnnnnnnnnnnnnnnnnnnnnnnnnnnnnnnnnnnnnnnnnnnnnnnnnnnnnnnnnnnnnnnnnnnnnnnnnnnnnnnnnnnnnnnnnnnnnnnnnnnnnnnnnnnnnnnnnnnnnnnnnnnnnnnnnnnnnnnnnnnnnnnnnnnnnnnnnnnnnnnnnnnnnnnnnnnnnnnnnnnnnnnnnnnnnnnnnnnnnnnnnnnnnnnnnnnnnnnnnnnnnnnnnnnnnnnnnnnnnnnnnnnnnnnnnnnnnnnnnnnnnnnnnnnnnnnnnnnnnnnnnnnnnnnnnnnnnnnnnnnnnnnnnnnnnnnnnnnnnnnnnnnnnnnnnnnnnnnnnnnnnnnnnnnnnnnnnnnnnnnnnnnnnnnnnnnnnnnnnnnnnnnnnnnnnnnnnnnnnnnnnnnnnnnnnnnnnnnnnnnnnnnnnnnnnnnnnnnnnnnnnnnnnnnnnnnnnnnnnnnnnnnnnnnnnnnnnnnnnnnnnnnnnnnnnnnnnnnnnnnnnnnnnnnnnnnnnnnnnnnnnnnnnnnnnnnnnnnnnnnnnnnnnnnnnnnnnnnnnnnnnnnnnnnnnnnnnnnnnnnnnnnnnnnnnnnnnnnnnnnnnnnnnnnnnnnnnnnnnnnnnnnnnnnnnnnnnnnnnnnnnnnnnnnnnnnnnnnnnnnnnnnnnnnnnnnnnnnnnnnnnnnnnnnnnnnnnnnnnnnnnnnnnnnnnnnnnnnnnnnnnnnnnnnnnnnnnnnnnnnnnnnnnnnnnnnnnnnnnnnnnnnnnnnnnnnnnnnnnnnnnnnnnnnnnnnnnnnnnnnnnnnnnnnnnnnnnnnnnnnnnnnnnnnnnnnnnnnnnnnnnnnnnnnnnnnnnnnnnnnnnnnnnnnnnnnnnnnnnnnnnnnnnnnnnnnnnnnnnnnnnnnnnnnnnnnnnnnnnnnnnnnnnnnnnnnnnnnnnnnnnnnnnnnnnnnnnnnnnnnnnnnnnnnnnnnnnnnnnnnnnnnnnnnnnnnnnnnnnnnnnnnnnnnnnnnnnnnnnnnnnnnnnnnnnnnnnnnnnnnnnnnnnnnnnnnnnnnnnnnnnnnnnnnnnnnnnnnnnnnnnnnnnnnnnnnnnnnnnnnnnnnnnnnnnnnnnnnnnnnnnnnnnnnnnnnnnnnnnnnnnnnnnnnnnnnnnnnnnnnnnnnnnnnnnnnnnnnnnnnnnnnnnnnnnnnnnnnnnnnnnnnnnnnnnnnnnnnnnnnnnnnnnnnnnnnnnnnnnnnnnnnnnnnnnnnnnnnnnnnnnnnnnnnnnnnnnnnnnnnnnnnnnnnnnnnnnnnnnnnnnnnnnnnnnnnnnnnnnnnnnnnnnnnnnnnnnnnnnnnnnnnnnnnnnnnnnnnnnnnnnnnnnnnnnnnnnnnnnnnnnnnnnnnnnnnnnnnnnnnnnnnnnnnnnnnnnnnnnnnnnnnnnnnnnnnnnnnnnnnnnnnnnnnnnnnnnnnnnnnnnnnnnnnnnnnnnnnnnnnnnnnnnnnnnnnnnnnnnnnnnnnnnnnnnnnnnnnnnnnnnnnnnnnnnnnnnnnnnnnnnnnnnnnnnnnnnnnnnnnnnnnnnnnnnnnnnnnnnnnnnnnnnnnnnnnnnnnnnnnnnnnnnnnnnnnnnnnnnnnnnnnnnnnnnnnnnnnnnnnnnnnnnnnnnnnnnnnnnnnnnnnnnnnnnnnnnnnnnnnnnnnnnnnnnnnnnnnnnnnnnnnnnnnnnnnnnnnnnnnnnnnnnnnnnnnnnnnnnnnnnnnnnnnnnnnnnnnnnnnnnnnnnnnnnnnnnnnnnnnnnnnnnnnnnnnnnnnnnnnnnnnnnnnnnnnnnnnnnnnnnnnnnnnnnnnnnnnnnnnnnnnnnnnnnnnnnnnnnnnnnnnnnnnnnnnnnnnnnnnnnnnnnnnnnnnnnnnnnnnnnnnnnnnnnnnnnnnnnnnnnnnnnnnnnnnnnnnnnnnnnnnnnnnnnnnnnnnnnnnnnnnnnnnnnnnnnnnnnnnnnnnnnnnnnnnnnnnnnnnnnnnnnnnnnnnnnnnnnnnnnnnnnnnnnnnnnnnnnnnnnnnnnnnnnnnnnnnnnnnnnnnnnnnnnnnnnnnnnnnnnnnnnnnnnnnnnnnnnnnnnnnnnnnnnnnnnnnnnnnnnnnnnnnnnnnnnnnnnnnnnnnnnnnnnnnnnnnnnnnnnnnnnnnnnnnnnnnnnnnnnnnnnnnnnnnnnnnnnnnnnnnnnnnnnnnnnnnnnnnnnnnnnnnnnnnnnnnnnnnnnnnnnnnnnnnnnnnnnnnnnnnnnnnnnnnnnnnnnnnnnnnnnnnnnnnnnnnnnnnnnnnnnnnnnnnnnnnnnnnnnnnnnnnnnnnnnnnnnnnnnnnnnnnnnnnnnnnnnnnnnnnnnnnnnnnnnnnnnnnnnnnnnnnnnnnnnnnnnnnnnnnnnnnnnnnnnnnnnnnnnnnnnnnnnnnnnnnnnnnnnnnnnnnnnnnnnnnnnnnnnnnnnnnnnnnnnnnnnnnnnnnnnnnnnnnnnnnnnnnnnnnnnnnnnnnnnnnnnnnnnnnnnnnnnnnnnnnnnnnnnnnnnnnnnnnnnnnnnnnnnnnnnnnnnnnnnnnnnnnnnnnnnnnnnnnnnnnnnnnnnnnnnnnnnnnnnnnnnnnnnnnnnnnnnnnnnnnnnnnnnnnnnnnnnnnnnnnnnnnnnnnnnnnnnnnnnnnnnnnnnnnnnnnnnnnnnnnnnnnnnnnnnnnnnnnnnnnnnnnnnnnnnnnnnnnnnnnnnnnnnnnnnnnnnnnnnnnnnnnnnnnnnnnnnnnnnnnnnnnnnnnnnnnnnnnnnnnnnnnnnnnnnnnnnnnnnnnnnnnnnnnnnnnnnnnnnnnnnnnnnnnnnnnnnnnnnnnnnnnnnnnnnnnnnnnnnnnnnnnnnnnnnnnnnnnnnnnnnnnnnnnnnnnnnnnnnnnnnnnnnnnnnnnnnnnnnnnnnnnnnnnnnnnnnnnnnnnnnnnnnnnnnnnnnnnnnnnnnnnnnnnnnnnnnnnnnnnnnnnnnnnnnnnnnnnnnnnnnnnnnnnnnnnnnnnnnnnnnnnnnnnnnnnnnnnnnnnnnnnnnnnnnnnnnnnnnnnnnnnnnnnnnnnnnnnnnnnnnnnnnnnnnnnnnnnnnnnnnnnnnnnnnnnnnnnnnnnnnnnnnnnnnnnnnnnnnnnnnnnnnnnnnnnnnnnnnnnnnnnnnnnnnnnnnnnnnnnnnnnnnnnnnnnnnnnnnnnnnnnnnnnnnnnnnnnnnnnnnnnnnnnnnnnnnnnnnnnnnnnnnnnnnnnnnnnnnnnnnnnnnnnnnnnnnnnnnnnnnnnnnnnnnnnnnnnnnnnnnnnnnnnnnnnnnnnnnnnnnnnnnnnnnnnnnnnnnnnnnnnnnnnnnnnnnnnnnnnnnnnnnnnnnnnnnnnnnnnnnnnnnnnnnnnnnnnnnnnnnnnnnnnnnnnnnnnnnnnnnnnnnnnnnnnnnnnnnnnnnnnnnnnnnnnnnnnnnnnnnnnnnnnnnnnnnnnnnnnnnnnnnnnnnnnnnnnnnnnnnnnnnnnnnnnnnnnnnnnnnnnnnnnnnnnnnnnnnnnnnnnnnnnnnnnnnnnnnnnnnnnnnnnnnnnnnnnnnnnnnnnnnnnnnnnnnnnnnnnnnnnnnnnnnnnnnnnnnnnnnnnnnnnnnnnnnnnnnnnnnnnnnnnnnnnnnnnnnnnnnnnnnnnnnnnnnnnnnnnnnnnnnnnnnnnnnnnnnnnnnnnnnnnnnnnnnnnnnnnnnnnnnnnnnnnnnnnnnnnnnnnnnnnnnnnnnnnnnnnnnnnnnnnnnnnnnnnnnnnnnnnnnnnnnnnnnnnnnnnnnnnnnnnnnnnnnnnnnnnnnnnnnnnnnnnnnnnnnnnnnnnnnnnnnnnnnnnnnnnnnnnnnnnnnnnnnnnnnnnnnnnnnnnnnnnnnnnnnnnnnnnnnnnnnnnnnnnnnnnnnnnnnnnnnnnnnnnnnnnnnnnnnnnnnnnnnnnnnnnnnnnnnnnnnnnnnnnnnnnnnnnnnnnnnnnnnnnnnnnnnnnnnnnnnnnnnnnnnnnnnnnnnnnnnnnnnnnnnnnnnnnnnnnnnnnnnnnnnnnnnnnnnnnnnnnnnnnnnnnnnnnnnnnnnnnnnnnnnnnnnnnnnnnnnnnnnnnnnnnnnnnnnnnnnnnnnnnnnnnnnnnnnnnnnnnnnnnnnnnnnnnnnnnnnnnnnnnnnnnnnnnnnnnnnnnnnnnnnnnnnnnnnnnnnnnnnnnnnnnnnnnnnnnnnnnnnnnnnnnnnnnnnnnnnnnnnnnnnnnnnnnnnnnnnnnnnnnnnnnnnnnnnnnnnnnnnnnnnnnnnnnnnnnnnnnnnnnnnnnnnnnnnnnnnnnnnnnnnnnnnnnnnnnnnnnnnnnnnnnnnnnnnnnnnnnnnnnnnnnnnnnnnnnnnnnnnnnnnnnnnnnnnnnnnnnnnnnnnnnnnnnnnnnnnnnnnnnnnnnnnnnnnnnnnnnnnnnnnnnnnnnnnnnnnnnnnnnnnnnnnnnnnnnnnnnnnnnnnnnnnnnnnnnnnnnnnnnnnnnnnnnnnnnnnnnnnnnnnnnnnnnnnnnnnnnnnnnnnnnnnnnnnnnnnnnnnnnnnnnnnnnnnnnnnnnnnnnnnnnnnnnnnnnnnnnnnnnnnnnnnnnnnnnnnnnnnnnnnnnnnnnnnnnnnnnnnnnnnnnnnnnnnnnnnnnnnnnnnnnnnnnnnnnnnnnnnnnnnnnnnnnnnnnnnnnnnnnnnnnnnnnnnnnnnnnnnnnnnnnnnnnnnnnnnnnnnnnnnnnnnnnnnnnnnnnnnnnnnnnnnnnnnnnnnnnnnnnnnnnnnnnnnnnnnnnnnnnnnnnnnnnnnnnnnnnnnnnnnnnnnnnnnnnnnnnnnnnnnnnnnnnnnnnnnnnnnnnnnnnnnnnnnnnnnnnnnnnnnnnnnnnnnnnnnnnnnnnnnnnnnnnnnnnnnnnnnnnnnnnnnnnnnnnnnnnnnnnnnnnnnnnnnnnnnnnnnnnnnnnnnnnnnnnnnnnnnnnnnnnnnnnnnnnnnnnnnnnnnnnnnnnnnnnnnnnnnnnnnnnnnnnnnnnnnnnnnnnnnnnnnnnnnnnnnnnnnnnnnnnnnnnnnnnnnnnnnnnnnnnnnnnnnnnnnnnnnnnnnnnnnnnnnnnnnnnnnnnnnnnnnnnnnnnnnnnnnnnnnnnnnnnnnnnnnnnnnnnnnnnnnnnnnnnnnnnnnnnnnnnnnnnnnnnnnnnnnnnnnnnnnnnnnnnnnnnnnnnnnnnnnnnnnnnnnnnnnnnnnnnnnnnnnnnnnnnnnnnnnnnnnnnnnnnnnnnnnnnnnnnnnnnnnnnnnnnnnnnnnnnnnnnnnnnnnnnnnnnnnnnnnnnnnnnnnnnnnnnnnnnnnnnnnnnnnnnnnnnnnnnnnnnnnnnnnnnnnnnnnnnnnnnnnnnnnnnnnnnnnnnnnnnnnnnnnnnnnnnnnnnnnnnnnnnnnnnnnnnnnnnnnnnnnnnnnnnnnnnnnnnnnnnnnnnnnnnnnnnnnnnnnnnnnnnnnnnnnnnnnnnnnnnnnnnnnnnnnnnnnnnnnnnnnnnnnnnnnnnnnnnnnnnnnnnnnnnnnnnnnnnnnnnnnnnnnnnnnnnnnnnnnnnnnnnnnnnnnnnnnnnnnnnnnnnnnnnnnnnnnnnnnnnnnnnnnnnnnnnnnnnnnnnnnnnnnnnnnnnnnnnnnnnnnnnnnnnnnnnnnnnnnnnnnnnnnnnnnnnnnnnnnnnnnnnnnnnnnnnnnnnnnnnnnnnnnnnnnnnnnnnnnnnnnnnnnnnnnnnnnnnnnnnnnnnnnnnnnnnnnnnnnnnnnnnnnnnnnnnnnnnnnnnnnnnnnnnnnnnnnnnnnnnnnnnnnnnnnnnnnnnnnnnnnnnnnnnnnnnnnnnnnnnnnnnnnnnnnnnnnnnnnnnnnnnnnnnnnnnnnnnnnnnnnnnnnnnnnnnnnnnnnnnnnnnnnnnnnnnnnnnnnnnnnnnnnnnnnnnnnnnnnnnnnnnnnnnnnnnnnnnnnnnnnnnnnnnnnnnnnnnnnnnnnnnnnnnnnnnnnnnnnnnnnnnnnnnnnnnnnnnnnnnnnnnnnnnnnnnnnnnnnnnnnnnnnnnnnnnnnnnnnnnnnnnnnnnnnnnnnnnnnnnnnnnnnnnnnnnnnnnnnnnnnnnnnnnnnnnnnnnnnnnnnnnnnnnnnnnnnnnnnnnnnnnnnnnnnnnnnnnnnnnnnnnnnnnnnnnnnnnnnnnnnnnnnnnnnnnnnnnnnnnnnnnnnnnnnnnnnnnnnnnnnnnnnnnnnnnnnnnnnnnnnnnnnnnnnnnnnnnnnnnnnnnnnnnnnnnnnnnnnnnnnnnnnnnnnnnnnnnnnnnnnnnnnnnnnnnnnnnnnnnnnnnnnnnnnnnnnnnnnnnnnnnnnnnnnnnnnnnnnnnnnnnnnnnnnnnnnnnnnnnnnnnnnnnnnnnnnnnnnnnnnnnnnnnnnnnnnnnnnnnnnnnnnnnnnnnnnnnnnnnnnnnnnnnnnnnnnnnnnnnnnnnnnnnnnnnnnnnnnnnnnnnnnnnnnnnnnnnnnnnnnnnnnnnnnnnnnnnnnnnnnnnnnnnnnnnnnnnnnnnnnnnnnnnnnnnnnnnnnnnnnnnnnnnnnnnnnnnnnnnnnnnnnnnnnnnnnnnnnnnnnnnnnnnnnnnnnnnnnnnnnnnnnnnnnnnnnnnnnnnnnnnnnnnnnnnnnnnnnnnnnnnnnnnnnnnnnnnnnnnnnnnnnnnnnnnnnnnnnnnnnnnnnnnnnnnnnnnnnnnnnnnnnnnnnnnnnnnnnnnnnnnnnnnnnnnnnnnnnnnnnnnnnnnnnnnnnnnnnnnnnnnnnnnnnnnnnnnnnnnnnnnnnnnnnnnnnnnnnnnnnnnnnnnnnnnnnnnnnnnnnnnnnnnnnnnnnnnnnnnnnnnnnnnnnnnnnnnnnnnnnnnnnnnnnnnnnnnnnnnnnnnnnnnnnnnnnnnnnnnnnnnnnnnnnnnnnnnnnnnnnnnnnnnnnnnnnnnnnnnnnnnnnnnnnnnnnnnnnnnnnnnnnnnnnnnnnnnnnnnnnnnnnnnnnnnnnnnnnnnnnnnnnnnnnnnnnnnnnnnnnnnnnnnnnnnnnnnnnnnnnnnnnnnnnnnnnnnnnnnnnnnnnnnnnnnnnnnnnnnnnnnnnnnnnnnnnnnnnnnnnnnnnnnnnnnnnnnnnnnnnnnnnnnnnnnnnnnnnnnnnnnnnnnnnnnnnnnnnnnnnnnnnnnnnnnnnnnnnnnnnnnnnnnnnnnnnnnnnnnnnnnnnnnnnnnnnnnnnnnnnnnnnnnnnnnnnnnnnnnnnnnnnnnnnnnnnnnnnnnnnnnnnnnnnnnnnnnnnnnnnnnnnnnnnnnnnnnnnnnnnnnnnnnnnnnnnnnnnnnnnnnnnnnnnnnnnnnnnnnnnnnnnnnnnnnnnnnnnnnnnnnnnnnnnnnnnnnnnnnnnnnnnnnnnnnnnnnnnnnnnnnnnnnnnnnnnnnnnnnnnnnnnnnnnnnnnnnnnnnnnnnnnnnnnnnnnnnnnnnnnnnnnnnnnnnnnnnnnnnnnnnnnnnnnnnnnnnnnnnnnnnnnnnnnnnnnnnnnnnnnnnnnnnnnnnnnnnnnnnnnnnnnnnnnnnnnnnnnnnnnnnnnnnnnnnnnnnnnnnnnnnnnnnnnnnnnnnnnnnnnnnnnnnnnnnnnnnnnnnnnnnnnnnnnnnnnnnnnnnnnnnnnnnnnnnnnnnnnnnnnnnnnnnnnnnnnnnnnnnnnnnnnnnnnnnnnnnnnnnnnnnnnnnnnnnnnnnnnnnnnnnnnnnnnnnnnnnnnnnnnnnnnnnnnnnnnnnnnnnnnnnnnnnnnnnnnnnnnnnnnnnnnnnnnnnnnnnnnnnnnnnnnnnnnnnnnnnnnnnnnnnnnnnnnnnnnnnnnnnnnnnnnnnnnnnnnnnnnnnnnnnnnnnnnnnnnnnnnnnnnnnnnnnnnnnnnnnnnnnnnnnnnnnnnnnnnnnnnnnnnnnnnnnnnnnnnnnnnnnnnnnnnnnnnnnnnnnnnnnnnnnnnnnnnnnnnnnnnnnnnnnnnnnnnnnnnnnnnnnnnnnnnnnnnnnnnnnnnnnnnnnnnnnnnnnnnnnnnnnnnnnnnnnnnnnnnnnnnnnnnnnnnnnnnnnnnnnnnnnnnnnnnnnnnnnnnnnnnnnnnnnnnnnnnnnnnnnnnnnnnnnnnnnnnnnnnnnnnnnnnnnnnnnnnnnnnnnnnnnnnnnnnnnnnnnnnnnnnnnnnnnnnnnnnnnnnnnnnnnnnnnnnnnnnnnnnnnnnnnnnnnnnnnnnnnnnnnnnnnnnnnnnnnnnnnnnnnnnnnnnnnnnnnnnnnnnnnnnnnnnnnnnnnnnnnnnnnnnnnnnnnnnnnnnnnnnnnnnnnnnnnnnnnnnnnnnnnnnnnnnnnnnnnnnnnnnnnnnnnnnnnnnnnnnnnnnnnnnnnnnnnnnnnnnnnnnnnnnnnnnnnnnnnnnnnnnnnnnnnnnnnnnnnnnnnnnnnnnnnnnnnnnnnnnnnnnnnnnnnnnnnnnnnnnnnnnnnnnnnnnnnnnnnnnnnnnnnnnnnnnnnnnnnnnnnnnnnnnnnnnnnnnnnnnnnnnnnnnnnnnnnnnnnnnnnnnnnnnnnnnnnnnnnnnnnnnnnnnnnnnnnnnnnnnnnnnnnnnnnnnnnnnnnnnnnnnnnnnnnnnnnnnnnnnnnnnnnnnnnnnnnnnnnnnnnnnnnnnnnnnnnnnnnnnnnnnnnnnnnnnnnnnnnnnnnnnnnnnnnnnnnnnnnnnnnnnnnnnnnnnnnnnnnnnnnnnnnnnnnnnnnnnnnnnnnnnnnnnnnnnnnnnnnnnnnnnnnnnnnnnnnnnnnnnnnnnnnnnnnnnnnnnnnnnnnnnnnnnnnnnnnnnnnnnnnnnnnnnnnnnnnnnnnnnnnnnnnnnnnnnnnnnnnnnnnnnnnnnnnnnnnnnnnnnnnnnnnnnnnnnnnnnnnnnnnnnnnnnnnnnnnnnnnnnnnnnnnnnnnnnnnnnnnnnnnnnnnnnnnnnnnnnnnnnnnnnnnnnnnnnnnnnnnnnnnnnnnnnnnnnnnnnnnnnnnnnnnnnnnnnnnnnnnnnnnnnnnnnnnnnnnnnnnnnnnnnnnnnnnnnnnnnnnnnnnnnnnnnnnnnnnnnnnnnnnnnnnnnnnnnnnnnnnnnnnnnnnnnnnnnnnnnnnnnnnnnnnnnnnnnnnnnnnnnnnnnnnnnnnnnnnnnnnnnnnnnnnnnnnnnnnnnnnnnnnnnnnnnnnnnnnnnnnnnnnnnnnnnnnnnnnnnnnnnnnnnnnnnnnnnnnnnnnnnnnnnnnnnnnnnnnnnnnnnnnnnnnnnnnnnnnnnnnnnnnnnnnnnnnnnnnnnnnnnnnnnnnnnnnnnnnnnnnnnnnnnnnnnnnnnnnnnnnnnnnnnnnnnnnnnnnnnnnnnnnnnnnnnnnnnnnnnnnnnnnnnnnnnnnnnnnnnnnnnnnnnnnnnnnnnnnnnnnnnnnnnnnnnnnnnnnnnnnnnnnnnnnnnnnnnnnnnnnnnnnnnnnnnnnnnnnnnnnnnnnnnnnnnnnnnnnnnnnnnnnnnnnnnnnnnnnnnnnnnnnnnnnnnnnnnnnnnnnnnnnnnnnnnnnnnnnnnnnnnnnnnnnnnnnnnnnnnnnnnnnnnnnnnnnnnnnnnnnnnnnnnnnnnnnnnnnnnnnnnnnnnnnnnnnnnnnnnnnnnnnnnnnnnnnnnnnnnnnnnnnnnnnnnnnnnnnnnnnnnnnnnnnnnnnnnnnnnnnnnnnnnnnnnnnnnnnnnnnnnnnnnnnnnnnnnnnnnnnnnnnnnnnnnnnnnnnnnnnnnnnnnnnnnnnnnnnnnnnnnnnnnnnnnnnnnnnnnnnnnnnnnnnnnnnnnnnnnnnnnnnnnnnnnnnnnnnnnnnnnnnnnnnnnnnnnnnnnnnnnnnnnnnnnnnnnnnnnnnnnnnnnnnnnnnnnnnnnnnnnnnnnnnnnnnnnnnnnnnnnnnnnnnnnnnnnnnnnnnnnnnnnnnnnnnnnnnnnnnnnnnnnnnnnnnnnnnnnnnnnnnnnnnnnnnnnnnnnnnnnnnnnnnnnnnnnnnnnnnnnnnnnnnnnnnnnnnnnnnnnnnnnnnnnnnnnnnnnnnnnnnnnnnnnnnnnnnnnnnnnnnnnnnnnnnnnnnnnnnnnnnnnnnnnnnnnnnnnnnnnnnnnnnnnnnnnnnnnnnnnnnnnnnnnnnnnnnnnnnnnnnnnnnnnnnnnnnnnnnnnnnnnnnnnnnnnnnnnnnnnnnnnnnnnnnnnnnnnnnnnnnnnnnnnnnnnnnnnnnnnnnnnnnnnnnnnnnnnnnnnnnnnnnnnnnnnnnnnnnnnnnnnnnnnnnnnnnnnnnnnnnnnnnnnnnnnnnnnnnnnnnnnnnnnnnnnnnnnnnnnnnnnnnnnnnnnnnnnnnnnnnnnnnnnnnnnnnnnnnnnnnnnnnnnnnnnnnnnnnnnnnnnnnnnnnnnnnnnnnnnnnnnnnnnnnnnnnnnnnnnnnnnnnnnnnnnnnnnnnnnnnnnnnnnnnnnnnnnnnnnnnnnnnnnnnnnnnnnnnnnnnnnnnnnnnnnnnnnnnnnnnnnnnnnnnnnnnnnnnnnnnnnnnnnnnnnnnnnnnnnnnnnnnnnnnnnnnnnnnnnnnnnnnnnnnnnnnnnnnnnnnnnnnnnnnnnnnnnnnnnnnnnnnnnnnnnnnnnnnnnnnnnnnnnnnnnnnnnnnnnnnnnnnnnnnnnnnnnnnnnnnnnnnnnnnnnnnnnnnnnnnnnnnnnnnnnnnnnnnnnnnnnnnnnnnnnnnnnnnnnnnnnnnnnnnnnnnnnnnnnnnnnnnnnnnnnnnnnnnnnnnnnnnnnnnnnnnnnnnnnnnnnnnnnnnnnnnnnnnnnnnnnnnnnnnnnnnnnnnnnnnnnnnnnnnnnnnnnnnnnnnnnnnnnnnnnnnnnnnnnnnnnnnnnnnnnnnnnnnnnnnnnnnnnnnnnnnnnnnnnnnnnnnnnnnnnnnnnnnnnnnnnnnnnnnnnnnnnnnnnnnnnnnnnnnnnnnnnnnnnnnnnnnnnnnnnnnnnnnnnnnnnnnnnnnnnnnnnnnnnnnnnnnnnnnnnnnnnnnnnnnnnnnnnnnnnnnnnnnnnnnnnnnnnnnnnnnnnnnnnnnnnnnnnnnnnnnnnnnnnnnnnnnnnnnnnnnnnnnnnnnnnnnnnnnnnnnnnnnnnnnnnnnnnnnnnnnnnnnnnnnnnnnnnnnnnnnnnnnnnnnnnnnnnnnnnnnnnnnnnnnnnnnnnnnnnnnnnnnnnnnnnnnnnnnnnnnnnnnnnnnnnnnnnnnnnnnnnnnnnnnnnnnnnnnnnnnnnnnnnnnnnnnnnnnnnnnnnnnnnnnnnnnnnnnnnnnnnnnnnnnnnnnnnnnnnnnnnnnnnnnnnnnnnnnnnnnnnnnnnnnnnnnnnnnnnnnnnnnnnnnnnnnnnnnnnnnnnnnnnnnnnnnnnnnnnnnnnnnnnnnnnnnnnnnnnnnnnnnnnnnnnnnnnnnnnnnnnnnnnnnnnnnnnnnnnnnnnnnnnnnnnnnnnnnnnnnnnnnnnnnnnnnnnnnnnnnnnnnnnnnnnnnnnnnnnnnnnnnnnnnnnnnnnnnnnnnnnnnnnnnnnnnnnnnnnnnnnnnnnnnnnnnnnnnnnnnnnnnnnnnnnnnnnnnnnnnnnnnnnnnnnnnnnnnnnnnnnnnnnnnnnnnnnnnnnnnnnnnnnnnnnnnnnnnnnnnnnnnnnnnnnnnnnnnnnnnnnnnnnnnnnnnnnnnnnnnnnnnnnnnnnnnnnnnnnnnnnnnnnnnnnnnnnnnnnnnnnnnnnnnnnnnnnnnnnnnnnnnnnnnnnnnnnnnnnnnnnnnnnnnnnnnnnnnnnnnnnnnnnnnnnnnnnnnnnnnnnnnnnnnnnnnnnnnnnnnnnnnnnnnnnnnnnnnnnnnnnnnnnnnnnnnnnnnnnnnnnnnnnnnnnnnnnnnnnnnnnnnnnnnnnnnnnnnnnnnnnnnnnnnnnnnnnnnnnnnnnnnnnnnnnnnnnnnnnnnnnnnnnnnnnnnnnnnnnnnnnnnnnnnnnnnnnnnnnnnnnnnnnnnnnnnnnnnnnnnnnnnnnnnnnnnnnnnnnnnnnnnnnnnnnnnnnnnnnnnnnnnnnnnnnnnnnnnnnnnnnnnnnnnnnnnnnnnnnnnnnnnnnnnnnnnnnnnnnnnnnnnnnnnnnnnnnnnnnnnnnnnnnnnnnnnnnnnnnnnnnnnnnnnnnnnnnnnnnnnnnnnnnnnnnnnnnnnnnnnnnnnnnnnnnnnnnnnnnnnnnnnnnnnnnnnnnnnnnnnnnnnnnnnnnnnnnnnnnnnnnnnnnnnnnnnnnnnnnnnnnnnnnnnnnnnnnnnnnnnnnnnnnnnnnnnnnnnnnnnnnnnnnnnnnnnnnnnnnnnnnnnnnnnnnnnnnnnnnnnnnnnnnnnnnnnnnnnnnnnnnnnnnnnnnnnnnnnnnnnnnnnnnnnnnnnnnnnnnnnnnnnnnnnnnnnnnnnnnnnnnnnnnnnnnnnnnnnnnnnnnnnnnnnnnnnnnnnnnnnnnnnnnnnnnnnnnnnnnnnnnnnnnnnnnnnnnnnnnnnnnnnnnnnnnnnnnnnnnnnnnnnnnnnnnnnnnnnnnnnnnnnnnnnnnnnnnnnnnnnnnnnnnnnnnnnnnnnnnnnnnnnnnnnnnnnnnnnnnnnnnnnnnnnnnnnnnnnnnnnnnnnnnnnnnnnnnnnnnnnnnnnnnnnnnnnnnnnnnnnnnnnnnnnnnnnnnnnnnnnnnnnnnnnnnnnnnnnnnnnnnnnnnnnnnnnnnnnnnnnnnnnnnnnnnnnnnnnnnnnnnnnnnnnnnnnnnnnnnnnnnnnnnnnnnnnnnnnnnnnnnnnnnnnnnnnnnnnnnnnnnnnnnnnnnnnnnnnnnnnnnnnnnnnnnnnnnnnnnnnnnnnnnnnnnnnnnnnnnnnnnnnnnnnnnnnnnnnnnnnnnnnnnnnnnnnnnnnnnnnnnnnnnnnnnnnnnnnnnnnnnnnnnnnnnnnnnnnnnnnnnnnnnnnnnnnnnnnnnnnnnnnnnnnnnnnnnnnnnnnnnnnnnnnnnnnnnnnnnnnnnnnnnnnnnnnnnnnnnnnnnnnnnnnnnnnnnnnnnnnnnnnnnnnnnnnnnnnnnnnnnnnnnnnnnnnnnnnnnnnnnnnnnnnnnnnnnnnnnnnnnnnnnnnnnnnnnnnnnnnnnnnnnnnnnnnnnnnnnnnnnnnnnnnnnnnnnnnnnnnnnnnnnnnnnnnnnnnnnnnnnnnnnnnnnnnnnnnnnnnnnnnnnnnnnnnnnnnnnnnnnnnnnnnnnnnnnnnnnnnnnnnnnnnnnnnnnnnnnnnnnnnnnnnnnnnnnnnnnnnnnnnnnnnnnnnnnnnnnnnnnnnnnnnnnnnnnnnnnnnnnnnnnnnnnnnnnnnnnnnnnnnnnnnnnnnnnnnnnnnnnnnnnnnnnnnnnnnnnnnnnnnnnnnnnnnnnnnnnnnnnnnnnnnnnnnnnnnnnnnnnnnnnnnnnnnnnnnnnnnnnnnnnnnnnnnnnnnnnnnnnnnnnnnnnnnnnnnnnnnnnnnnnnnnnnnnnnnnnnnnnnnnnnnnnnnnnnnnnnnnnnnnnnnnnnnnnnnnnnnnnnnnnnnnnnnnnnnnnnnnnnnnnnnnnnnnnnnnnnnnnnnnnnnnnnnnnnnnnnnnnnnnnnnnnnnnnnnnnnnnnnnnnnnnnnnnnnnnnnnnnnnnnnnnnnnnnnnnnnnnnnnnnnnnnnnnnnnnnnnnnnnnnnnnnnnnnnnnnnnnnnnnnnnnnnnnnnnnnnnnnnnnnnnnnnnnnnnnnnnnnnnnnnnnnnnnnnnnnnnnnnnnnnnnnnnnnnnnnnnnnnnnnnnnnnnnnnnnnnnnnnnnnnnnnnnnnnnnnnnnnnnnnnnnnnnnnnnnnnnnnnnnnnnnnnnnnnnnnnnnnnnnnnnnnnnnnnnnnnnnnnnnnnnnnnnnnnnnnnnnnnnnnnnnnnnnnnnnnnnnnnnnnnnnnnnnnnnnnnnnnnnnnnnnnnnnnnnnnnnnnnnnnnnnnnnnnnnnnnnnnnnnnnnnnnnnnnnnnnnnnnnnnnnnnnnnnnnnnnnnnnnnnnnnnnnnnnnnnnnnnnnnnnnnnnnnnnnnnnnnnnnnnnnnnnnnnnnnnnnnnnnnnnnnnnnnnnnnnnnnnnnnnnnnnnnnnnnnnnnnnnnnnnnnnnnnnnnnnnnnnnnnnnnnnnnnnnnnnnnnnnnnnnnnnnnnnnnnnnnnnnnnnnnnnnnnnnnnnnnnnnnnnnnnnnnnnnnnnnnnnnnnnnnnnnnnnnnnnnnnnnnnnnnnnnnnnnnnnnnnnnnnnnnnnnnnnnnnnnnnnnnnnnnnnnnnnnnnnnnnnnnnnnnnnnnnnnnnnnnnnnnnnnnnnnnnnnnnnnnnnnnnnnnnnnnnnnnnnnnnnnnnnnnnnnnnnnnnnnnnnnnnnnnnnnnnnnnnnnnnnnnnnnnnnnnnnnnnnnnnnnnnnnnnnnnnnnnnnnnnnnnnnnnnnnnnnnnnnnnnnnnnnnnnnnnnnnnnnnnnnnnnnnnnnnnnnnnnnnnnnnnnnnnnnnnnnnnnnnnnnnnnnnnnnnnnnnnnnnnnnnnnnnnnnnnnnnnnnnnnnnnnnnnnnnnnnnnnnnnnnnnnnnnnnnnnnnnnnnnnnnnnnnnnnnnnnnnnnnnnnnnnnnnnnnnnnnnnnnnnnnnnnnnnnnnnnnnnnnnnnnnnnnnnnnnnnnnnnnnnnnnnnnnnnnnnnnnnnnnnnnnnnnnnnnnnnnnnnnnnnnnnnnnnnnnnnnnnnnnnnnnnnnnnnnnnnnnnnnnnnnnnnnnnnnnnnnnnnnnnnnnnnnnnnnnnnnnnnnnnnnnnnnnnnnnnnnnnnnnnnnnnnnnnnnnnnnnnnnnnnnnnnnnnnnnnnnnnnnnnnnnnnnnnnnnnnnnnnnnnnnnnnnnnnnnnnnnnnnnnnnnnnnnnnnnnnnnnnnnnnnnnnnnnnnnnnnnnnnnnnnnnnnnnnnnnnnnnnnnnnnnnnnnnnnnnnnnnnnnnnnnnnnnnnnnnnnnnnnnnnnnnnnnnnnnnnnnnnnnnnnnnnnnnnnnnnnnnnnnnnnnnnnnnnnnnnnnnnnnnnnnnnnnnnnnnnnnnnnnnnnnnnnnnnnnnnnnnnnnnnnnnnnnnnnnnnnnnnnnnnnnnnnnnnnnnnnnnnnnnnnnnnnnnnnnnnnnnnnnnnnnnnnnnnnnnnnnnnnnnnnnnnnnnnnnnnnnnnnnnnnnnnnnnnnnnnnnnnnnnnnnnnnnnnnnnnnnnnnnnnnnnnnnnnnnnnnnnnnnnnnnnnnnnnnnnnnnnnnnnnnnnnnnnnnnnnnnnnnnnnnnnnnnnnnnnnnnnnnnnnnnnnnnnnnnnnnnnnnnnnnnnnnnnnnnnnnnnnnnnnnnnnnnnnnnnnnnnnnnnnnnnnnnnnnnnnnnnnnnnnnnnnnnnnnnnnnnnnnnnnnnnnnnnnnnnnnnnnnnnnnnnnnnnnnnnnnnnnnnnnnnnnnnnnnnnnnnnnnnnnnnnnnnnnnnnnnnnnnnnnnnnnnnnnnnnnnnnnnnnnnnnnnnnnnnnnnnnnnnnnnnnnnnnnnnnnnnnnnnnnnnnnnnnnnnnnnnnnnnnnnnnnnnnnnnnnnnnnnnnnnnnnnnnnnnnnnnnnnnnnnnnnnnnnnnnnnnnnnnnnnnnnnnnnnnnnnnnnnnnnnnnnnnnnnnnnnnnnnnnnnnnnnnnnnnnnnnnnnnnnnnnnnnnnnnnnnnnnnnnnnnnnnnnnnnnnnnnnnnnnnnnnnnnnnnnnnnnnnnnnnnnnnnnnnnnnnnnnnnnnnnnnnnnnnnnnnnnnnnnnnnnnnnnnnnnnnnnnnnnnnnnnnnnnnnnnnnnnnnnnnnnnnnnnnnnnnnnnnnnnnnnnnnnnnnnnnnnnnnnnnnnnnnnnnnnnnnnnnnnnnnnnnnnnnnnnnnnnnnnnnnnnnnnnnnnnnnnnnnnnnnnnnnnnnnnnnnnnnnnnnnnnnnnnnnnnnnnnnnnnnnnnnnnnnnnnnnnnnnnnnnnnnnnnnnnnnnnnnnnnnnnnnnnnnnnnnnnnnnnnnnnnnnnnnnnnnnnnnnnnnnnnnnnnnnnnnnnnnnnnnnnnnnnnnnnnnnnnnnnnnnnnnnnnnnnnnnnnnnnnnnnnnnnnnnnnnnnnnnnnnnnnnnnnnnnnnnnnnnnnnnnnnnnnnnnnnnnnnnnnnnnnnnnnnnnnnnnnnnnnnnnnnnnnnnnnnnnnnnnnnnnnnnnnnnnnnnnnnnnnnnnnnnnnnnnnnnnnnnnnnnnnnnnnnnnnnnnnnnnnnnnnnnnnnnnnnnnnnnnnnnnnnnnnnnnnnnnnnnnnnnnnnnnnnnnnnnnnnnnnnnnnnnnnnnnnnnnnnnnnnnnnnnnnnnnnnnnnnnnnnnnnnnnnnnnnnnnnnnnnnnnnnnnnnnnnnnnnnnnnnnnnnnnnnnnnnnnnnnnnnnnnnnnnnnnnnnnnnnnnnnnnnnnnnnnnnnnnnnnnnnnnnnnnnnnnnnnnnnnnnnnnnnnnnnnnnnnnnnnnnnnnnnnnnnnnnnnnnnnnnnnnnnnnnnnnnnnnnnnnnnnnnnnnnnnnnnnnnnnnnnnnnnnnnnnnnnnnnnnnnnnnnnnnnnnnnnnnnnnnnnnnnnnnnnnnnnnnnnnnnnnnnnnnnnnnnnnnnnnnnnnnnnnnnnnnnnnnnnnnnnnnnnnnnnnnnnnnnnnnnnnnnnnnnnnnnnnnnnnnnnnnnnnnnnnnnnnnnnnnnnnnnnnnnnnnnnnnnnnnnnnnnnnnnnnnnnnnnnnnnnnnnnnnnnnnnnnnnnnnnnnnnnnnnnnnnnnnnnnnnnnnnnnnnnnnnnnnnnnnnnnnnnnnnnnnnnnnnnnnnnnnnnnnnnnnnnnnnnnnnnnnnnnnnnnnnnnnnnnnnnnnnnnnnnnnnnnnnnnnnnnnnnnnnnnnnnnnnnnnnnnnnnnnnnnnnnnnnnnnnnnnnnnnnnnnnnnnnnnnnnnnnnnnnnnnnnnnnnnnnnnnnnnnnnnnnnnnnnnnnnnnnnnnnnnnnnnnnnnnnnnnnnnnnnnnnnnnnnnnnnnnnnnnnnnnnnnnnnnnnnnnnnnnnnnnnnnnnnnnnnnnnnnnnnnnnnnnnnnnnnnnnnnnnnnnnnnnnnnnnnnnnnnnnnnnnnnnnnnnnnnnnnnnnnnnnnnnnnnnnnnnnnnnnnnnnnnnnnnnnnnnnnnnnnnnnnnnnnnnnnnnnnnnnnnnnnnnnnnnnnnnnnnnnnnnnnnnnnnnnnnnnnnnnnnnnnnnnnnnnnnnnnnnnnnnnnnnnnnnnnnnnnnnnnnnnnnnnnnnnnnnnnnnnnnnnnnnnnnnnnnnnnnnnnnnnnnnnnnnnnnnnnnnnnnnnnnnnnnnnnnnnnnnnnnnnnnnnnnnnnnnnnnnnnnnnnnnnnnnnnnnnnnnnnnnnnnnnnnnnnnnnnnnnnnnnnnnnnnnnnnnnnnnnnnnnnnnnnnnnnnnnnnnnnnnnnnnnnnnnnnnnnnnnnnnnnnnnnnnnnnnnnnnnnnnnnnnnnnnnnnnnnnnnnnnnnnnnnnnnnnnnnnnnnnnnnnnnnnnnnnnnnnnnnnnnnnnnnnnnnnnnnnnnnnnnnnnnnnnnnnnnnnnnnnnnnnnnnnnnnnnnnnnnnnnnnnnnnnnnnnnnnnnnnnnnnnnnnnnnnnnnnnnnnnnnnnnnnnnnnnnnnnnnnnnnnnnnnnnnnnnnnnnnnnnnnnnnnnnnnnnnnnnnnnnnnnnnnnnnnnnnnnnnnnnnnnnnnnnnnnnnnnnnnnnnnnnnnnnnnnnnnnnnnnnnnnnnnnnnnnnnnnnnnnnnnnnnnnnnnnnnnnnnnnnnnnnnnnnnnnnnnnnnnnnnnnnnnnnnnnnnnnnnnnnnnnnnnnnnnnnnnnnnnnnnnnnnnnnnnnnnnnnnnnnnnnnnnnnnnnnnnnnnnnnnnnnnnnnnnnnnnnnnnnnnnnnnnnnnnnnnnnnnnnnnnnnnnnnnnnnnnnnnnnnnnnnnnnnnnnnnnnnnnnnnnnnnnnnnnnnnnnnnnnnnnnnnnnnnnnnnnnnnnnnnnnnnnnnnnnnnnnnnnnnnnnnnnnnnnnnnnnnnnnnnnnnnnnnnnnnnnnnnnnnnnnnnnnnnnnnnnnnnnnnnnnnnnnnnnnnnnnnnnnnnnnnnnnnnnnnnnnnnnnnnnnnnnnnnnnnnnnnnnnnnnnnnnnnnnnnnnnnnnnnnnnnnnnnnnnnnnnnnnnnnnnnnnnnnnnnnnnnnnnnnnnnnnnnnnnnnnnnnnnnnnnnnnnnnnnnnnnnnnnnnnnnnnnnnnnnnnnnnnnnnnnnnnnnnnnnnnnnnnnnnnnnnnnnnnnnnnnnnnnnnnnnnnnnnnnnnnnnnnnnnnnnnnnnnnnnnnnnnnnnnnnnnnnnnnnnnnnnnnnnnnnnnnnnnnnnnnnnnnnnnnnnnnnnnnnnnnnnnnnnnnnnnnnnnnnnnnnnnnnnnnnnnnnnnnnnnnnnnnnnnnnnnnnnnnnnnnnnnnnnnnnnnnnnnnnnnnnnnnnnnnnnnnnnnnnnnnnnnnnnnnnnnnnnnnnnnnnnnnnnnnnnnnnnnnnnnnnnnnnnnnnnnnnnnnnnnnnnnnnnnnnnnnnnnnnnnnnnnnnnnnnnnnnnnnnnnnnnnnnnnnnnnnnnnnnnnnnnnnnnnnnnnnnnnnnnnnnnnnnnnnnnnnnnnnnnnnnnnnnnnnnnnnnnnnnnnnnnnnnnnnnnnnnnnnnnnnnnnnnnnnnnnnnnnnnnnnnnnnnnnnnnnnnnnnnnnnnnnnnnnnnnnnnnnnnnnnnnnnnnnnnnnnnnnnnnnnnnnnnnnnnnnnnnnnnnnnnnnnnnnnnnnnnnnnnnnnnnnnnnnnnnnnnnnnnnnnnnnnnnnnnnnnnnnnnnnnnnnnnnnnnnnnnnnnnnnnnnnnnnnnnnnnnnnnnnnnnnnnnnnnnnnnnnnnnnnnnnnnnnnnnnnnnnnnnnnnnnnnnnnnnnnnnnnnnnnnnnnnnnnnnnnnnnnnnnnnnnnnnnnnnnnnnnnnnnnnnnnnnnnnnnnnnnnnnnnnnnnnnnnnnnnnnnnnnnnnnnnnnnnnnnnnnnnnnnnnnnnnnnnnnnnnnnnnnnnnnnnnnnnnnnnnnnnnnnnnnnnnnnnnnnnnnnnnnnnnnnnnnnnnnnnnnnnnnnnnnnnnnnnnnnnnnnnnnnnnnnnnnnnnnnnnnnnnnnnnnnnnnnnnnnnnnnnnnnnnnnnnnnnnnnnnnnnnnnnnnnnnnnnnnnnnnnnnnnnnnnnnnnnnnnnnnnnnnnnnnnnnnnnnnnnnnnnnnnnnnnnnnnnnnnnnnnnnnnnnnnnnnnnnnnnnnnnnnnnnnnnnnnnnnnnnnnnnnnnnnnnnnnnnnnnnnnnnnnnnnnnnnnnnnnnnnnnnnnnnnnnnnnnnnnnnnnnnnnnnnnnnnnnnnnnnnnnnnnnnnnnnnnnnnnnnnnnnnnnnnnnnnnnnnnnnnnnnnnnnnnnnnnnnnnnnnnnnnnnnnnnnnnnnnnnnnnnnnnnnnnnnnnnnnnnnnnnnnnnnnnnnnnnnnnnnnnnnnnnnnnnnnnnnnnnnnnnnnnnnnnnnnnnnnnnnnnnnnnnnnnnnnnnnnnnnnnnnnnnnnnnnnnnnnnnnnnnnnnnnnnnnnnnnnnnnnnnnnnnnnnnnnnnnnnnnnnnnnnnnnnnnnnnnnnnnnnnnnnnnnnnnnnnnnnnnnnnnnnnnnnnnnnnnnnnnnnnnnnnnnnnnnnnnnnnnnnnnnnnnnnnnnnnnnnnnnnnnnnnnnnnnnnnnnnnnnnnnnnnnnnnnnnnnnnnnnnnnnnnnnnnnnnnnnnnnnnnnnnnnnnnnnnnnnnnnnnnnnnnnnnnnnnnnnnnnnnnnnnnnnnnnnnnnnnnnnnnnnnnnnnnnnnnnnnnnnnnnnnnnnnnnnnnnnnnnnnnnnnnnnnnnnnnnnnnnnnnnnnnnnnnnnnnnnnnnnnnnnnnnnnnnnnnnnnnnnnnnnnnnnnnnnnnnnnnnnnnnnnnnnnnnnnnnnnnnnnnnnnnnnnnnnnnnnnnnnnnnnnnnnnnnnnnnnnnnnnnnnnnnnnnnnnnnnnnnnnnnnnnnnnnnnnnnnnnnnnnnnnnnnnnnnnnnnnnnnnnnnnnnnnnnnnnnnnnnnnnnnnnnnnnnnnnnnnnnnnnnnnnnnnnnnnnnnnnnnnnnnnnnnnnnnnnnnnnnnnnnnnnnnnnnnnnnnnnnnnnnnnnnnnnnnnnnnnnnnnnnnnnnnnnnnnnnnnnnnnnnnnnnnnnnnnnnnnnnnnnnnnnnnnnnnnnnnnnnnnnnnnnnnnnnnnnnnnnnnnnnnnnnnnnnnnnnnnnnnnnnnnnnnnnnnnnnnnnnnnnnnnnnnnnnnnnnnnnnnnnnnnnnnnnnnnnnnnnnnnnnnnnnnnnnnnnnnnnnnnnnnnnnnnnnnnnnnnnnnnnnnnnnnnnnnnnnnnnnnnnnnnnnnnnnnnnnnnnnnnnnnnnnnnnnnnnnnnnnnnnnnnnnnnnnnnnnnnnnnnnnnnnnnnnnnnnnnnnnnnnnnnnnnnnnnnnnnnnnnnnnnnnnnnnnnnnnnnnnnnnnnnnnnnnnnnnnnnnnnnnnnnnnnnnnnnnnnnnnnnnnnnnnnnnnnnnnnnnnnnnnnnnnnnnnnnnnnnnnnnnnnnnnnnnnnnnnnnnnnnnnnnnnnnnnnnnnnnnnnnnnnnnnnnnnnnnnnnnnnnnnnnnnnnnnnnnnnnnnnnnnnnnnnnnnnnnnnnnnnnnnnnnnnnnnnnnnnnnnnnnnnnnnnnnnnnnnnnnnnnnnnnnnnnnnnnnnnnnnnnnnnnnnnnnnnnnnnnnnnnnnnnnnnnnnnnnnnnnnnnnnnnnnnnnnnnnnnnnnnnnnnnnnnnnnnnnnnnnnnnnnnnnnnnnnnnnnnnnnnnnnnnnnnnnnnnnnnnnnnnnnnnnnnnnnnnnnnnnnnnnnnnnnnnnnnnnnnnnnnnnnnnnnnnnnnnnnnnnnnnnnnnnnnnnnnnnnnnnnnnnnnnnnnnnnnnnnnnnnnnnnnnnnnnnnnnnnnnnnnnnnnnnnnnnnnnnnnnnnnnnnnnnnnnnnnnnnnnnnnnnnnnnnnnnnnnnnnnnnnnnnnnnnnnnnnnnnnnnnnnnnnnnnnnnnnnnnnnnnnnnnnnnnnnnnnnnnnnnnnnnnnnnnnnnnnnnnnnnnnnnnnnnnnnnnnnnnnnnnnnnnnnnnnnnnnnnnnnnnnnnnnnnnnnnnnnnnnnnnnnnnnnnnnnnnnnnnnnnnnnnnnnnnnnnnnnnnnnnnnnnnnnnnnnnnnnnnnnnnnnnnnnnnnnnnnnnnnnnnnnnnnnnnnnnnnnnnnnnnnnnnnnnnnnnnnnnnnnnnnnnnnnnnnnnnnnnnnnnnnnnnnnnnnnnnnnnnnnnnnnnnnnnnnnnnnnnnnnnnnnnnnnnnnnnnnnnnnnnnnnnnnnnnnnnnnnnnnnnnnnnnnnnnnnnnnnnnnnnnnnnnnnnnnnnnnnnnnnnnnnnnnnnnnnnnnnnnnnnnnnnnnnnnnnnnnnnnnnnnnnnnnnnnnnnnnnnnnnnnnnnnnnnnnnnnnnnnnnnnnnnnnnnnnnnnnnnnnnnnnnnnnnnnnnnnnnnnnnnnnnnnnnnnnnnnnnnnnnnnnnnnnnnnnnnnnnnnnnnnnnnnnnnnnnnnnnnnnnnnnnnnnnnnnnnnnnnnnnnnnnnnnnnnnnnnnnnnnnnnnnnnnnnnnnnnnnnnnnnnnnnnnnnnnnnnnnnnnnnnnnnnnnnnnnnnnnnnnnnnnnnnnnnnnnnnnnnnnnnnnnnnnnnnnnnnnnnnnnnnnnnnnnnnnnnnnnnnnnnnnnnnnnnnnnnnnnnnnnnnnnnnnnnnnnnnnnnnnnnnnnnnnnnnnnnnnnnnnnnnnnnnnnnnnnnnnnnnnnnnnnnnnnnnnnnnnnnnnnnnnnnnnnnnnnnnnnnnnnnnnnnnnnnnnnnnnnnnnnnnnnnnnnnnnnnnnnnnnnnnnnnnnnnnnnnnnnnnnnnnnnnnnnnnnnnnnnnnnnnnnnnnnnnnnnnnnnnnnnnnnnnnnnnnnnnnnnnnnnnnnnnnnnnnnnnnnnnnnnnnnnnnnnnnnnnnnnnnnnnnnnnnnnnnnnnnnnnnnnnnnnnnnnnnnnnnnnnnnnnnnnnnnnnnnnnnnnnnnnnnnnnnnnnnnnnnnnnnnnnnnnnnnnnnnnnnnnnnnnnnnnnnnnnnnnnnnnnnnnnnnnnnnnnnnnnnnnnnnnnnnnnnnnnnnnnnnnnnnnnnnnnnnnnnnnnnnnnnnnnnnnnnnnnnnnnnnnnnnnnnnnnnnnnnnnnnnnnnnnnnnnnnnnnnnnnnnnnnnnnnnnnnnnnnnnnnnnnnnnnnnnnnnnnnnnnnnnnnnnnnnnnnnnnnnnnnnnnnnnnnnnnnnnnnnnnnnnnnnnnnnnnnnnnnnnnnnnnnnnnnnnnnnnnnnnnnnnnnnnnnnnnnnnnnnnnnnnnnnnnnnnnnnnnnnnnnnnnnnnnnnnnnnnnnnnnnnnnnnnnnnnnnnnnnnnnnnnnnnnnnnnnnnnnnnnnnnnnnnnnnnnnnnnnnnnnnnnnnnnnnnnnnnnnnnnnnnnnnnnnnnnnnnnnnnnnnnnnnnnnnnnnnnnnnnnnnnnnnnnnnnnnnnnnnnnnnnnnnnnnnnnnnnnnnnnnnnnnnnnnnnnnnnnnnnnnnnnnnnnnnnnnnnnnnnnnnnnnnnnnnnnnnnnnnnnnnnnnnnnnnnnnnnnnnnnnnnnnnnnnnnnnnnnnnnnnnnnnnnnnnnnnnnnnnnnnnnnnnnnnnnnnnnnnnnnnnnnnnnnnnnnnnnnnnnnnnnnnnnnnnnnnnnnnnnnnnnnnnnnnnnnnnnnnnnnnnnnnnnnnnnnnnnnnnnnnnnnnnnnnnnnnnnnnnnnnnnnnnnnnnnnnnnnnnnnnnnnnnnnnnnnnnnnnnnnnnnnnnnnnnnnnnnnnnnnnnnnnnnnnnnnnnnnnnnnnnnnnnnnnnnnnnnnnnnnnnnnnnnnnnnnnnnnnnnnnnnnnnnnnnnnnnnnnnnnnnnnnnnnnnnnnnnnnnnnnnnnnnnnnnnnnnnnnnnnnnnnnnnnnnnnnnnnnnnnnnnnnnnnnnnnnnnnnnnnnnnnnnnnnnnnnnnnnnnnnnnnnnnnnnnnnnnnnnnnnnnnnnnnnnnnnnnnnnnnnnnnnnnnnnnnnnnnnnnnnnnnnnnnnnnnnnnnnnnnnnnnnnnnnnnnnnnnnnnnnnnnnnnnnnnnnnnnnnnnnnnnnnnnnnnnnnnnnnnnnnnnnnnnnnnnnnnnnnnnnnnnnnnnnnnnnnnnnnnnnnnnnnnnnnnnnnnnnnnnnnnnnnnnnnnnnnnnnnnnnnnnnnnnnnnnnnnnnnnnnnnnnnnnnnnnnnnnnnnnnnnnnnnnnnnnnnnnnnnnnnnnnnnnnnnnnnnnnnnnnnnnnnnnnnnnnnnnnnnnnnnnnnnnnnnnnnnnnnnnnnnnnnnnnnnnnnnnnnnnnnnnnnnnnnnnnnnnnnnnnnnnnnnnnnnnnnnnnnnnnnnnnnnnnnnnnnnnnnnnnnnnnnnnnnnnnnnnnnnnnnnnnnnnnnnnnnnnnnnnnnnnnnnnnnnnnnnnnnnnnnnnnnnnnnnnnnnnnnnnnnnnnnnnnnnnnnnnnnnnnnnnnnnnnnnnnnnnnnnnnnnnnnnnnnnnnnnnnnnnnnnnnnnnnnnnnnnnnnnnnnnnnnnnnnnnnnnnnnnnnnnnnnnnnnnnnnnnnnnnnnnnnnnnnnnnnnnnnnnnnnnnnnnnnnnnnnnnnnnnnnnnnnnnnnnnnnnnnnnnnnnnnnnnnnnnnnnnnnnnnnnnnnnnnnnnnnnnnnnnnnnnnnnnnnnnnnnnnnnnnnnnnnnnnnnnnnnnnnnnnnnnnnnnnnnnnnnnnnnnnnnnnnnnnnnnnnnnnnnnnnnnnnnnnnnnnnnnnnnnnnnnnnnnnnnnnnnnnnnnnnnnnnnnnnnnnnnnnnnnnnnnnnnnnnnnnnnnnnnnnnnnnnnnnnnnnnnnnnnnnnnnnnnnnnnnnnnnnnnnnnnnnnnnnnnnnnnnnnnnnnnnnnnnnnnnnnnnnnnnnnnnnnnnnnnnnnnnnnnnnnnnnnnnnnnnnnnnnnnnnnnnnnnnnnnnnnnnnnnnnnnnnnnnnnnnnnnnnnnnnnnnnnnnnnnnnnnnnnnnnnnnnnnnnnnnnnnnnnnnnnnnnnnnnnnnnnnnnnnnnnnnnnnnnnnnnnnnnnnnnnnnnnnnnnnnnnnnnnnnnnnnnnnnnnnnnnnnnnnnnnnnnnnnnnnnnnnnnnnnnnnnnnnnnnnnnnnnnnnnnnnnnnnnnnnnnnnnnnnnnnnnnnnnnnnnnnnnnnnnnnnnnnnnnnnnnnnnnnnnnnnnnnnnnnnnnnnnnnnnnnnnnnnnnnnnnnnnnnnnnnnnnnnnnnnnnnnnnnnnnnnnnnnnnnnnnnnnnnnnnnnnnnnnnnnnnnnnnnnnnnnnnnnnnnnnnnnnnnnnnnnnnnnnnnnnnnnnnnnnnnnnnnnnnnnnnnnnnnnnnnnnnnnnnnnnnnnnnnnnnnnnnnnnnnnnnnnnnnnnnnnnnnnnnnnnnnnnnnnnnnnnnnnnnnnnnnnnnnnnnnnnnnnnnnnnnnnnnnnnnnnnnnnnnnnnnnnnnnnnnnnnnnnnnnnnnnnnnnnnnnnnnnnnnnnnnnnnnnnnnnnnnnnnnnnnnnnnnnnnnnnnnnnnnnnnnnnnnnnnnnnnnnnnnnnnnnnnnnnnnnnnnnnnnnnnnnnnnnnnnnnnnnnnnnnnnnnnnnnnnnnnnnnnnnnnnnnnnnnnnnnnnnnnnnnnnnnnnnnnnnnnnnnnnnnnnnnnnnnnnnnnnnnnnnnnnnnnnnnnnnnnnnnnnnnnnnnnnnnnnnnnnnnnnnnnnnnnnnnnnnnnnnnnnnnnnnnnnnnnnnnnnnnnnnnnnnnnnnnnnnnnnnnnnnnnnnnnnnnnnnnnnnnnnnnnnnnnnnnnnnnnnnnnnnnnnnnnnnnnnnnnnnnnnnnnnnnnnnnnnnnnnnnnnnnnnnnnnnnnnnnnnnnnnnnnnnnnnnnnnnnnnnnnnnnnnnnnnnnnnnnnnnnnnnnnnnnnnnnnnnnnnnnnnnnnnnnnnnnnnnnnnnnnnnnnnnnnnnnnnnnnnnnnnnnnnnnnnnnnnnnnnnnnnnnnnnnnnnnnnnnnnnnnnnnnnnnnnnnnnnnnnnnnnnnnnnnnnnnnnnnnnnnnnnnnnnnnnnnnnnnnnnnnnnnnnnnnnnnnnnnnnnnnnnnnnnnnnnnnnnnnnnnnnnnnnnnnnnnnnnnnnnnnnnnnnnnnnnnnnnnnnnnnnnnnnnnnnnnnnnnnnnnnnnnnnnnnnnnnnnnnnnnnnnnnnnnnnnnnnnnnnnnnnnnnnnnnnnnnnnnnnnnnnnnnnnnnnnnnnnnnnnnnnnnnnnnnnnnnnnnnnnnnnnnnnnnnnnnnnnnnnnnnnnnnnnnnnnnnnnnnnnnnnnnnnnnnnnnnnnnnnnnnnnnnnnnnnnnnnnnnnnnnnnnnnnnnnnnnnnnnnnnnnnnnnnnnnnnnnnnnnnnnnnnnnnnnnnnnnnnnnnnnnnnnnnnnnnnnnnnnnnnnnnnnnnnnnnnnnnnnnnnnnnnnnnnnnnnnnnnnnnnnnnnnnnnnnnnnnnnnnnnnnnnnnnnnnnnnnnnnnnnnnnnnnnnnnnnnnnnnnnnnnnnnnnnnnnnnnnnnnnnnnnnnnnnnnnnnnnnnnnnnnnnnnnnnnnnnnnnnnnnnnnnnnnnnnnnnnnnnnnnnnnnnnnnnnnnnnnnnnnnnnnnnnnnnnnnnnnnnnnnnnnnnnnnnnnnnnnnnnnnnnnnnnnnnnnnnnnnnnnnnnnnnnnnnnnnnnnnnnnnnnnnnnnnnnnnnnnnnnnnnnnnnnnnnnnnnnnnnnnnnnnnnnnnnnnnnnnnnnnnnnnnnnnnnnnnnnnnnnnnnnnnnnnnnnnnnnnnnnnnnnnnnnnnnnnnnnnnnnnnnnnnnnnnnnnnnnnnnnnnnnnnnnnnnnnnnnnnnnnnnnnnnnnnnnnnnnnnnnnnnnnnnnnnnnnnnnnnnnnnnnnnnnnnnnnnnnnnnnnnnnnnnnnnnnnnnnnnnnnnnnnnnnnnnnnnnnnnnnnnnnnnnnnnnnnnnnnnnnnnnnnnnnnnnnnnnnnnnnnnnnnnnnnnnnnnnnnnnnnnnnnnnnnnnnnnnnnnnnnnnnnnnnnnnnnnnnnnnnnnnnnnnnnnnnnnnnnnnnnnnnnnnnnnnnnnnnnnnnnnnnnnnnnnnnnnnnnnnnnnnnnnnnnnnnnnnnnnnnnnnnnnnnnnnnnnnnnnnnnnnnnnnnnnnnnnnnnnnnnnnnnnnnnnnnnnnnnnnnnnnnnnnnnnnnnnnnnnnnnnnnnnnnnnnnnnnnnnnnnnnnnnnnnnnnnnnnnnnnnnnnnnnnnnnnnnnnnnnnnnnnnnnnnnnnnnnnnnnnnnnnnnnnnnnnnnnnnnnnnnnnnnnnnnnnnnnnnnnnnnnnnnnnnnnnnnnnnnnnnnnnnnnnnnnnnnnnnnnnnnnnnnnnnnnnnnnnnnnnnnnnnnnnnnnnnnnnnnnnnnnnnnnnnnnnnnnnnnnnnnnnnnnnnnnnnnnnnnnnnnnnnnnnnnnnnnnnnnnnnnnnnnnnnnnnnnnnnnnnnnnnnnnnnnnnnnnnnnnnnnnnnnnnnnnnnnnnnnnnnnnnnnnnnnnnnnnnnnnnnnnnnnnnnnnnnnnnnnnnnnnnnnnnnnnnnnnnnnnnnnnnnnnnnnnnnnnnnnnnnnnnnnnnnnnnnnnnnnnnnnnnnnnnnnnnnnnnnnnnnnnnnnnnnnnnnnnnnnnnnnnnnnnnnnnnnnnnnnnnnnnnnnnnnnnnnnnnnnnnnnnnnnnnnnnnnnnnnnnnnnnnnnnnnnnnnnnnnnnnnnnnnnnnnnnnnnnnnnnnnnnnnnnnnnnnnnnnnnnnnnnnnnnnnnnnnnnnnnnnnnnnnnnnnnnnnnnnnnnnnnnnnnnnnnnnnnnnnnnnnnnnnnnnnnnnnnnnnnnnnnnnnnnnnnnnnnnnnnnnnnnnnnnnnnnnnnnnnnnnnnnnnnnnnnnnnnnnnnnnnnnnnnnnnnnnnnnnnnnnnnnnnnnnnnnnnnnnnnnnnnnnnnnnnnnnnnnnnnnnnnnnnnnnnnnnnnnnnnnnnnnnnnnnnnnnnnnnnnnnnnnnnnnnnnnnnnnnnnnnnnnnnnnnnnnnnnnnnnnnnnnnnnnnnnnnnnnnnnnnnnnnnnnnnnnnnnnnnnnnnnnnnnnnnnnnnnnnnnnnnnnnnnnnnnnnnnnnnnnnnnnnnnnnnnnnnnnnnnnnnnnnnnnnnnnnnnnnnnnnnnnnnnnnnnnnnnnnnnnnnnnnnnnnnnnnnnnnnnnnnnnnnnnnnnnnnnnnnnnnnnnnnnnnnnnnnnnnnnnnnnnnnnnnnnnnnnnnnnnnnnnnnnnnnnnnnnnnnnnnnnnnnnnnnnnnnnnnnnnnnnnnnnnnnnnnnnnnnnnnnnnnnnnnnnnnnnnnnnnnnnnnnnnnnnnnnnnnnnnnnnnnnnnnnnnnnnnnnnnnnnnnnnnnnnnnnnnnnnnnnnnnnnnnnnnnnnnnnnnnnnnnnnnnnnnnnnnnnnnnnnnnnnnnnnnnnnnnnnnnnnnnnnnnnnnnnnnnnnnnnnnnnnnnnnnnnnnnnnnnnnnnnnnnnnnnnnnnnnnnnnnnnnnnnnnnnnnnnnnnnnnnnnnnnnnnnnnnnnnnnnnnnnnnnnnnnnnnnnnnnnnnnnnnnnnnnnnnnnnnnnnnnnnnnnnnnnnnnnnnnnnnnnnnnnnnnnnnnnnnnnnnnnnnnnnnnnnnnnnnnnnnnnnnnnnnnnnnnnnnnnnnnnnnnnnnnnnnnnnnnnnnnnnnnnnnnnnnnnnnnnnnnnnnnnnnnnnnnnnnnnnnnnnnnnnnnnnnnnnnnnnnnnnnnnnnnnnnnnnnnnnnnnnnnnnnnnnnnnnnnnnnnnnnnnnnnnnnnnnnnnnnnnnnnnnnnnnnnnnnnnnnnnnnnnnnnnnnnnnnnnnnnnnnnnnnnnnnnnnnnnnnnnnnnnnnnnnnnnnnnnnnnnnnnnnnnnnnnnnnnnnnnnnnnnnnnnnnnnnnnnnnnnnnnnnnnnnnnnnnnnnnnnnnnnnnnnnnnnnnnnnnnnnnnnnnnnnnnnnnnnnnnnnnnnnnnnnnnnnnnnnnnnnnnnnnnnnnnnnnnnnnnnnnnnnnnnnnnnnnnnnnnnnnnnnnnnnnnnnnnnnnnnnnnnnnnnnnnnnnnnnnnnnnnnnnnnnnnnnnnnnnnnnnnnnnnnnnnnnnnnnnnnnnnnnnnnnnnnnnnnnnnnnnnnnnnnnnnnnnnnnnnnnnnnnnnnnnnnnnnnnnnnnnnnnnnnnnnnnnnnnnnnnnnnnnnnnnnnnnnnnnnnnnnnnnnnnnnnnnnnnnnnnnnnnnnnnnnnnnnnnnnnnnnnnnnnnnnnnnnnnnnnnnnnnnnnnnnnnnnnnnnnnnnnnnnnnnnnnnnnnnnnnnnnnnnnnnnnnnnnnnnnnnnnnnnnnnnnnnnnnnnnnnnnnnnnnnnnnnnnnnnnnnnnnnnnnnnnnnnnnnnnnnnnnnnnnnnnnnnnnnnnnnnnnnnnnnnnnnnnnnnnnnnnnnnnnnnnnnnnnnnnnnnnnnnnnnnnnnnnnnnnnnnnnnnnnnnnnnnnnnnnnnnnnnnnnnnnnnnnnnnnnnnnnnnnnnnnnnnnnnnnnnnnnnnnnnnnnnnnnnnnnnnnnnnnnnnnnnnnnnnnnnnnnnnnnnnnnnnnnnnnnnnnnnnnnnnnnnnnnnnnnnnnnnnnnnnnnnnnnnnnnnnnnnnnnnnnnnnnnnnnnnnnnnnnnnnnnnnnnnnnnnnnnnnnnnnnnnnnnnnnnnnnnnnnnnnnnnnnnnnnnnnnnnnnnnnnnnnnnnnnnnnnnnnnnnnnnnnnnnnnnnnnnnnnnnnnnnnnnnnnnnnnnnnnnnnnnnnnnnnnnnnnnnnnnnnnnnnnnnnnnnnnnnnnnnnnnnnnnnnnnnnnnnnnnnnnnnnnnnnnnnnnnnnnnnnnnnnnnnnnnnnnnnnnnnnnnnnnnnnnnnnnnnnnnnnnnnnnnnnnnnnnnnnnnnnnnnnnnnnnnnnnnnnnnnnnnnnnnnnnnnnnnnnnnnnnnnnnnnnnnnnnnnnnnnnnnnnnnnnnnnnnnnnnnnnnnnnnnnnnnnnnnnnnnnnnnnnnnnnnnnnnnnnnnnnnnnnnnnnnnnnnnnnnnnnnnnnnnnnnnnnnnnnnnnnnnnnnnnnnnnnnnnnnnnnnnnnnnnnnnnnnnnnnnnnnnnnnnnnnnnnnnnnnnnnnnnnnnnnnnnnnnnnnnnnnnnnnnnnnnnnnnnnnnnnnnnnnnnnnnnnnnnnnnnnnnnnnnnnnnnnnnnnnnnnnnnnnnnnnnnnnnnnnnnnnnnnnnnnnnnnnnnnnnnnnnnnnnnnnnnnnnnnnnnnnnnnnnnnnnnnnnnnnnnnnnnnnnnnnnnnnnnnnnnnnnnnnnnnnnnnnnnnnnnnnnnnnnnnnnnnnnnnnnnnnnnnnnnnnnnnnnnnnnnnnnnnnnnnnnnnnnnnnnnnnnnnnnnnnnnnnnnnnnnnnnnnnnnnnnnnnnnnnnnnnnnnnnnnnnnnnnnnnnnnnnnnnnnnnnnnnnnnnnnnnnnnnnnnnnnnnnnnnnnnnnnnnnnnnnnnnnnnnnnnnnnnnnnnnnnnnnnnnnnnnnnnnnnnnnnnnnnnnnnnnnnnnnnnnnnnnnnnnnnnnnnnnnnnnnnnnnnnnnnnnnnnnnnnnnnnnnnnnnnnnnnnnnnnnnnnnnnnnnnnnnnnnnnnnnnnnnnnnnnnnnnnnnnnnnnnnnnnnnnnnnnnnnnnnnnnnnnnnnnnnnnnnnnnnnnnnnnnnnnnnnnnnnnnnnnnnnnnnnnnnnnnnnnnnnnnnnnnnnnnnnnnnnnnnnnnnnnnnnnnnnnnnnnnnnnnnnnnnnnnnnnnnnnnnnnnnnnnnnnnnnnnnnnnnnnnnnnnnnnnnnnnnnnnnnnnnnnnnnnnnnnnnnnnnnnnnnnnnnnnnnnnnnnnnnnnnnnnnnnnnnnnnnnnnnnnnnnnnnnnnnnnnnnnnnnnnnnnnnnnnnnnnnnnnnnnnnnnnnnnnnnnnnnnnnnnnnnnnnnnnnnnnnnnnnnnnnnnnnnnnnnnnnnnnnnnnnnnnnnnnnnnnnnnnnnnnnnnnnnnnnnnnnnnnnnnnnnnnnnnnnnnnnnnnnnnnnnnnnnnnnnnnnnnnnnnnnnnnnnnnnnnnnnnnnnnnnnnnnnnnnnnnnnnnnnnnnnnnnnnnnnnnnnnnnnnnnnnnnnnnnnnnnnnnnnnnnnnnnnnnnnnnnnnnnnnnnnnnnnnnnnnnnnnnnnnnnnnnnnnnnnnnnnnnnnnnnnnnnnnnnnnnnnnnnnnnnnnnnnnnnnnnnnnnnnnnnnnnnnnnnnnnnnnnnnnnnnnnnnnnnnnnnnnnnnnnnnnnnnnnnnnnnnnnnnnnnnnnnnnnnnnnnnnnnnnnnnnnnnnnnnnnnnnnnnnnnnnnnnnnnnnnnnnnnnnnnnnnnnnnnnnnnnnnnnnnnnnnnnnnnnnnnnnnnnnnnnnnnnnnnnnnnnnnnnnnnnnnnnnnnnnnnnnnnnnnnnnnnnnnnnnnnnnnnnnnnnnnnnnnnnnnnnnnnnnnnnnnnnnnnnnnnnnnnnnnnnnnnnnnnnnnnnnnnnnnnnnnnnnnnnnnnnnnnnnnnnnnnnnnnnnnnnnnnnnnnnnnnnnnnnnnnnnnnnnnnnnnnnnnnnnnnnnnnnnnnnnnnnnnnnnnnnnnnnnnnnnnnnnnnnnnnnnnnnnnnnnnnnnnnnnnnnnnnnnnnnnnnnnnnnnnnnnnnnnnnnnnnnnnnnnnnnnnnnnnnnnnnnnnnnnnnnnnnnnnnnnnnnnnnnnnnnnnnnnnnnnnnnnnnnnnnnnnnnnnnnnnnnnnnnnnnnnnnnnnnnnnnnnnnnnnnnnnnnnnnnnnnnnnnnnnnnnnnnnnnnnnnnnnnnnnnnnnnnnnnnnnnnnnnnnnnnnnnnnnnnnnnnnnnnnnnnnnnnnnnnnnnnnnnnnnnnnnnnnnnnnnnnnnnnnnnnnnnnnnnnnnnnnnnnnnnnnnnnnnnnnnnnnnnnnnnnnnnnnnnnnnnnnnnnnnnnnnnnnnnnnnnnnnnnnnnnnnnnnnnnnnnnnnnnnnnnnnnnnnnnnnnnnnnnnnnnnnnnnnnnnnnnnnnnnnnnnnnnnnnnnnnnnnnnnnnnnnnnnnnnnnnnnnnnnnnnnnnnnnnnnnnnnnnnnnnnnnnnnnnnnnnnnnnnnnnnnnnnnnnnnnnnnnnnnnnnnnnnnnnnnnnnnnnnnnnnnnnnnnnnnnnnnnnnnnnnnnnnnnnnnnnnnnnnnnnnnnnnnnnnnnnnnnnnnnnnnnnnnnnnnnnnnnnnnnnnnnnnnnnnnnnnnnnnnnnnnnnnnnnnnnnnnnnnnnnnnnnnnnnnnnnnnnnnnnnnnnnnnnnnnnnnnnnnnnnnnnnnnnnnnnnnnnnnnnnnnnnnnnnnnnnnnnnnnnnnnnnnnnnnnnnnnnnnnnnnnnnnnnnnnnnnnnnnnnnnnnnnnnnnnnnnnnnnnnnnnnnnnnnnnnnnnnnnnnnnnnnnnnnnnnnnnnnnnnnnnnnnnnnnnnnnnnnnnnnnnnnnnnnnnnnnnnnnnnnnnnnnnnnnnnnnnnnnnnnnnnnnnnnnnnnnnnnnnnnnnnnnnnnnnnnnnnnnnnnnnnnnnnnnnnnnnnnnnnnnnnnnnnnnnnnnnnnnnnnnnnnnnnnnnnnnnnnnnnnnnnnnnnnnnnnnnnnnnnnnnnnnnnnnnnnnnnnnnnnnnnnnnnnnnnnnnnnnnnnnnnnnnnnnnnnnnnnnnnnnnnnnnnnnnnnnnnnnnnnnnnnnnnnnnnnnnnnnnnnnnnnnnnnnnnnnnnnnnnnnnnnnnnnnnnnnnnnnnnnnnnnnnnnnnnnnnnnnnnnnnnnnnnnnnnnnnnnnnnnnnnnnnnnnnnnnnnnnnnnnnnnnnnnnnnnnnnnnnnnnnnnnnnnnnnnnnnnnnnnnnnnnnnnnnnnnnnnnnnnnnnnnnnnnnnnnnnnnnnnnnnnnnnnnnnnnnnnnnnnnnnnnnnnnnnnnnnnnnnnnnnnnnnnnnnnnnnnnnnnnnnnnnnnnnnnnnnnnnnnnnnnnnnnnnnnnnnnnnnnnnnnnnnnnnnnnnnnnnnnnnnnnnnnnnnnnnnnnnnnnnnnnnnnnnnnnnnnnnnnnnnnnnnnnnnnnnnnnnnnnnnnnnnnnnnnnnnnnnnnnnnnnnnnnnnnnnnnnnnnnnnnnnnnnnnnnnnnnnnnnnnnnnnnnnnnnnnnnnnnnnnnnnnnnnnnnnnnnnnnnnnnnnnnnnnnnnnnnnnnnnnnnnnnnnnnnnnnnnnnnnnnnnnnnnnnnnnnnnnnnnnnnnnnnnnnnnnnnnnnnnnnnnnnnnnnnnnnnnnnnnnnnnnnnnnnnnnnnnnnnnnnnnnnnnnnnnnnnnnnnnnnnnnnnnnnnnnnnnnnnnnnnnnnnnnnnnnnnnnnnnnnnnnnnnnnnnnnnnnnnnnnnnnnnnnnnnnnnnnnnnnnnnnnnnnnnnnnnnnnnnnnnnnnnnnnnnnnnnnnnnnnnnnnnnnnnnnnnnnnnnnnnnnnnnnnnnnnnnnnnnnnnnnnnnnnnnnnnnnnnnnnnnnnnnnnnnnnnnnnnnnnnnnnnnnnnnnnnnnnnnnnnnnnnnnnnnnnnnnnnnnnnnnnnnnnnnnnnnnnnnnnnnnnnnnnnnnnnnnnnnnnnnnnnnnnnnnnnnnnnnnnnnnnnnnnnnnnnnnnnnnnnnnnnnnnnnnnnnnnnnnnnnnnnnnnnnnnnnnnnnnnnnnnnnnnnnnnnnnnnnnnnnnnnnnnnnnnnnnnnnnnnnnnnnnnnnnnnnnnnnnnnnnnnnnnnnnnnnnnnnnnnnnnnnnnnnnnnnnnnnnnnnnnnnnnnnnnnnnnnnnnnnnnnnnnnnnnnnnnnnnnnnnnnnnnnnnnnnnnnnnnnnnnnnnnnnnnnnnnnnnnnnnnnnnnnnnnnnnnnnnnnnnnnnnnnnnnnnnnnnnnnnnnnnnnnnnnnnnnnnnnnnnnnnnnnnnnnnnnnnnnnnnnnnnnnnnnnnnnnnnnnnnnnnnnnnnnnnnnnnnnnnnnnnnnnnnnnnnnnnnnnnnnnnnnnnnnnnnnnnnnnnnnnnnnnnnnnnnnnnnnnnnnnnnnnnnnnnnnnnnnnnnnnnnnnnnnnnnnnnnnnnnnnnnnnnnnnnnnnnnnnnnnnnnnnnnnnnnnnnnnnnnnnnnnnnnnnnnnnnnnnnnnnnnnnnnnnnnnnnnnnnnnnnnnnnnnnnnnnnnnnnnnnnnnnnnnnnnnnnnnnnnnnnnnnnnnnnnnnnnnnnnnnnnnnnnnnnnnnnnnnnnnnnnnnnnnnnnnnnnnnnnnnnnnnnnnnnnnnnnnnnnnnnnnnnnnnnnnnnnnnnnnnnnnnnnnnnnnnnnnnnnnnnnnnnnnnnnnnnnnnnnnnnnnnnnnnnnnnnnnnnnnnnnnnnnnnnnnnnnnnnnnnnnnnnnnnnnnnnnnnnnnnnnnnnnnnnnnnnnnnnnnnnnnnnnnnnnnnnnnnnnnnnnnnnnnnnnnnnnnnnnnnnnnnnnnnnnnnnnnnnnnnnnnnnnnnnnnnnnnnnnnnnnnnnnnnnnnnnnnnnnnnnnnnnnnnnnnnnnnnnnnnnnnnnnnnnnnnnnnnnnnnnnnnnnnnnnnnnnnnnnnnnnnnnnnnnnnnnnnnnnnnnnnnnnnnnnnnnnnnnnnnnnnnnnnnnnnnnnnnnnnnnnnnnnnnnnnnnnnnnnnnnnnnnnnnnnnnnnnnnnnnnnnnnnnnnnnnnnnnnnnnnnnnnnnnnnnnnnnnnnnnnnnnnnnnnnnnnnnnnnnnnnnnnnnnnnnnnnnnnnnnnnnnnnnnnnnnnnnnnnnnnnnnnnnnnnnnnnnnnnnnnnnnnnnnnnnnnnnnnnnnnnnnnnnnnnnnnnnnnnnnnnnnnnnnnnnnnnnnnnnnnnnnnnnnnnnnnnnnnnnnnnnnnnnnnnnnnnnnnnnnnnnnnnnnnnnnnnnnnnnnnnnnnnnnnnnnnnnnnnnnnnnnnnnnnnnnnnnnnnnnnnnnnnnnnnnnnnnnnnnnnnnnnnnnnnnnnnnnnnnnnnnnnnnnnnnnnnnnnnnnnnnnnnnnnnnnnnnnnnnnnnnnnnnnnnnnnnnnnnnnnnnnnnnnnnnnnnnnnnnnnnnnnnnnnnnnnnnnnnnnnnnnnnnnnnnnnnnnnnnnnnnnnnnnnnnnnnnnnnnnnnnnnnnnnnnnnnnnnnnnnnnnnnnnnnnnnnnnnnnnnnnnnnnnnnnnnnnnnnnnnnnnnnnnnnnnnnnnnnnnnnnnnnnnnnnnnnnnnnnnnnnnnnnnnnnnnnnnnnnnnnnnnnnnnnnnnnnnnnnnnnnnnnnnnnnnnnnnnnnnnnnnnnnnnnnnnnnnnnnnnnnnnnnnnnnnnnnnnnnnnnnnnnnnnnnnnnnnnnnnnnnnnnnnnnnnnnnnnnnnnnnnnnnnnnnnnnnnnnnnnnnnnnnnnnnnnnnnnnnnnnnnnnnnnnnnnnnnnnnnnnnnnnnnnnnnnnnnnnnnnnnnnnnnnnnnnnnnnnnnnnnnnnnnnnnnnnnnnnnnnnnnnnnnnnnnnnnnnnnnnnnnnnnnnnnnnnnnnnnnnnnnnnnnnnnnnnnnnnnnnnnnnnnnnnnnnnnnnnnnnnnnnnnnnnnnnnnnnnnnnnnnnnnnnnnnnnnnnnnnnnnnnnnnnnnnnnnnnnnnnnnnnnnnnnnnnnnnnnnnnnnnnnnnnnnnnnnnnnnnnnnnnnnnnnnnnnnnnnnnnnnnnnnnnnnnnnnnnnnnnnnnnnnnnnnnnnnnnnnnnnnnnnnnnnnnnnnnnnnnnnnnnnnnnnnnnnnnnnnnnnnnnnnnnnnnnnnnnnnnnnnnnnnnnnnnnnnnnnnnnnnnnnnnnnnnnnnnnnnnnnnnnnnnnnnnnnnnnnnnnnnnnnnnnnnnnnnnnnnnnnnnnnnnnnnnnnnnnnnnnnnnnnnnnnnnnnnnnnnnnnnnnnnnnnnnnnnnnnnnnnnnnnnnnnnnnnnnnnnnnnnnnnnnnnnnnnnnnnnnnnnnnnnnnnnnnnnnnnnnnnnnnnnnnnnnnnnnnnnnnnnnnnnnnnnnnnnnnnnnnnnnnnnnnnnnnnnnnnnnnnnnnnnnnnnnnnnnnnnnnnnnnnnnnnnnnnnnnnnnnnnnnnnnnnnnnnnnnnnnnnnnnnnnnnnnnnnnnnnnnnnnnnnnnnnnnnnnnnnnnnnnnnnnnnnnnnnnnnnnnnnnnnnnnnnnnnnnnnnnnnnnnnnnnnnnnnnnnnnnnnnnnnnnnnnnnnnnnnnnnnnnnnnnnnnnnnnnnnnnnnnnnnnnnnnnnnnnnnnnnnnnnnnnnnnnnnnnnnnnnnnnnnnnnnnnnnnnnnnnnnnnnnnnnnnnnnnnnnnnnnnnnnnnnnnnnnnnnnnnnnnnnnnnnnnnnnnnnnnnnnnnnnnnnnnnnnnnnnnnnnnnnnnnnnnnnnnnnnnnnnnnnnnnnnnnnnnnnnnnnnnnnnnnnnnnnnnnnnnnnnnnnnnnnnnnnnnnnnnnnnnnnnnnnnnnnnnnnnnnnnnnnnnnnnnnnnnnnnnnnnnnnnnnnnnnnnnnnnnnnnnnnnnnnnnnnnnnnnnnnnnnnnnnnnnnnnnnnnnnnnnnnnnnnnnnnnnnnnnnnnnnnnnnnnnnnnnnnnnnnnnnnnnnnnnnnnnnnnnnnnnnnnnnnnnnnnnnnnnnnnnnnnnnnnnnnnnnnnnnnnnnnnnnnnnnnnnnnnnnnnnnnnnnnnnnnnnnnnnnnnnnnnnnnnnnnnnnnnnnnnnnnnnnnnnnnnnnnnnnnnnnnnnnnnnnnnnnnnnnnnnnnnnnnnnnnnnnnnnnnnnnnnnnnnnnnnnnnnnnnnnnnnnnnnnnnnnnnnnnnnnnnnnnnnnnnnnnnnnnnnnnnnnnnnnnnnnnnnnnnnnnnnnnnnnnnnnnnnnnnnnnnnnnnnnnnnnnnnnnnnnnnnnnnnnnnnnnnnnnnnnnnnnnnnnnnnnnnnnnnnnnnnnnnnnnnnnnnnnnnnnnnnnnnnnnnnnnnnnnnnnnnnnnnnnnnnnnnnnnnnnnnnnnnnnnnnnnnnnnnnnnnnnnnnnnnnnnnnnnnnnnnnnnnnnnnnnnnnnnnnnnnnnnnnnnnnnnnnnnnnnnnnnnnnnnnnnnnnnnnnnnnnnnnnnnnnnnnnnnnnnnnnnnnnnnnnnnnnnnnnnnnnnnnnnnnnnnnnnnnnnnnnnnnnnnnnnnnnnnnnnnnnnnnnnnnnnnnnnnnnnnnnnnnnnnnnnnnnnnnnnnnnnnnnnnnnnnnnnnnnnnnnnnnnnnnnnnnnnnnnnnnnnnnnnnnnnnnnnnnnnnnnnnnnnnnnnnnnnnnnnnnnnnnnnnnnnnnnnnnnnnnnnnnnnnnnnnnnnnnnnnnnnnnnnnnnnnnnnnnnnnnnnnnnnnnnnnnnnnnnnnnnnnnnnnnnnnnnnnnnnnnnnnnnnnnnnnnnnnnnnnnnnnnnnnnnnnnnnnnnnnnnnnnnnnnnnnnnnnnnnnnnnnnnnnnnnnnnnnnnnnnnnnnnnnnnnnnnnnnnnnnnnnnnnnnnnnnnnnnnnnnnnnnnnnnnnnnnnnnnnnnnnnnnnnnnnnnnnnnnnnnnnnnnnnnnnnnnnnnnnnnnnnnnnnnnnnnnnnnnnnnnnnnnnnnnnnnnnnnnnnnnnnnnnnnnnnnnnnnnnnnnnnnnnnnnnnnnnnnnnnnnnnnnnnnnnnnnnnnnnnnnnnnnnnnnnnnnnnnnnnnnnnnnnnnnnnnnnnnnnnnnnnnnnnnnnnnnnnnnnnnnnnnnnnnnnnnnnnnnnnnnnnnnnnnnnnnnnnnnnnnnnnnnnnnnnnnnnnnnnnnnnnnnnnnnnnnnnnnnnnnnnnnnnnnnnnnnnnnnnnnnnnnnnnnnnnnnnnnnnnnnnnnnnnnnnnnnnnnnnnnnnnnnnnnnnnnnnnnnnnnnnnnnnnnnnnnnnnnnnnnnnnnnnnnnnnnnnnnnnnnnnnnnnnnnnnnnnnnnnnnnnnnnnnnnnnnnnnnnnnnnnnnnnnnnnnnnnnnnnnnnnnnnnnnnnnnnnnnnnnnnnnnnnnnnnnnnnnnnnnnnnnnnnnnnnnnnnnnnnnnnnnnnnnnnnnnnnnnnnnnnnnnnnnnnnnnnnnnnnnnnnnnnnnnnnnnnnnnnnnnnnnnnnnnnnnnnnnnnnnnnnnnnnnnnnnnnnnnnnnnnnnnnnnnnnnnnnnnnnnnnnnnnnnnnnnnnnnnnnnnnnnnnnnnnnnnnnnnnnnnnnnnnnnnnnnnnnnnnnnnnnnnnnnnnnnnnnnnnnnnnnnnnnnnnnnnnnnnnnnnnnnnnnnnnnnnnnnnnnnnnnnnnnnnnnnnnnnnnnnnnnnnnnnnnnnnnnnnnnnnnnnnnnnnnnnnnnnnnnnnnnnnnnnnnnnnnnnnnnnnnnnnnnnnnnnnnnnnnnnnnnnnnnnnnnnnnnnnnnnnnnnnnnnnnnnnnnnnnnnnnnnnnnnnnnnnnnnnnnnnnnnnnnnnnnnnnnnnnnnnnnnnnnnnnnnnnnnnnnnnnnnnnnnnnnnnnnnnnnnnnnnnnnnnnnnnnnnnnnnnnnnnnnnnnnnnnnnnnnnnnnnnnnnnnnnnnnnnnnnnnnnnnnnnnnnnnnnnnnnnnnnnnnnnnnnnnnnnnnnnnnnnnnnnnnnnnnnnnnnnnnnnnnnnnnnnnnnnnnnnnnnnnnnnnnnnnnnnnnnnnnnnnnnnnnnnnnnnnnnnnnnnnnnnnnnnnnnnnnnnnnnnnnnnnnnnnnnnnnnnnnnnnnnnnnnnnnnnnnnnnnnnnnnnnnnnnnnnnnnnnnnnnnnnnnnnnnnnnnnnnnnnnnnnnnnnnnnnnnnnnnnnnnnnnnnnnnnnnnnnnnnnnnnnnnnnnnnnnnnnnnnnnnnnnnnnnnnnnnnnnnnnnnnnnnnnnnnnnnnnnnnnnnnnnnnnnnnnnnnnnnnnnnnnnnnnnnnnnnnnnnnnnnnnnnnnnnnnnnnnnnnnnnnnnnnnnnnnnnnnnnnnnnnnnnnnnnnnnnnnnnnnnnnnnnnnnnnnnnnnnnnnnnnnnnnnnnnnnnnnnnnnnnnnnnnnnnnnnnnnnnnnnnnnnnnnnnnnnnnnnnnnnnnnnnnnnnnnnnnnnnnnnnnnnnnnnnnnnnnnnnnnnnnnnnnnnnnnnnnnnnnnnnnnnnnnnnnnnnnnnnnnnnnnnnnnnnnnnnnnnnnnnnnnnnnnnnnnnnnnnnnnnnnnnnnnnnnnnnnnnnnnnnnnnnnnnnnnnnnnnnnnnnnnnnnnnnnnnnnnnnnnnnnnnnnnnnnnnnnnnnnnnnnnnnnnnnnnnnnnnnnnnnnnnnnnnnnnnnnnnnnnnnnnnnnnnnnnnnnnnnnnnnnnnnnnnnnnnnnnnnnnnnnnnnnnnnnnnnnnnnnnnnnnnnnnnnnnnnnnnnnnnnnnnnnnnnnnnnnnnnnnnnnnnnnnnnnnnnnnnnnnnnnnnnnnnnnnnnnnnnnnnnnnnnnnnnnnnnnnnnnnnnnnnnnnnnnnnnnnnnnnnnnnnnnnnnnnnnnnnnnnnnnnnnnnnnnnnnnnnnnnnnnnnnnnnnnnnnnnnnnnnnnnnnnnnnnnnnnnnnnnnnnnnnnnnnnnnnnnnnnnnnnnnnnnnnnnnnnnnnnnnnnnnnnnnnnnnnnnnnnnnnnnnnnnnnnnnnnnnnnnnnnnnnnnnnnnnnnnnnnnnnnnnnnnnnnnnnnnnnnnnnnnnnnnnnnnnnnnnnnnnnnnnnnnnnnnnnnnnnnnnnnnnnnnnnnnnnnnnnnnnnnnnnnnnnnnnnnnnnnnnnnnnnnnnnnnnnnnnnnnnnnnnnnnnnnnnnnnnnnnnnnnnnnnnnnnnnnnnnnnnnnnnnnnnnnnnnnnnnnnnnnnnnnnnnnnnnnnnnnnnnnnnnnnnnnnnnnnnnnnnnnnnnnnnnnnnnnnnnnnnnnnnnnnnnnnnnnnnnnnnnnnnnnnnnnnnnnnnnnnnnnnnnnnnnnnnnnnnnnnnnnnnnnnnnnnnnnnnnnnnnnnnnnnnnnnnnnnnnnnnnnnnnnnnnnnnnnnnnnnnnnnnnnnnnnnnnnnnnnnnnnnnnnnnnnnnnnnnnnnnnnnnnnnnnnnnnnnnnnnnnnnnnnnnnnnnnnnnnnnnnnnnnnnnnnnnnnnnnnnnnnnnnnnnnnnnnnnnnnnnnnnnnnnnnnnnnnnnnnnnnnnnnnnnnnnnnnnnnnnnnnnnnnnnnnnnnnnnnnnnnnnnnnnnnnnnnnnnnnnnnnnnnnnnnnnnnnnnnnnnnnnnnnnnnnnnnnnnnnnnnnnnnnnnnnnnnnnnnnnnnnnnnnnnnnnnnnnnnnnnnnnnnnnnnnnnnnnnnnnnnnnnnnnnnnnnnnnnnnnnnnnnnnnnnnnnnnnnnnnnnnnnnnnnnnnnnnnnnnnnnnnnnnnnnnnnnnnnnnnnnnnnnnnnnnnnnnnnnnnnnnnnnnnnnnnnnnnnnnnnnnnnnnnnnnnnnnnnnnnnnnnnnnnnnnnnnnnnnnnnnnnnnnnnnnnnnnnnnnnnnnnnnnnnnnnnnnnnnnnnnnnnnnnnnnnnnnnnnnnnnnnnnnnnnnnnnnnnnnnnnnnnnnnnnnnnnnnnnnnnnnnnnnnnnnnnnnnnnnnnnnnnnnnnnnnnnnnnnnnnnnnnnnnnnnnnnnnnnnnnnnnnnnnnnnnnnnnnnnnnnnnnnnnnnnnnnnnnnnnnnnnnnnnnnnnnnnnnnnnnnnnnnnnnnnnnnnnnnnnnnnnnnnnnnnnnnnnnnnnnnnnnnnnnnnnnnnnnnnnnnnnnnnnnnnnnnnnnnnnnnnnnnnnnnnnnnnnnnnnnnnnnnnnnnnnnnnnnnnnnnnnnnnnnnnnnnnnnnnnnnnnnnnnnnnnnnnnnnnnnnnnnnnnnnnnnnnnnnnnnnnnnnnnnnnnnnnnnnnnnnnnnnnnnnnnnnnnnnnnnnnnnnnnnnnnnnnnnnnnnnnnnnnnnnnnnnnnnnnnnnnnnnnnnnnnnnnnnnnnnnnnnnnnnnnnnnnnnnnnnnnnnnnnnnnnnnnnnnnnnnnnnnnnnnnnnnnnnnnnnnnnnnnnnnnnnnnnnnnnnnnnnnnnnnnnnnnnnnnnnnnnnnnnnnnnnnnnnnnnnnnnnnnnnnnnnnnnnnnnnnnnnnnnnnnnnnnnnnnnnnnnnnnnnnnnnnnnnnnnnnnnnnnnnnnnnnnnnnnnnnnnnnnnnnnnnnnnnnnnnnnnnnnnnnnnnnnnnnnnnnnnnnnnnnnnnnnnnnnnnnnnnnnnnnnnnnnnnnnnnnnnnnnnnnnnnnnnnnnnnnnnnnnnnnnnnnnnnnnnnnnnnnnnnnnnnnnnnnnnnnnnnnnnnnnnnnnnnnnnnnnnnnnnnnnnnnnnnnnnnnnnnnnnnnnnnnnnnnnnnnnnnnnnnnnnnnnnnnnnnnnnnnnnnnnnnnnnnnnnnnnnnnnnnnnnnnnnnnnnnnnnnnnnnnnnnnnnnnnnnnnnnnnnnnnnnnnnnnnnnnnnnnnnnnnnnnnnnnnnnnnnnnnnnnnnnnnnnnnnnnnnnnnnnnnnnnnnnnnnnnnnnnnnnnnnnnnnnnnnnnnnnnnnnnnnnnnnnnnnnnnnnnnnnnnnnnnnnnnnnnnnnnnnnnnnnnnnnnnnnnnnnnnnnnnnnnnnnnnnnnnnnnnnnnnnnnnnnnnnnnnnnnnnnnnnnnnnnnnnnnnnnnnnnnnnnnnnnnnnnnnnnnnnnnnnnnnnnnnnnnnnnnnnnnnnnnnnnnnnnnnnnnnnnnnnnnnnnnnnnnnnnnnnnnnnnnnnnnnnnnnnnnnnnnnnnnnnnnnnnnnnnnnnnnnnnnnnnnnnnnnnnnnnnnnnnnnnnnnnnnnnnnnnnnnnnnnnnnnnnnnnnnnnnnnnnnnnnnnnnnnnnnnnnnnnnnnnnnnnnnnnnnnnnnnnnnnnnnnnnnnnnnnnnnnnnnnnnnnnnnnnnnnnnnnnnnnnnnnnnnnnnnnnnnnnnnnnnnnnnnnnnnnnnnnnnnnnnnnnnnnnnnnnnnnnnnnnnnnnnnnnnnnnnnnnnnnnnnnnnnnnnnnnnnnnnnnnnnnnnnnnnnnnnnnnnnnnnnnnnnnnnnnnnnnnnnnnnnnnnnnnnnnnnnnnnnnnnnnnnnnnnnnnnnnnnnnnnnnnnnnnnnnnnnnnnnnnnnnnnnnnnnnnnnnnnnnnnnnnnnnnnnnnnnnnnnnnnnnnnnnnnnnnnnnnnnnnnnnnnnnnnnnnnnnnnnnnnnnnnnnnnnnnnnnnnnnnnnnnnnnnnnnnnnnnnnnnnnnnnnnnnnnnnnnnnnnnnnnnnnnnnnnnnnnnnnnnnnnnnnnnnnnnnnnnnnnnnnnnnnnnnnnnnnnnnnnnnnnnnnnnnnnnnnnnnnnnnnnnnnnnnnnnnnnnnnnnnnnnnnnnnnnnnnnnnnnnnnnnnnnnnnnnnnnnnnnnnnnnnnnnnnnnnnnnnnnnnnnnnnnnnnnnnnnnnnnnnnnnnnnnnnnnnnnnnnnnnnnnnnnnnnnnnnnnnnnnnnnnnnnnnnnnnnnnnnnnnnnnnnnnnnnnnnnnnnnnnnnnnnnnnnnnnnnnnnnnnnnnnnnnnnnnnnnnnnnnnnnnnnnnnnnnnnnnnnnnnnnnnnnnnnnnnnnnnnnnnnnnnnnnnnnnnnnnnnnnnnnnnnnnnnnnnnnnnnnnnnnnnnnnnnnnnnnnnnnnnnnnnnnnnnnnnnnnnnnnnnnnnnnnnnnnnnnnnnnnnnnnnnnnnnnnnnnnnnnnnnnnnnnnnnnnnnnnnnnnnnnnnnnnnnnnnnnnnnnnnnnnnnnnnnnnnnnnnnnnnnnnnnnnnnnnnnnnnnnnnnnnnnnnnnnnnnnnnnnnnnnnnnnnnnnnnnnnnnnnnnnnnnnnnnnnnnnnnnnnnnnnnnnnnnnnnnnnnnnnnnnnnnnnnnnnnnnnnnnnnnnnnnnnnnnnnnnnnnnnnnnnnnnnnnnnnnnnnnnnnnnnnnnnnnnnnnnnnnnnnnnnnnnnnnnnnnnnnnnnnnnnnnnnnnnnnnnnnnnnnnnnnnnnnnnnnnnnnnnnnnnnnnnnnnnnnnnnnnnnnnnnnnnnnnnnnnnnnnnnnnnnnnnnnnnnnnnnnnnnnnnnnnnnnnnnnnnnnnnnnnnnnnnnnnnnnnnnnnnnnnnnnnnnnnnnnnnnnnnnnnnnnnnnnnnnnnnnnnnnnnnnnnnnnnnnnnnnnnnnnnnnnnnnnnnnnnnnnnnnnnnnnnnnnnnnnnnnnnnnnnnnnnnnnnnnnnnnnnnnnnnnnnnnnnnnnnnnnnnnnnnnnnnnnnnnnnnnnnnnnnnnnnnnnnnnnnnnnnnnnnnnnnnnnnnnnnnnnnnnnnnnnnnnnnnnnnnnnnnnnnnnnnnnnnnnnnnnnnnnnnnnnnnnnnnnnnnnnnnnnnnnnnnnnnnnnnnnnnnnnnnnnnnnnnnnnnnnnnnnnnnnnnnnnnnnnnnnnnnnnnnnnnnnnnnnnnnnnnnnnnnnnnnnnnnnnnnnnnnnnnnnnnnnnnnnnnnnnnnnnnnnnnnnnnnnnnnnnnnnnnnnnnnnnnnnnnnnnnnnnnnnnnnnnnnnnnnnnnnnnnnnnnnnnnnnnnnnnnnnnnnnnnnnnnnnnnnnnnnnnnnnnnnnnnnnnnnnnnnnnnnnnnnnnnnnnnnnnnnnnnnnnnnnnnnnnnnnnnnnnnnnnnnnnnnnnnnnnnnnnnnnnnnnnnnnnnnnnnnnnnnnnnnnnnnnnnnnnnnnnnnnnnnnnnnnnnnnnnnnnnnnnnnnnnnnnnnnnnnnnnnnnnnnnnnnnnnnnnnnnnnnnnnnnnnnnnnnnnnnnnnnnnnnnnnnnnnnnnnnnnnnnnnnnnnnnnnnnnnnnnnnnnnnnnnnnnnnnnnnnnnnnnnnnnnnnnnnnnnnnnnnnnnnnnnnnnnnnnnnnnnnnnnnnnnnnnnnnnnnnnnnnnnnnnnnnnnnnnnnnnnnnnnnnnnnnnnnnnnnnnnnnnnnnnnnnnnnnnnnnnnnnnnnnnnnnnnnnnnnnnnnnnnnnnnnnnnnnnnnnnnnnnnnnnnnnnnnnnnnnnnnnnnnnnnnnnnnnnnnnnnnnnnnnnnnnnnnnnnnnnnnnnnnnnnnnnnnnnnnnnnnnnnnnnnnnnnnnnnnnnnnnnnnnnnnnnnnnnnnnnnnnnnnnnnnnnnnnnnnnnnnnnnnnnnnnnnnnnnnnnnnnnnnnnnnnnnnnnnnnnnnnnnnnnnnnnnnnnnnnnnnnnnnnnnnnnnnnnnnnnnnnnnnnnnnnnnnnnnnnnnnnnnnnnnnnnnnnnnnnnnnnnnnnnnnnnnnnnnnnnnnnnnnnnnnnnnnnnnnnnnnnnnnnnnnnnnnnnnnnnnnnnnnnnnnnnnnnnnnnnnnnnnnnnnnnnnnnnnnnnnnnnnnnnnnnnnnnnnnnnnnnnnnnnnnnnnnnnnnnnnnnnnnnnnnnnnnnnnnnnnnnnnnnnnnnnnnnnnnnnnnnnnnnnnnnnnnnnnnnnnnnnnnnnnnnnnnnnnnnnnnnnnnnnnnnnnnnnnnnnnnnnnnnnnnnnnnnnnnnnnnnnnnnnnnnnnnnnnnnnnnnnnnnnnnnnnnnnnnnnnnnnnnnnnnnnnnnnnnnnnnnnnnnnnnnnnnnnnnnnnnnnnnnnnnnnnnnnnnnnnnnnnnnnnnnnnnnnnnnnnnnnnnnnnnnnnnnnnnnnnnnnnnnnnnnnnnnnnnnnnnnnnnnnnnnnnnnnnnnnnnnnnnnnnnnnnnnnnnnnnnnnnnnnnnnnnnnnnnnnnnnnnnnnnnnnnnnnnnnnnnnnnnnnnnnnnnnnnnnnnnnnnnnnnnnnnnnnnnnnnnnnnnnnnnnnnnnnnnnnnnnnnnnnnnnnnnnnnnnnnnnnnnnnnnnnnnnnnnnnnnnnnnnnnnnnnnnnnnnnnnnnnnnnnnnnnnnnnnnnnnnnnnnnnnnnnnnnnnnnnnnnnnnnnnnnnnnnnnnnnnnnnnnnnnnnnnnnnnnnnnnnnnnnnnnnnnnnnnnnnnnnnnnnnnnnnnnnnnnnnnnnnnnnnnnnnnnnnnnnnnnnnnnnnnnnnnnnnnnnnnnnnnnnnnnnnnnnnnnnnnnnnnnnnnnnnnnnnnnnnnnnnnnnnnnnnnnnnnnnnnnnnnnnnnnnnnnnnnnnnnnnnnnnnnnnnnnnnnnnnnnnnnnnnnnnnnnnnnnnnnnnnnnnnnnnnnnnnnnnnnnnnnnnnnnnnnnnnnnnnnnnnnnnnnnnnnnnnnnnnnnnnnnnnnnnnnnnnnnnnnnnnnnnnnnnnnnnnnnnnnnnnnnnnnnnnnnnnnnnnnnnnnnnnnnnnnnnnnnnnnnnnnnnnnnnnnnnnnnnnnnnnnnnnnnnnnnnnnnnnnnnnnnnnnnnnnnnnnnnnnnnnnnnnnnnnnnnnnnnnnnnnnnnnnnnnnnnnnnnnnnnnnnnnnnnnnnnnnnnnnnnnnnnnnnnnnnnnnnnnnnnnnnnnnnnnnnnnnnnnnnnnnnnnnnnnnnnnnnnnnnnnnnnnnnnnnnnnnnnnnnnnnnnnnnnnnnnnnnnnnnnnnnnnnnnnnnnnnnnnnnnnnnnnnnnnnnnnnnnnnnnnnnnnnnnnnnnnnnnnnnnnnnnnnnnnnnnnnnnnnnnnnnnnnnnnnnnnnnnnnnnnnnnnnnnnnnnnnnnnnnnnnnnnnnnnnnnnnnnnnnnnnnnnnnnnnnnnnnnnnnnnnnnnnnnnnnnnnnnnnnnnnnnnnnnnnnnnnnnnnnnnnnnnnnnnnnnnnnnnnnnnnnnnnnnnnnnnnnnnnnnnnnnnnnnnnnnnnnnnnnnnnnnnnnnnnnnnnnnnnnnnnnnnnnnnnnnnnnnnnnnnnnnnnnnnnnnnnnnnnnnnnnnnnnnnnnnnnnnnnnnnnnnnnnnnnnnnnnnnnnnnnnnnnnnnnnnnnnnnnnnnnnnnnnnnnnnnnnnnnnnnnnnnnnnnnnnnnnnnnnnnnnnnnnnnnnnnnnnnnnnnnnnnnnnnnnnnnnnnnnnnnnnnnnnnnnnnnnnnnnnnnnnnnnnnnnnnnnnnnnnnnnnnnnnnnnnnnnnnnnnnnnnnnnnnnnnnnnnnnnnnnnnnnnnnnnnnnnnnnnnnnnnnnnnnnnnnnnnnnnnnnnnnnnnnnnnnnnnnnnnnnnnnnnnnnnnnnnnnnnnnnnnnnnnnnnnnnnnnnnnnnnnnnnnnnnnnnnnnnnnnnnnnnnnnnnnnnnnnnnnnnnnnnnnnnnnnnnnnnnnnnnnnnnnnnnnnnnnnnnnnnnnnnnnnnnnnnnnnnnnnnnnnnnnnnnnnnnnnnnnnnnnnnnnnnnnnnnnnnnnnnnnnnnnnnnnnnnnnnnnnnnnnnnnnnnnnnnnnnnnnnnnnnnnnnnnnnnnnnnnnnnnnnnnnnnnnnnnnnnnnnnnnnnnnnnnnnnnnnnnnnnnnnnnnnnnnnnnnnnnnnnnnnnnnnnnnnnnnnnnnnnnnnnnnnnnnnnnnnnnnnnnnnnnnnnnnnnnnnnnnnnnnnnnnnnnnnnnnnnnnnnnnnnnnnnnnnnnnnnnnnnnnnnnnnnnnnnnnnnnnnnnnnnnnnnnnnnnnnnnnnnnnnnnnnnnnnnnnnnnnnnnnnnnnnnnnnnnnnnnnnnnnnnnnnnnnnnnnnnnnnnnnnnnnnnnnnnnnnnnnnnnnnnnnnnnnnnnnnnnnnnnnnnnnnnnnnnnnnnnnnnnnnnnnnnnnnnnnnnnnnnnnnnnnnnnnnnnnnnnnnnnnnnnnnnnnnnnnnnnnnnnnnnnnnnnnnnnnnnnnnnnnnnnnnnnnnnnnnnnnnnnnnnnnnnnnnnnnnnnnnnnnnnnnnnnnnnnnnnnnnnnnnnnnnnnnnnnnnnnnnnnnnnnnnnnnnnnnnnnnnnnnnnnnnnnnnnnnnnnnnnnnnnnnnnnnnnnnnnnnnnnnnnnnnnnnnnnnnnnnnnnnnnnnnnnnnnnnnnnnnnnnnnnnnnnnnnnnnnnnnnnnnnnnnnnnnnnnnnnnnnnnnnnnnnnnnnnnnnnnnnnnnnnnnnnnnnnnnnnnnnnnnnnnnnnnnnnnnnnnnnnnnnnnnnnnnnnnnnnnnnnnnnnnnnnnnnnnnnnnnnnnnnnnnnnnnnnnnnnnnnnnnnnnnnnnnnnnnnnnnnnnnnnnnnnnnnnnnnnnnnnnnnnnnnnnnnnnnnnnnnnnnnnnnnnnnnnnnnnnnnnnnnnnnnnnnnnnnnnnnnnnnnnnnnnnnnnnnnnnnnnnnnnnnnnnnnnnnnnnnnnnnnnnnnnnnnnnnnnnnnnnnnnnnnnnnnnnnnnnnnnnnnnnnnnnnnnnnnnnnnnnnnnnnnnnnnnnnnnnnnnnnnnnnnnnnnnnnnnnnnnnnnnnnnnnnnnnnnnnnnnnnnnnnnnnnnnnnnnnnnnnnnnnnnnnnnnnnnnnnnnnnnnnnnnnnnnnnnnnnnnnnnnnnnnnnnnnnnnnnnnnnnnnnnnnnnnnnnnnnnnnnnnnnnnnnnnnnnnnnnnnnnnnnnnnnnnnnnnnnnnnnnnnnnnnnnnnnnnnnnnnnnnnnnnnnnnnnnnnnnnnnnnnnnnnnnnnnnnnnnnnnnnnnnnnnnnnnnnnnnnnnnnnnnnnnnnnnnnnnnnnnnnnnnnnnnnnnnnnnnnnnnnnnnnnnnnnnnnnnnnnnnnnnnnnnnnnnnnnnnnnnnnnnnnnnnnnnnnnnnnnnnnnnnnnnnnnnnnnnnnnnnnnnnnnnnnnnnnnnnnnnnnnnnnnnnnnnnnnnnnnnnnnnnnnnnnnnnnnnnnnnnnnnnnnnnnnnnnnnnnnnnnnnnnnnnnnnnnnnnnnnnnnnnnnnnnnnnnnnnnnnnnnnnnnnnnnnnnnnnnnnnnnnnnnnnnnnnnnnnnnnnnnnnnnnnnnnnnnnnnnnnnnnnnnnnnnnnnnnnnnnnnnnnnnnnnnnnnnnnnnnnnnnnnnnnnnnnnnnnnnnnnnnnnnnnnnnnnnnnnnnnnnnnnnnnnnnnnnnnnnnnnnnnnnnnnnnnnnnnnnnnnnnnnnnnnnnnnnnnnnnnnnnnnnnnnnnnnnnnnnnnnnnnnnnnnnnnnnnnnnnnnnnnnnnnnnnnnnnnnnnnnnnnnnnnnnnnnnnnnnnnnnnnnnnnnnnnnnnnnnnnnnnnnnnnnnnnnnnnnnnnnnnnnnnnnnnnnnnnnnnnnnnnnnnnnnnnnnnnnnnnnnnnnnnnnnnnnnnnnnnnnnnnnnnnnnnnnnnnnnnnnnnnnnnnnnnnnnnnnnnnnnnnnnnnnnnnnnnnnnnnnnnnnnnnnnnnnnnnnnnnnnnnnnnnnnnnnnnnnnnnnnnnnnnnnnnnnnnnnnnnnnnnnnnnnnnnnnnnnnnnnnnnnnnnnnnnnnnnnnnnnnnnnnnnnnnnnnnnnnnnnnnnnnnnnnnnnnnnnnnnnnnnnnnnnnnnnnnnnnnnnnnnnnnnnnnnnnnnnnnnnnnnnnnnnnnnnnnnnnnnnnnnnnnnnnnnnnnnnnnnnnnnnnnnnnnnnnnnnnnnnnnnnnnnnnnnnnnnnnnnnnnnnnnnnnnnnnnnnnnnnnnnnnnnnnnnnnnnnnnnnnnnnnnnnnnnnnnnnnnnnnnnnnnnnnnnnnnnnnnnnnnnnnnnnnnnnnnnnnnnnnnnnnnnnnnnnnnnnnnnnnnnnnnnnnnnnnnnnnnnnnnnnnnnnnnnnnnnnnnnnnnnnnnnnnnnnnnnnnnnnnnnnnnnnnnnnnnnnnnnnnnnnnnnnnnnnnnnnnnnnnnnnnnnnnnnnnnnnnnnnnnnnnnnnnnnnnnnnnnnnnnnnnnnnnnnnnnnnnnnnnnnnnnnnnnnnnnnnnnnnnnnnnnnnnnnnnnnnnnnnnnnnnnnnnnnnnnnnnnnnnnnnnnnnnnnnnnnnnnnnnnnnnnnnnnnnnnnnnnnnnnnnnnnnnnnnnnnnnnnnnnnnnnnnnnnnnnnnnnnnnnnnnnnnnnnnnnnnnnnnnnnnnnnnnnnnnnnnnnnnnnnnnnnnnnnnnnnnnnnnnnnnnnnnnnnnnnnnnnnnnnnnnnnnnnnnnnnnnnnnnnnnnnnnnnnnnnnnnnnnnnnnnnnnnnnnnnnnnnnnnnnnnnnnnnnnnnnnnnnnnnnnnnnnnnnnnnnnnnnnnnnnnnnnnnnnnnnnnnnnnnnnnnnnnnnnnnnnnnnnnnnnnnnnnnnnnnnnnnnnnnnnnnnnnnnnnnnnnnnnnnnnnnnnnnnnnnnnnnnnnnnnnnnnnnnnnnnnnnnnnnnnnnnnnnnnnnnnnnnnnnnnnnnnnnnnnnnnnnnnnnnnnnnnnnnnnnnnnnnnnnnnnnnnnnnnnnnnnnnnnnnnnnnnnnnnnnnnnnnnnnnnnnnnnnnnnnnnnnnnnnnnnnnnnnnnnnnnnnnnnnnnnnnnnnnnnnnnnnnnnnnnnnnnnnnnnnnnnnnnnnnnnnnnnnnnnnnnnnnnnnnnnnnnnnnnnnnnnnnnnnnnnnnnnnnnnnnnnnnnnnnnnnnnnnnnnnnnnnnnnnnnnnnnnnnnnnnnnnnnnnnnnnnnnnnnnnnnnnnnnnnnnnnnnnnnnnnnnnnnnnnnnnnnnnnnnnnnnnnnnnnnnnnnnnnnnnnnnnnnnnnnnnnnnnnnnnnnnnnnnnnnnnnnnnnnnnnnnnnnnnnnnnnnnnnnnnnnnnnnnnnnnnnnnnnnnnnnnnnnnnnnnnnnnnnnnnnnnnnnnnnnnnnnnnnnnnnnnnnnnnnnnnnnnnnnnnnnnnnnnnnnnnnnnnnnnnnnnnnnnnnnnnnnnnnnnnnnnnnnnnnnnnnnnnnnnnnnnnnnnnnnnnnnnnnnnnnnnnnnnnnnnnnnnnnnnnnnnnnnnnnnnnnnnnnnnnnnnnnnnnnnnnnnnnnnnnnnnnnnnnnnnnnnnnnnnnnnnnnnnnnnnnnnnnnnnnnnnnnnnnnnnnnnnnnnnnnnnnnnnnnnnnnnnnnnnnnnnnnnnnnnnnnnnnnnnnnnnnnnnnnnnnnnnnnnnnnnnnnnnnnnnnnnnnnnnnnnnnnnnnnnnnnnnnnnnnnnnnnnnnnnnnnnnnnnnnnnnnnnnnnnnnnnnnnnnnnnnnnnnnnnnnnnnnnnnnnnnnnnnnnnnnnnnnnnnnnnnnnnnnnnnnnnnnnnnnnnnnnnnnnnnnnnnnnnnnnnnnnnnnnnnnnnnnnnnnnnnnnnnnnnnnnnnnnnnnnnnnnnnnnnnnnnnnnnnnnnnnnnnnnnnnnnnnnnnnnnnnnnnnnnnnnnnnnnnnnnnnnnnnnnnnnnnnnnnnnnnnnnnnnnnnnnnnnnnnnnnnnnnnnnnnnnnnnnnnnnnnnnnnnnnnnnnnnnnnnnnnnnnnnnnnnnnnnnnnnnnnnnnnnnnnnnnnnnnnnnnnnnnnnnnnnnnnnnnnnnnnnnnnnnnnnnnnnnnnnnnnnnnnnnnnnnnnnnnnnnnnnnnnnnnnnnnnnnnnnnnnnnnnnnnnnnnnnnnnnnnnnnnnnnnnnnnnnnnnnnnnnnnnnnnnnnnnnnnnnnnnnnnnnnnnnnnnnnnnnnnnnnnnnnnnnnnnnnnnnnnnnnnnnnnnnnnnnnnnnnnnnnnnnnnnnnnnnnnnnnnnnnnnnnnnnnnnnnnnnnnnnnnnnnnnnnnnnnnnnnnnnnnnnnnnnnnnnnnnnnnnnnnnnnnnnnnnnnnnnnnnnnnnnnnnnnnnnnnnnnnnnnnnnnnnnnnnnnnnnnnnnnnnnnnnnnnnnnnnnnnnnnnnnnnnnnnnnnnnnnnnnnnnnnnnnnnnnnnnnnnnnnnnnnnnnnnnnnnnnnnnnnnnnnnnnnnnnnnnnnnnnnnnnnnnnnnnnnnnnnnnnnnnnnnnnnnnnnnnnnnnnnnnnnnnnnnnnnnnnnnnnnnnnnnnnnnnnnnnnnnnnnnnnnnnnnnnnnnnnnnnnnnnnnnnnnnnnnnnnnnnnnnnnnnnnnnnnnnnnnnnnnnnnnnnnnnnnnnnnnnnnnnnnnnnnnnnnnnnnnnnnnnnnnnnnnnnnnnnnnnnnnnnnnnnnnnnnnnnnnnnnnnnnnnnnnnnnnnnnnnnnnnnnnnnnnnnnnnnnnnnnnnnnnnnnnnnnnnnnnnnnnnnnnnnnnnnnnnnnnnnnnnnnnnnnnnnnnnnnnnnnnnnnnnnnnnnnnnnnnnnnnnnnnnnnnnnnnnnnnnnnnnnnnnnnnnnnnnnnnnnnnnnnnnnnnnnnnnnnnnnnnnnnnnnnnnnnnnnnnnnnnnnnnnnnnnnnnnnnnnnnnnnnnnnnnnnnnnnnnnnnnnnnnnnnnnnnnnnnnnnnnnnnnnnnnnnnnnnnnnnnnnnnnnnnnnnnnnnnnnnnnnnnnnnnnnnnnnnnnnnnnnnnnnnnnnnnnnnnnnnnnnnnnnnnnnnnnnnnnnnnnnnnnnnnnnnnnnnnnnnnnnnnnnnnnnnnnnnnnnnnnnnnnnnnnnnnnnnnnnnnnnnnnnnnnnnnnnnnnnnnnnnnnnnnnnnnnnnnnnnnnnnnnnnnnnnnnnnnnnnnnnnnnnnnnnnnnnnnnnnnnnnnnnnnnnnnnnnnnnnnnnnnnnnnnnnnnnnnnnnnnnnnnnnnnnnnnnnnnnnnnnnnnnnnnnnnnnnnnnnnnnnnnnnnnnnnnnnnnnnnnnnnnnnnnnnnnnnnnnnnnnnnnnnnnnnnnnnnnnnnnnnnnnnnnnnnnnnnnnnnnnnnnnnnnnnnnnnnnnnnnnnnnnnnnnnnnnnnnnnnnnnnnnnnnnnnnnnnnnnnnnnnnnnnnnnnnnnnnnnnnnnnnnnnnnnnnnnnnnnnnnnnnnnnnnnnnnnnnnnnnnnnnnnnnnnnnnnnnnnnnnnnnnnnnnnnnnnnnnnnnnnnnnnnnnnnnnnnnnnnnnnnnnnnnnnnnnnnnnnnnnnnnnnnnnnnnnnnnnnnnnnnnnnnnnnnnnnnnnnnnnnnnnnnnnnnnnnnnnnnnnnnnnnnnnnnnnnnnnnnnnnnnnnnnnnnnnnnnnnnnnnnnnnnnnnnnnnnnnnnnnnnnnnnnnnnnnnnnnnnnnnnnnnnnnnnnnnnnnnnnnnnnnnnnnnnnnnnnnnnnnnnnnnnnnnnnnnnnnnnnnnnnnnnnnnnnnnnnnnnnnnnnnnnnnnnnnnnnnnnnnnnnnnnnnnnnnnnnnnnnnnnnnnnnnnnnnnnnnnnnnnnnnnnnnnnnnnnnnnnnnnnnnnnnnnnnnnnnnnnnnnnnnnnnnnnnnnnnnnnnnnnnnnnnnnnnnnnnnnnnnnnnnnnnnnnnnnnnnnnnnnnnnnnnnnnnnnnnnnnnnnnnnnnnnnnnnnnnnnnnnnnnnnnnnnnnnnnnnnnnnnnnnnnnnnnnnnnnnnnnnnnnnnnnnnnnnnnnnnnnnnnnnnnnnnnnnnnnnnnnnnnnnnnnnnnnnnnnnnnnnnnnnnnnnnnnnnnnnnnnnnnnnnnnnnnnnnnnnnnnnnnnnnnnnnnnnnnnnnnnnnnnnnnnnnnnnnnnnnnnnnnnnnnnnnnnnnnnnnnnnnnnnnnnnnnnnnnnnnnnnnnnnnnnnnnnnnnnnnnnnnnnnnnnnnnnnnnnnnnnnnnnnnnnnnnnnnnnnnnnnnnnnnnnnnnnnnnnnnnnnnnnnnnnnnnnnnnnnnnnnnnnnnnnnnnnnnnnnnnnnnnnnnnnnnnnnnnnnnnnnnnnnnnnnnnnnnnnnnnnnnnnnnnnnnnnnnnnnnnnnnnnnnnnnnnnnnnnnnnnnnnnnnnnnnnnnnnnnnnnnnnnnnnnnnnnnnnnnnnnnnnnnnnnnnnnnnnnnnnnnnnnnnnnnnnnnnnnnnnnnnnnnnnnnnnnnnnnnnnnnnnnnnnnnnnnnnnnnnnnnnnnnnnnnnnnnnnnnnnnnnnnnnnnnnnnnnnnnnnnnnnnnnnnnnnnnnnnnnnnnnnnnnnnnnnnnnnnnnnnnnnnnnnnnnnnnnnnnnnnnnnnnnnnnnnnnnnnnnnnnnnnnnnnnnnnnnnnnnnnnnnnnnnnnnnnnnnnnnnnnnnnnnnnnnnnnnnnnnnnnnnnnnnnnnnnnnnnnnnnnnnnnnnnnnnnnnnnnnnnnnnnnnnnnnnnnnnnnnnnnnnnnnnnnnnnnnnnnnnnnnnnnnnnnnnnnnnnnnnnnnnnnnnnnnnnnnnnnnnnnnnnnnnnnnnnnnnnnnnnnnnnnnnnnnnnnnnnnnnnnnnnnnnnnnnnnnnnnnnnnnnnnnnnnnnnnnnnnnnnnnnnnnnnnnnnnnnnnnnnnnnnnnnnnnnnnnnnnnnnnnnnnnnnnnnnnnnnnnnnnnnnnnnnnnnnnnnnnnnnnnnnnnnnnnnnnnnnnnnnnnnnnnnnnnnnnnnnnnnnnnnnnnnnnnnnnnnnnnnnnnnnnnnnnnnnnnnnnnnnnnnnnnnnnnnnnnnnnnnnnnnnnnnnnnnnnnnnnnnnnnnnnnnnnnnnnnnnnnnnnnnnnnnnnnnnnnnnnnnnnnnnnnnnnnnnnnnnnnnnnnnnnnnnnnnnnnnnnnnnnnnnnnnnnnnnnnnnnnnnnnnnnnnnnnnnnnnnnnnnnnnnnnnnnnnnnnnnnnnnnnnnnnnnnnnnnnnnnnnnnnnnnnnnnnnnnnnnnnnnnnnnnnnnnnnnnnnnnnnnnnnnnnnnnnnnnnnnnnnnnnnnnnnnnnnnnnnnnnnnnnnnnnnnnnnnnnnnnnnnnnnnnnnnnnnnnnnnnnnnnnnnnnnnnnnnnnnnnnnnnnnnnnnnnnnnnnnnnnnnnnnnnnnnnnnnnnnnnnnnnnnnnnnnnnnnnnnnnnnnnnnnnnnnnnnnnnnnnnnnnnnnnnnnnnnnnnnnnnnnnnnnnnnnnnnnnnnnnnnnnnnnnnnnnnnnnnnnnnnnnnnnnnnnnnnnnnnnnnnnnnnnnnnnnnnnnnnnnnnnnnnnnnnnnnnnnnnnnnnnnnnnnnnnnnnnnnnnnnnnnnnnnnnnnnnnnnnnnnnnnnnnnnnnnnnnnnnnnnnnnnnnnnnnnnnnnnnnnnnnnnnnnnnnnnnnnnnnnnnnnnnnnnnnnnnnnnnnnnnnnnnnnnnnnnnnnnnnnnnnnnnnnnnnnnnnnnnnnnnnnnnnnnnnnnnnnnnnnnnnnnnnnnnnnnnnnnnnnnnnnnnnnnnnnnnnnnnnnnnnnnnnnnnnnnnnnnnnnnnnnnnnnnnnnnnnnnnnnnnnnnnnnnnnnnnnnnnnnnnnnnnnnnnnnnnnnnnnnnnnnnnnnnnnnnnnnnnnnnnnnnnnnnnnnnnnnnnnnnnnnnnnnnnnnnnnnnnnnnnnnnnnnnnnnnnnnnnnnnnnnnnnnnnnnnnnnnnnnnnnnnnnnnnnnnnnnnnnnnnnnnnnnnnnnnnnnnnnnnnnnnnnnnnnnnnnnnnnnnnnnnnnnnnnnnnnnnnnnnnnnnnnnnnnnnnnnnnnnnnnnnnnnnnnnnnnnnnnnnnnnnnnnnnnnnnnnnnnnnnnnnnnnnnnnnnnnnnnnnnnnnnnnnnnnnnnnnnnnnnnnnnnnnnnnnnnnnnnnnnnnnnnnnnnnnnnnnnnnnnnnnnnnnnnnnnnnnnnnnnnnnnnnnnnnnnnnnnnnnnnnnnnnnnnnnnnnnnnnnnnnnnnnnnnnnnnnnnnnnnnnnnnnnnnnnnnnnnnnnnnnnnnnnnnnnnnnnnnnnnnnnnnnnnnnnnnnnnnnnnnnnnnnnnnnnnnnnnnnnnnnnnnnnnnnnnnnnnnnnnnnnnnnnnnnnnnnnnnnnnnnnnnnnnnnnnnnnnnnnnnnnnnnnnnnnnnnnnnnnnnnnnnnnnnnnnnnnnnnnnnnnnnnnnnnnnnnnnnnnnnnnnnnnnnnnnnnnnnnnnnnnnnnnnnnnnnnnnnnnnnnnnnnnnnnnnnnnnnnnnnnnnnnnnnnnnnnnnnnnnnnnnnnnnnnnnnnnnnnnnnnnnnnnnnnnnnnnnnnnnnnnnnnnnnnnnnnnnnnnnnnnnnnnnnnnnnnnnnnnnnnnnnnnnnnnnnnnnnnnnnnnnnnnnnnnnnnnnnnnnnnnnnnnnnnnnnnnnnnnnnnnnnnnnnnnnnnnnnnnnnnnnnnnnnnnnnnnnnnnnnnnnnnnnnnnnnnnnnnnnnnnnnnnnnnnnnnnnnnnnnnnnnnnnnnnnnnnnnnnnnnnnnnnnnnnnnnnnnnnnnnnnnnnnnnnnnnnnnnnnnnnnnnnnnnnnnnnnnnnnnnnnnnnnnnnnnnnnnnnnnnnnnnnnnnnnnnnnnnnnnnnnnnnnnnnnnnnnnnnnnnnnnnnnnnnnnnnnnnnnnnnnnnnnnnnnnnnnnnnnnnnnnnnnnnnnnnnnnnnnnnnnnnnnnnnnnnnnnnnnnnnnnnnnnnnnnnnnnngagtgagggtgggcggaacaaaaataagatcagttttcactaaaatatatggcaattttcatcagcccgcccccaccctcactcgcccggagagggaggttatggagatcgcaggtagagccggcatcctgccggctctacggcgaaagcagtatatcctgaagtcttgtacccttatgtcgcactggaggtcaacggtaaaatcagccatcttgcagctcctttttattgacttcactggcgaatattattaaaattagcattctacaaataaaaaattagcatgctcatcctttttatcctgtccatcctgtccatccatgttaattttattttattagccaaaggacgaatgaatggaaaaaaccaaattgaaacagcatgtcattaaccgtgactggtgcaagggctgcggaatttgcgtggaattctgccccaaaaaggttcttgatctggacgaccgggaaaaagcggttgcggctcgccccgaagactgtatctgctgtagactctgcgaactcaggtgtccggatctggccatcgaaattcttaccgaaaaatagggcgaaaccatgagcaagaccatcaaatttattcaaggcaacgaggtgtgtgtggaagccgccctctatgcggggctgaatttttttgccggatatcccatcaccccttccacggaaatcgccgagcttctatcctcccggttgccgcagatcggcggcaggtttattcagatggaagatgagattgcctccatctgcgccattatcggcgcatcccttaccggcagcaaggtcatgaccgcaaccagcggccccggcttttccctgatgcaggaagcgcttggctacgccataatggcggagatcccatcggtgatagtaaacgtgcagcgcgggggcccatcaaccgggcttcccacccatgtcagccagggggatgtgaatcaggccaggtggggcgcacacggggaccatgccatcataacactgaccgcatccaaccatcaggacgtattcgccatgaccgtggatgcctttaacctggccgaaacctaccgcacgccggtcattctgctcttcgatgaagtcgtgggacacatgcgcgagcgggtggtgattccggaaaaaggcgaacatgcactggtggagcggcttcgaacggccgtaaagagcggcgtggattatcacccttaccttccccgcgaggacggcaggctgcccatgtcggattttggaggggttcaccgttacaatgtgacgggacttgcgcatgacatgtggggctttccatcggacaatccccaggtggttcacgggctgatgaggcatctgatcgacaagattcaaagcaatgccgccgagatcgccagaacacatgagtattacctggaggatgcggactgcattcttatttcttacgggtcttcggccagatccagccttcatgtggtggagaaccgcagaaaacgcggagaacggataggtcttctggagcttcagaccctgtggccctttcccgatcacatcgtccgcgaaaggtgccgacgagcccagacgatcgtggtggtggaaatgaatatggggcaggtgcttcagcaggtcaagcttgccgtggaccgcccggaacgggtgtttctggctaaccggatggacggcgtctttattaatcccacagacatccgaaacatcctgcggcttatacagggaaggggaatttaatgccgatcaaagagtacatacgggagagattcttcccccacatgtggtgtccgggttgcggacacggcgtggtgctgaacgccatgctgagggccatcgaaaatctggggctcaacaagaatgatatcgtcatggtctccggcatcgggtgttcatcccgaatctccggatatgttgactttcacacccttcacacggtacacggacgagcgcttgcctttgccacaggtgtcaagatgagccggccggaacttcacctgattgttcccatgggagatggggatgcgctggccataggcggcaaccattttattcacgctgcacggcgcaacatcgacatgacggctgttgtaatgaacaatcggatatacggaatgaccggcggtcagtattcgccgctttccggatatggcatctccgcaacaactgctccctacggcaacattgatcagggttttgacatcgtggagctggcaaaggccgccggcgctactttcgtggcgcgcaccaccacctatcatgttcaacagactgccgatattcttcgggaggccatcctgcacaaaggcttttcggttgtggaagttatgtcccagtgcccaacgtatttcggcagaaagaacaaggaaagcggggcagtggagatgatgaagcggatgaaggagatgacgacacccatcggctcaaaagccaaagaggcgcatccggagctgattgagcgaggtgtttttgttcgaaaggagctgccggagtactgcagcgaatacgataaaatcatcgaacgcgcacagaaagatgtaatgaggaaagggctttaacaatggaaagatgcagaatggttttttctggctccgggggacagggcgtgattactgctgccattatccttgccgaagctgctgtgctgtatgaagacctgattgctgtacagtcccagtcctacgggccggaggccagaggcggctccacccgcacggatgtaatcatcgcagattcgcaaatctattttcccaaggtcacccagcccaatgttctggtctgcctgacccaggaggcttacaacaagttctatcccatcattcgccctggcggcacgctgatcacggattcccgctttgtgaagaccgagctgaaggtggatgcccggcagattgagcttggcatgtatcagtcggtgatggatgcaatcggaaagcccattgtctttaatatctgcatgttgggagctgtgatagccatcactggtctggtcagacccgaatccgtcattcgtgtgctggaaacccgcattcaccccagttttctggagatgaaccgaaaggctctggatattggaatcaaaatcgctcaggatatcgataccccatcatgaaattaccaccggtgagattggtcattaactcatcgtaagaggttaaaacaaaatatgacagacagacttgacattattgaggatcacctgcttaatcgtaaactcgttggagtgtgggagatggtcagtgatgattctcccacgactgccgatgggtacgccctcagtttggaaggatatttccttgagatagagacaatgttagatttttccgctgtaagtattgggtgcggacattcccggactgactttcccctggatgcagaatcaggctatttctaccatgaggtatctcatgatacgccctactcgcagttcataggtaagcggctctcaaaatggcgtttgctggtgggcgaagggggcaattgggatggattgatggtaagctttggcacatccacagggctctgttttatctcagtggattgctcaatctcagttctgacgttgaatggaatccaatgttaggtagtactaagcaatggcgtgaaacatgaattagggtagcggtagttgactcattatctgttcgactgtgtacggacaggtttcagggaatgcggactctggcagtttcctgcacgccgatccggttgataatcccatttcaacaggtgcatcaataacactgccatcctgcttaataattcccgcttctggcttttccccattgacgacaggatacgcaagataaagaagaatacctcctattctgtattttccattatcctgtctatcgttgaacggattgatgacgaattttgaagaagcatctgattatccagccatcaacccggatattttccctttgcaatacaaaggcctgagaaaaaacaatgaatatgaaatcagacaattataatctgcttgaagaaaaatggattcctgttctgcgctcaaacgggaagtttgaccatgttggcatatacaccgcattaaatgaggcagatagaatccgttgtatagcagccggcaatcccatggatcgcatggcaattttgcgattcctgctggccctgctgtattggtgcatgggaaatccgccagacaaaatggacaaacaattctgtgaaggttttcctgccgactggttgtccaaactcttcgataaaaaggactgctttaacctgctaagccaggaaaagcggttctttcagtaccagaaactcaatgacaagaagcttacctccaattatctcatccacgagattcccacaggaacaaatctgtggcattttcgacattcgaccgatgcagtaaatggattgtgtcctgcctgttgcgccatggggcttttacgcctgccattgttttcaacatctggaggaaggggaaaaccgcccggtattaatgccaaacctccaatctatgtcttacccttcggaaagtcactggcggaaacccttcggctctcatggagcgcaaatccaaatttaggtgaaccagcgtgggttcgacccgatctcaaactaccggtaagcggacaagttcctctcctgacaggattgacgtggttgcctcggcgcgtttggttgagcgatccggaaacctctgaggcgcattgtatttcctgcggccgcatggaacggctgatcttatcctgtgtgtttgaagggctcgggagcaccaaaacggatgatggcgccccaactcggatgtggaaggatccgcatgtcatttatgaaccaaacagcaaaggagatatgctgtctcttcataacagtagcgttttagatgcagcggatgcagcagccaatcagtgggccagaattaccgcaggcgtgattcgcagatcggaacccgataaacacaaatgggtatggatcattggtttttctactgttaagaatgataaatatcttgaggcaatcgagtttctggtgcctctgtcaggtttggagcagcatcaagaatccattgaaagactggaacgatggcaagatcaatgcaaaaaactttcaaatcgtttggttcatgtgttcatgtcttcgggtgaaaaatcgtcttcccggaaacataacgaattgttatcaattctaaatacgattcgaccgcaggttgaaaccgtggtatttaatatggcacccgatctggttaccggatgtgatgaagcttggcaattggcagcaaagaaatatcaacagatgatcaaaatggcagtgcattcactcgtaccgggttttacaacagcatcgattcaaaagcgcaagcagatcgagaatgtgtttccggacatgactataagtgaaaaacttctatccgatcggaaaaaaggaggcaaaaattgaccgccacagaacaattcattgatgttttgaaaacgttaaaggcgggggatcgaaagctgttacgtactcatgctggactgggtctcgatcaatcggtacaggggttcgatttgttcgccggaatttggtggccactgcgacaaaatagctccaaagcgccccgccgtgaggtggcatggttggttgcaaaaatttttgcttcttatccgattccgcatttcccgaatgaaacacttgcgagtcaattaaaaaaacgccaaccaacccaaacccaagacagtaatcgttttgctcaaagattcgacaggatgttggttcttccgcttaataaaatcgaatcggcgctgcaatgggcgctgaagtgcatagcagagttgaaatatcccaaacttgattgggtgagactgacatacgatctgtccatttgggaaagagacgccactcggctcaaatgggcaaaccaatttttgcaattaacaaaaggagacagtgatgttaatcgagattcacacgattcaaaaccatagcccatccaacttgaaccgggatgatttgggggctcccaaaacctgttatttcggaggagtattgcgctcgcgcatctccagccagtgcattaagcgaagcatccgtatgagtgacgaattcttgttgttgcgtggcgggatccgcacccggaaactggcggatgagattgccaaggcaagcaaagccggagcggataataggaaacgagctgcaaaaattcttggttgctgtggtatcaaatccaaggagaagaaggataaggatgatgataaaagcgatatgttggtttatacctcccgtgaggctatacaggaaatggcgaatctcttggataacgacgaaggtaaaaccgacgatcaacaactggcgttagcttttggcacgcttattagtgaaaaaacatccgttcctgatatggcgctcagcggaagaatgttagagacaggcattcttaaaaacaccacagtagaggcttcccttcaggtggctcacgccatatcaacacacgaggcccgctcggaagtagattattatgttgccgcagacgacatacctggcgatgatgcaggtgctggctaccttgatgaatctttgtttgtatcatcttgtttttacaaatatttttcgattcactgggaaacattggtccaaaacctggagggaaatatggaccttgccgcacacactgtaggggcctttatgcgtgctgctgctctggttacaccaacaggcaaacaaaacagtttcgccgcccacaatccccccgatgggatacttgtgcaaatccaggatagaaacatcccaatcagctacgctaacgccttcgctaaaccagttgatgtcaatgatagagatatcgtctcgcagagcattgcacagcttgggcaatacatacatgaccttgacatcggcttcggcaaacctcaaaaaagattctggttttcaccaaatcttcgttttccacttaacgccatgaaagaagataaggaatttgcactttccgaacaaaatataatgtcccttgaaggtctgattaccagcgtaatgaaagaggtcggatacgactggagcgatgttcagaaaagcattgtaaatcctgaggtaccgtcatgagtgttaacaccctctttctccgtttggaaggaccattgcaatcgtggggtacggagcagtcgaaatttgtgataagaaggacaagcgaagcccctacgaaatcaggaataattggaatgtgttgtgcagcgctcggcatttcacggcaggaggctgcaaacggttggcttcaaaaactgagtgagcttcgtatggcagtccggattgatgtgccgggggtccgatggtgggattatcatacggttggagcaggcatgatgatgcgcaccagtgaaaaccgaagcaagacaaagccaggccccctggttacccgacgcgaatatctctgtgatgcaagttttctggttatccttcagggtgagcatagtttggtcgccgaattggagattgcagtcaacaatcccaggtggccaatttacctgggcagaaaatgttgtactctatctcgtccactgctggtgcatccggcaggcgattttccgaatttggtttcagcactgaagtccataccctggcaaccaagacttgccggtgatccgatgccgcaaacagttgattgtcttatcgactgggaaccgacaatcgatcaaccagagccgccagacgatgcgctcattttctacgatgtgccgctgacattcgatcctccatcgcattgtcctcgttttgtcatcagagagtctttgatagtggggaaaaaccgggaaattggcattgcagaaaagccggcgcagaataaaacgccacgaccgtcacaaccacgggcagactacagaaatacggaataccgccatgctcgcataaaacgtcttgatgctgaccaccatctgtgcatactttgtaaatccccggccacgaccgtccagcatatcacctaccgcagggccggagggaatgaaaccccggatgacctccgttccctgtgtcggctttgtcatgatgcagtgacgatgattgaatatggcgcaggcatgggattggaccgcatcaatccggaagaaaaaaagtggcgggaacaaatcattgagaagcgaagcgaaattattcgttttcggtcaatagaaacccgacggcggcatctttccaaccaggaggtctaatgtacttatcaacgcttttgatcaacgctggcgatcatcccgaccgaccacgccctggaaggtcatggttgcggaatgtttacagggttcatcagcggctgtgcatggcatttccctccggggagcgaaaacaggctgatgaggattttctcaagccctataaaccggaggattttggatatcatcaagttcatgtaccacgaataaaggatgccggattcctgtttcgtatcgatcccattccgggaggcagggccatcattctggtgcagtctgcagtggaacccgactgggattttgcattccataatgctatgtttctgctgtctgcaccgcccgatataaagccttttgatcctcaattttcaattgggcaaaaactactgtttcggctgacagcaaatccaactaaaaaaatagacacaaaaagtgggcctgatggaaaaaagcgtaacggaagacgagttccggtaaggccagaaaactttttggaatggctggttcaaaagagcattcggtcgggattctctattatgagtgataatattatcattcagacatcctatatcttttttcacaaaccgaatacacaacaggaaaattatttgagtgaaatatcacctgggaaaggcgattatcaagcccgcctgcgattggtccgttatgatggagttctcacaattgatgacattaacctttttcatttagctattgaacgtggcatagggtcaggcaaagcctttggttttggccttctttcgttagcacaaatgcagtgtggaacgctatgaaaatcaaggacctacacattcttccgaagtttcgtgatggtttgagttatctctacgtggaacactgtcgaattgatcaagaatctttggctatcgccatccatgacgcgcgcggaaaagtacctgttccctgtgcgaccctggctctcttgatgctcggtcccggtgtttcaataactcacgccgcaatatctgttcttgctgatcatggttgccttgtggtctggtgcggggaacagggcgttcgtttctatgcagtgggcatgggagagacgcgcagttcagctaacctgttgcaccaggcgaagatgtgggcggatgataattgtcgcatacaagtgatacgtcgtctttatcagttacgatttcccgaaaaattggatacatccctgacccttcagcaaattcgcggaatggaaggattacgggttcgctcggcttattccagagcagccaaggagtccggtgtctcctggaccggtcgcagctacaaatccaacgaatggaacagtgcagaccccgttaacagagctttgtcaactgctaattcctgtctttatggcatctgccacgcggcagtggtgtcagcaggcttttcgccggcgctggggttcattcatacggggaaaatgttgtcattcgtttatgatgttgctgatctttataaaaacgagattacgatcccaattgcatttcgtgttgttgctgaatccaaagatgttctggaaaaacgtgtacgggtggcctgcagggatatgttcgtttctatccgcctgctgaaacgaatcattccggatatccagatggctttggggctttcaacgcagaaaacagcagatgataatgaaccattcgaccgggatgctaccgcaccaggttctttgtgggatccggagttaggcacggtggaaggcgggcgctcgcatcctctggaaatggatcaaatgactgaaagggaagatgatggtagttttcatccttgaaaatgtgccactgaggttaagaggagaattatctcgctggttcctcgaaccaaaggcaggtgtttttgtggggaatgtttcggcaatggtaagggagaagatttgggaaatggtttgcaaacaagtaaaggaaggcggttgcttgatgatctatcgcagtgataatgaacagggatatcaaattcttagttctggtcaaacattgagagcaattgaagacttcgaaggattattgcttattcgggtaccacagatttaatattttttcagtattgtccccacgcacgtgggggtgaaccgataatggaagcaactcaggaaagaatgatttaattgtccccacgcacgtgggggtgaaccgcctcggcagatgacgttatcgcagcagggttgattgtccccacgcacgtgggggtgaaccagcagcgacatcatcttcagcaaccccatcaaaattgtccccacgcacgtgggggtgaaccgccgtatcatgttcgtatcaatatcgagcatcgattgtccccacgcacgtgggggtgaaccggtcatcgtcatgtcgattatgaagtgccttgcattgtccccacgcacgtgggggtgaaccggagttaatgctgatttgtcagcgggaattcccattgtccccacgcacgtgggggtgaaccgaatcttcgccgcaatcacggatgatgatttccattgtccccacgcacgtgggggtgaaccggaaggataaaaatggcaaatccaacactgtacattgtccccacgcacgtgggggtgaaccgtgcgggttgatgctaccaggcacccaagcagtattgtccccacgcacgtgggggtgaaccggagctgggttatggagaccaaggtgttagtagattgtccccacgcacgtgggggtgaaccgcgcctatcgtctgcaaaaaagacggcgataatattgtccccacgcacgtgggggtgaaccggaattgaaaataatttgataccttttccgtttattgtccccacgcacgtgggggtgaaccgcaatctttaatttgttggtgaaaacatcaagcacagatcaagtgaaaaatatcccatcgaaagaagcgcgaattaaaatactatgctctgcttttaaggtaaatgatgtattggctgatggtaaatataatgtgttaattgtggatgacctgtgtgacacagggtcatcacttgaagcggctacagtcatgttaaaacagtacacaaaaatcaataagatttttgtagtcgcagtaacgaggaaaaactcatgaaaaatgtttttgtatctggctcaatcaatataaaaaaactcgattctaaagttatcgaacggttaaaaaatattatctcatcgaacttaagagtcattgttggggatgcaagtggtgttgatagctctattcaagaatacttaaaatcaaatgaagtccgttccgttgttgtttattgctcaggagataagcctagaaacaatatagggcattgggacaccaaaaaggttgatacttcctataagcctggaactcgacagtttttcacagttaaagacaaagcaatggctgcggactgtgattatggctttatgatttgggatggcagtagcacgggtactctgagtaatgcaattgaacttgtcgaaagaaataaaatagcggtagtgtatgtaagcaaaactaaacaattttttaatataaaaaacgttcaagacatcgaaaaactaatcaaatttatgagcgagacatcgcttgaaaaagcagacaataaaattggtttattcaaaaaaattgaaaccataaagtctatccaacatgacatattcgatattcagcctatcgaagccaacacgcagatcaaacagccaaatctaacgcaacactccataggaacttcgccatcgctcaagcgctgaactttgcgttatgctgattcccctcctatttccatgtcatggatgattactgacatcagccaattcgaaggcacttgctaatcgatgtgctgtccggaaaaatacgccagcaaatgctggaacctgcaatccgtcttcttcgaggaggatcacttcgtaaatgatgtctatttgtttttcacaaccactgatcgccggttccttaaattggaatcccagaacctgagccgtttgcgcgaaatgataggctatgcgcacacagcgctggaacaacacgatacaattgcaatacatggcatttaataatccgcaccaacagcgttgcaactgcattcttgacattgttgatttcacatcatgaagctgaactacagaagaccacttctttttcaccaaaacgatcgctccaattatcgatagttgttgggatttcatctttgtattgtgggtcgttggaaaaatatttgactgtattaccgtcaatcacagcggcataaatcattctgttaggacaatgcattattatagcttccataggcatccgtgaaagaacataaattcaccatcggcagatctcgcaagtgcgacattgtgttggcagacgataccgtcagccgtcatcatgctgaactcatttttttgcataatggccacctgcatatgccatgcgggaaacggatcggctgagtgtgacggcgcacacaggcaaggatcgggagaactttcagtttggattacaggcatttctggaagaagctcggaccgttgccaagttggtgcatccgaatattgttcgggtgaaaacatatctggagcagaaccatacggcctatctggtgatggagtattacgaaggattgtccgtggctgaatatgttaggcaacaaggcggtcgaatacccgaaaaatcagcagtggggatcatgcaattcgtcctggatggcctgcgccatgtgcatgagaatgggtatctgcatcgggatgtgaaaccagcgaacatttatatgacgaagcgtggtcaggttattttgcggattttggggctgcacggtgtgcgctcggggaacacagccgaagtctgtccgtggttgtgtcgtctggatattcgccatttgagcagtatcgcagcaacggaaaacaggggccgtggacggatgtctatgcatgcggggcgacattgtactatctggtgacgggacaaaccccaccaacagcggtggatcgtacagacgaggatgacccagcgctactgattccgcctttgcagttatctccagggttatcgcctcaagttggtcaggcgatacagaaagcgctgacaataaaagccagtgatcgcctccagaatacgaccgaatttctgaagatgctgacaggtgtaacgcagtccccggtgccaggcttcactcctcaaccgatgcctgcaccagcgtccagtccgaaaccaatgccagtgccaagtccaaaaccggcttcaacaccaaaacccgccgacacatgaacagaaccggcaacagggatggtatttgtgtgggtgactggggggtgttatcagatggggtgcggggattgggatggtgatggatgctatgatgaaaagccggtgcataaagtgtgtgttgatggattttggatgggccagacggtggtgacacagggtcagtggcatcgggtgatgggaaacaatccctcaaaatttaaaaaagagaatgattatccggtggagaacgtatcctggaatgatacgcaggaatatattcggaagctgaacggaatggggattggaaactttcggttaccgagcgaggcggaatgggaatatgcggcgcgtagtggcgggaaggccgaaaagtattctggcggcggtgatgtgaacagtgtggcgt

SEQ ID NO: 1009 - DNA, 110336 bp, Artificial Sequence
  Synthetic Oligonucleotide
  misc_feature (1)..(96651): n is a, c, g, or t
nnnnnnnnnnnnnnnnnnnnnnnnnnnnnnnnnnnnnnnnnnnnnnnnnnnnnnnnnnnnnnnnnnnnnnnnnnnnnnnnnnnnnnnnnnnnnnnnnnnnnnnnnnnnnnnnnnnnnnnnnnnnnnnnnnnnnnnnnnnnnnnnnnnnnnnnnnnnnnnnnnnnnnnnnnnnnnnnnnnnnnnnnnnnnnnnnnnnnnnnnnnnnnnnnnnnnnnnnnnnnnnnnnnnnnnnnnnnnnnnnnnnnnnnnnnnnnnnnnnnnnnnnnnnnnnnnnnnnnnnnnnnnnnnnnnnnnnnnnnnnnnnnnnnnnnnnnnnnnnnnnnnnnnnnnnnnnnnnnnnnnnnnnnnnnnnnnnnnnnnnnnnnnnnnnnnnnnnnnnnnnnnnnnnnnnnnnnnnnnnnnnnnnnnnnnnnnnnnnnnnnnnnnnnnnnnnnnnnnnnnnnnnnnnnnnnnnnnnnnnnnnnnnnnnnnnnnnnnnnnnnnnnnnnnnnnnnnnnnnnnnnnnnnnnnnnnnnnnnnnnnnnnnnnnnnnnnnnnnnnnnnnnnnnnnnnnnnnnnnnnnnnnnnnnnnnnnnnnnnnnnnnnnnnnnnnnnnnnnnnnnnnnnnnnnnnnnnnnnnnnnnnnnnnnnnnnnnnnnnnnnnnnnnnnnnnnnnnnnnnnnnnnnnnnnnnnnnnnnnnnnnnnnnnnnnnnnnnnnnnnnnnnnnnnnnnnnnnnnnnnnnnnnnnnnnnnnnnnnnnnnnnnnnnnnnnnnnnnnnnnnnnnnnnnnnnnnnnnnnnnnnnnnnnnnnnnnnnnnnnnnnnnnnnnnnnnnnnnnnnnnnnnnnnnnnnnnnnnnnnnnnnnnnnnnnnnnnnnnnnnnnnnnnnnnnnnnnnnnnnnnnnnnnnnnnnnnnnnnnnnnnnnnnnnnnnnnnnnnnnnnnnnnnnnnnnnnnnnnnnnnnnnnnnnnnnnnnnnnnnnnnnnnnnnnnnnnnnnnnnnnnnnnnnnnnnnnnnnnnnnnnnnnnnnnnnnnnnnnnnnnnnnnnnnnnnnnnnnnnnnnnnnnnnnnnnnnnnnnnnnnnnnnnnnnnnnnnnnnnnnnnnnnnnnnnnnnnnnnnnnnnnnnnnnnnnnnnnnnnnnnnnnnnnnnnnnnnnnnnnnnnnnnnnnnnnnnnnnnnnnnnnnnnnnnnnnnnnnnnnnnnnnnnnnnnnnnnnnnnnnnnnnnnnnnnnnnnnnnnnnnnnnnnnnnnnnnnnnnnnnnnnnnnnnnnnnnnnnnnnnnnnnnnnnnnnnnnnnnnnnnnnnnnnnnnnnnnnnnnnnnnnnnnnnnnnnnnnnnnnnnnnnnnnnnnnnnnnnnnnnnnnnnnnnnnnnnnnnnnnnnnnnnnnnnnnnnnnnnnnnnnnnnnnnnnnnnnnnnnnnnnnnnnnnnnnnnnnnnnnnnnnnnnnnnnnnnnnnnnnnnnnnnnnnnnnnnnnnnnnnnnnnnnnnnnnnnnnnnnnnnnnnnnnnnnnnnnnnnnnnnnnnnnnnnnnnnnnnnnnnnnnnnnnnnnnnnnnnnnnnnnnnnnnnnnnnnnnnnnnnnnnnnnnnnnnnnnnnnnnnnnnnnnnnnnnnnnnnnnnnnnnnnnnnnnnnnnnnnnnnnnnnnnnnnnnnnnnnnnnnnnnnnnnnnnnnnnnnnnnnnnnnnnnnnnnnnnnnnnnnnnnnnnnnnnnnnnnnnnnnnnnnnnnnnnnnnnnnnnnnnnnnnnnnnnnnnnnnnnnnnnnnnnnnnnnnnnnnnnnnnnnnnnnnnnnnnnnnnnnnnnnnnnnnnnnnnnnnnnnnnnnnnnnnnnnnnnnnnnnnnnnnnnnnnnnnnnnnnnnnnnnnnnnnnnnnnnnnnnnnnnnnnnnnnnnnnnnnnnnnnnnnnnnnnnnnnnnnnnnnnnnnnnnnnnnnnnnnnnnnnnnnnnnnnnnnnnnnnnnnnnnnnnnnnnnnnnnnnnnnnnnnnnnnnnnnnnnnnnnnnnnnnnnnnnnnnnnnnnnnnnnnnnnnnnnnnnnnnnnnnnnnnnnnnnnnnnnnnnnnnnnnnnnnnnnnnnnnnnnnnnnnnnnnnnnnnnnnnnnnnnnnnnnnnnnnnnnnnnnnnnnnnnnnnnnnnnnnnnnnnnnnnnnnnnnnnnnnnnnnnnnnnnnnnnnnnnnnnnnnnnnnnnnnnnnnnnnnnnnnnnnnnnnnnnnnnnnnnnnnnnnnnnnnnnnnnnnnnnnnnnnnnnnnnnnnnnnnnnnnnnnnnnnnnnnnnnnnnnnnnnnnnnnnnnnnnnnnnnnnnnnnnnnnnnnnnnnnnnnnnnnnnnnnnnnnnnnnnnnnnnnnnnnnnnnnnnnnnnnnnnnnnnnnnnnnnnnnnnnnnnnnnnnnnnnnnnnnnnnnnnnnnnnnnnnnnnnnnnnnnnnnnnnnnnnnnnnnnnnnnnnnnnnnnnnnnnnnnnnnnnnnnnnnnnnnnnnnnnnnnnnnnnnnnnnnnnnnnnnnnnnnnnnnnnnnnnnnnnnnnnnnnnnnnnnnnnnnnnnnnnnnnnnnnnnnnnnnnnnnnnnnnnnnnnnnnnnnnnnnnnnnnnnnnnnnnnnnnnnnnnnnnnnnnnnnnnnnnnnnnnnnnnnnnnnnnnnnnnnnnnnnnnnnnnnnnnnnnnnnnnnnnnnnnnnnnnnnnnnnnnnnnnnnnnnnnnnnnnnnnnnnnnnnnnnnnnnnnnnnnnnnnnnnnnnnnnnnnnnnnnnnnnnnnnnnnnnnnnnnnnnnnnnnnnnnnnnnnnnnnnnnnnnnnnnnnnnnnnnnnnnnnnnnnnnnnnnnnnnnnnnnnnnnnnnnnnnnnnnnnnnnnnnnnnnnnnnnnnnnnnnnnnnnnnnnnnnnnnnnnnnnnnnnnnnnnnnnnnnnnnnnnnnnnnnnnnnnnnnnnnnnnnnnnnnnnnnnnnnnnnnnnnnnnnnnnnnnnnnnnnnnnnnnnnnnnnnnnnnnnnnnnnnnnnnnnnnnnnnnnnnnnnnnnnnnnnnnnnnnnnnnnnnnnnnnnnnnnnnnnnnnnnnnnnnnnnnnnnnnnnnnnnnnnnnnnnnnnnnnnnnnnnnnnnnnnnnnnnnnnnnnnnnnnnnnnnnnnnnnnnnnnnnnnnnnnnnnnnnnnnnnnnnnnnnnnnnnnnnnnnnnnnnnnnnnnnnnnnnnnnnnnnnnnnnnnnnnnnnnnnnnnnnnnnnnnnnnnnnnnnnnnnnnnnnnnnnnnnnnnnnnnnnnnnnnnnnnnnnnnnnnnnnnnnnnnnnnnnnnnnnnnnnnnnnnnnnnnnnnnnnnnnnnnnnnnnnnnnnnnnnnnnnnnnnnnnnnnnnnnnnnnnnnnnnnnnnnnnnnnnnnnnnnnnnnnnnnnnnnnnnnnnnnnnnnnnnnnnnnnnnnnnnnnnnnnnnnnnnnnnnnnnnnnnnnnnnnnnnnnnnnnnnnnnnnnnnnnnnnnnnnnnnnnnnnnnnnnnnnnnnnnnnnnnnnnnnnnnnnnnnnnnnnnnnnnnnnnnnnnnnnnnnnnnnnnnnnnnnnnnnnnnnnnnnnnnnnnnnnnnnnnnnnnnnnnnnnnnnnnnnnnnnnnnnnnnnnnnnnnnnnnnnnnnnnnnnnnnnnnnnnnnnnnnnnnnnnnnnnnnnnnnnnnnnnnnnnnnnnnnnnnnnnnnnnnnnnnnnnnnnnnnnnnnnnnnnnnnnnnnnnnnnnnnnnnnnnnnnnnnnnnnnnnnnnnnnnnnnnnnnnnnnnnnnnnnnnnnnnnnnnnnnnnnnnnnnnnnnnnnnnnnnnnnnnnnnnnnnnnnnnnnnnnnnnnnnnnnnnnnnnnnnnnnnnnnnnnnnnnnnnnnnnnnnnnnnnnnnnnnnnnnnnnnnnnnnnnnnnnnnnnnnnnnnnnnnnnnnnnnnnnnnnnnnnnnnnnnnnnnnnnnnnnnnnnnnnnnnnnnnnnnnnnnnnnnnnnnnnnnnnnnnnnnnnnnnnnnnnnnnnnnnnnnnnnnnnnnnnnnnnnnnnnnnnnnnnnnnnnnnnnnnnnnnnnnnnnnnnnnnnnnnnnnnnnnnnnnnnnnnnnnnnnnnnnnnnnnnnnnnnnnnnnnnnnnnnnnnnnnnnnnnnnnnnnnnnnnnnnnnnnnnnnnnnnnnnnnnnnnnnnnnnnnnnnnnnnnnnnnnnnnnnnnnnnnnnnnnnnnnnnnnnnnnnnnnnnnnnnnnnnnnnnnnnnnnnnnnnnnnnnnnnnnnnnnnnnnnnnnnnnnnnnnnnnnnnnnnnnnnnnnnnnnnnnnnnnnnnnnnnnnnnnnnnnnnnnnnnnnnnnnnnnnnnnnnnnnnnnnnnnnnnnnnnnnnnnnnnnnnnnnnnnnnnnnnnnnnnnnnnnnnnnnnnnnnnnnnnnnnnnnnnnnnnnnnnnnnnnnnnnnnnnnnnnnnnnnnnnnnnnnnnnnnnnnnnnnnnnnnnnnnnnnnnnnnnnnnnnnnnnnnnnnnnnnnnnnnnnnnnnnnnnnnnnnnnnnnnnnnnnnnnnnnnnnnnnnnnnnnnnnnnnnnnnnnnnnnnnnnnnnnnnnnnnnnnnnnnnnnnnnnnnnnnnnnnnnnnnnnnnnnnnnnnnnnnnnnnnnnnnnnnnnnnnnnnnnnnnnnnnnnnnnnnnnnnnnnnnnnnnnnnnnnnnnnnnnnnnnnnnnnnnnnnnnnnnnnnnnnnnnnnnnnnnnnnnnnnnnnnnnnnnnnnnnnnnnnnnnnnnnnnnnnnnnnnnnnnnnnnnnnnnnnnnnnnnnnnnnnnnnnnnnnnnnnnnnnnnnnnnnnnnnnnnnnnnnnnnnnnnnnnnnnnnnnnnnnnnnnnnnnnnnnnnnnnnnnnnnnnnnnnnnnnnnnnnnnnnnnnnnnnnnnnnnnnnnnnnnnnnnnnnnnnnnnnnnnnnnnnnnnnnnnnnnnnnnnnnnnnnnnnnnnnnnnnnnnnnnnnnnnnnnnnnnnnnnnnnnnnnnnnnnnnnnnnnnnnnnnnnnnnnnnnnnnnnnnnnnnnnnnnnnnnnnnnnnnnnnnnnnnnnnnnnnnnnnnnnnnnnnnnnnnnnnnnnnnnnnnnnnnnnnnnnnnnnnnnnnnnnnnnnnnnnnnnnnnnnnnnnnnnnnnnnnnnnnnnnnnnnnnnnnnnnnnnnnnnnnnnnnnnnnnnnnnnnnnnnnnnnnnnnnnnnnnnnnnnnnnnnnnnnnnnnnnnnnnnnnnnnnnnnnnnnnnnnnnnnnnnnnnnnnnnnnnnnnnnnnnnnnnnnnnnnnnnnnnnnnnnnnnnnnnnnnnnnnnnnnnnnnnnnnnnnnnnnnnnnnnnnnnnnnnnnnnnnnnnnnnnnnnnnnnnnnnnnnnnnnnnnnnnnnnnnnnnnnnnnnnnnnnnnnnnnnnnnnnnnnnnnnnnnnnnnnnnnnnnnnnnnnnnnnnnnnnnnnnnnnnnnnnnnnnnnnnnnnnnnnnnnnnnnnnnnnnnnnnnnnnnnnnnnnnnnnnnnnnnnnnnnnnnnnnnnnnnnnnnnnnnnnnnnnnnnnnnnnnnnnnnnnnnnnnnnnnnnnnnnnnnnnnnnnnnnnnnnnnnnnnnnnnnnnnnnnnnnnnnnnnnnnnnnnnnnnnnnnnnnnnnnnnnnnnnnnnnnnnnnnnnnnnnnnnnnnnnnnnnnnnnnnnnnnnnnnnnnnnnnnnnnnnnnnnnnnnnnnnnnnnnnnnnnnnnnnnnnnnnnnnnnnnnnnnnnnnnnnnnnnnnnnnnnnnnnnnnnnnnnnnnnnnnnnnnnnnnnnnnnnnnnnnnnnnnnnnnnnnnnnnnnnnnnnnnnnnnnnnnnnnnnnnnnnnnnnnnnnnnnnnnnnnnnnnnnnnnnnnnnnnnnnnnnnnnnnnnnnnnnnnnnnnnnnnnnnnnnnnnnnnnnnnnnnnnnnnnnnnnnnnnnnnnnnnnnnnnnnnnnnnnnnnnnnnnnnnnnnnnnnnnnnnnnnnnnnnnnnnnnnnnnnnnnnnnnnnnnnnnnnnnnnnnnnnnnnnnnnnnnnnnnnnnnnnnnnnnnnnnnnnnnnnnnnnnnnnnnnnnnnnnnnnnnnnnnnnnnnnnnnnnnnnnnnnnnnnnnnnnnnnnnnnnnnnnnnnnnnnnnnnnnnnnnnnnnnnnnnnnnnnnnnnnnnnnnnnnnnnnnnnnnnnnnnnnnnnnnnnnnnnnnnnnnnnnnnnnnnnnnnnnnnnnnnnnnnnnnnnnnnnnnnnnnnnnnnnnnnnnnnnnnnnnnnnnnnnnnnnnnnnnnnnnnnnnnnnnnnnnnnnnnnnnnnnnnnnnnnnnnnnnnnnnnnnnnnnnnnnnnnnnnnnnnnnnnnnnnnnnnnnnnnnnnnnnnnnnnnnnnnnnnnnnnnnnnnnnnnnnnnnnnnnnnnnnnnnnnnnnnnnnnnnnnnnnnnnnnnnnnnnnnnnnnnnnnnnnnnnnnnnnnnnnnnnnnnnnnnnnnnnnnnnnnnnnnnnnnnnnnnnnnnnnnnnnnnnnnnnnnnnnnnnnnnnnnnnnnnnnnnnnnnnnnnnnnnnnnnnnnnnnnnnnnnnnnnnnnnnnnnnnnnnnnnnnnnnnnnnnnnnnnnnnnnnnnnnnnnnnnnnnnnnnnnnnnnnnnnnnnnnnnnnnnnnnnnnnnnnnnnnnnnnnnnnnnnnnnnnnnnnnnnnnnnnnnnnnnnnnnnnnnnnnnnnnnnnnnnnnnnnnnnnnnnnnnnnnnnnnnnnnnnnnnnnnnnnnnnnnnnnnnnnnnnnnnnnnnnnnnnnnnnnnnnnnnnnnnnnnnnnnnnnnnnnnnnnnnnnnnnnnnnnnnnnnnnnnnnnnnnnnnnnnnnnnnnnnnnnnnnnnnnnnnnnnnnnnnnnnnnnnnnnnnnnnnnnnnnnnnnnnnnnnnnnnnnnnnnnnnnnnnnnnnnnnnnnnnnnnnnnnnnnnnnnnnnnnnnnnnnnnnnnnnnnnnnnnnnnnnnnnnnnnnnnnnnnnnnnnnnnnnnnnnnnnnnnnnnnnnnnnnnnnnnnnnnnnnnnnnnnnnnnnnnnnnnnnnnnnnnnnnnnnnnnnnnnnnnnnnnnnnnnnnnnnnnnnnnnnnnnnnnnnnnnnnnnnnnnnnnnnnnnnnnnnnnnnnnnnnnnnnnnnnnnnnnnnnnnnnnnnnnnnnnnnnnnnnnnnnnnnnnnnnnnnnnnnnnnnnnnnnnnnnnnnnnnnnnnnnnnnnnnnnnnnnnnnnnnnnnnnnnnnnnnnnnnnnnnnnnnnnnnnnnnnnnnnnnnnnnnnnnnnnnnnnnnnnnnnnnnnnnnnnnnnnnnnnnnnnnnnnnnnnnnnnnnnnnnnnnnnnnnnnnnnnnnnnnnnnnnnnnnnnnnnnnnnnnnnnnnnnnnnnnnnnnnnnnnnnnnnnnnnnnnnnnnnnnnnnnnnnnnnnnnnnnnnnnnnnnnnnnnnnnnnnnnnnnnnnnnnnnnnnnnnnnnnnnnnnnnnnnnnnnnnnnnnnnnnnnnnnnnnnnnnnnnnnnnnnnnnnnnnnnnnnnnnnnnnnnnnnnnnnnnnnnnnnnnnnnnnnnnnnnnnnnnnnnnnnnnnnnnnnnnnnnnnnnnnnnnnnnnnnnnnnnnnnnnnnnnnnnnnnnnnnnnnnnnnnnnnnnnnnnnnnnnnnnnnnnnnnnnnnnnnnnnnnnnnnnnnnnnnnnnnnnnnnnnnnnnnnnnnnnnnnnnnnnnnnnnnnnnnnnnnnnnnnnnnnnnnnnnnnnnnnnnnnnnnnnnnnnnnnnnnnnnnnnnnnnnnnnnnnnnnnnnnnnnnnnnnnnnnnnnnnnnnnnnnnnnnnnnnnnnnnnnnnnnnnnnnnnnnnnnnnnnnnnnnnnnnnnnnnnnnnnnnnnnnnnnnnnnnnnnnnnnnnnnnnnnnnnnnnnnnnnnnnnnnnnnnnnnnnnnnnnnnnnnnnnnnnnnnnnnnnnnnnnnnnnnnnnnnnnnnnnnnnnnnnnnnnnnnnnnnnnnnnnnnnnnnnnnnnnnnnnnnnnnnnnnnnnnnnnnnnnnnnnnnnnnnnnnnnnnnnnnnnnnnnnnnnnnnnnnnnnnnnnnnnnnnnnnnnnnnnnnnnnnnnnnnnnnnnnnnnnnnnnnnnnnnnnnnnnnnnnnnnnnnnnnnnnnnnnnnnnnnnnnnnnnnnnnnnnnnnnnnnnnnnnnnnnnnnnnnnnnnnnnnnnnnnnnnnnnnnnnnnnnnnnnnnnnnnnnnnnnnnnnnnnnnnnnnnnnnnnnnnnnnnnnnnnnnnnnnnnnnnnnnnnnnnnnnnnnnnnnnnnnnnnnnnnnnnnnnnnnnnnnnnnnnnnnnnnnnnnnnnnnnnnnnnnnnnnnnnnnnnnnnnnnnnnnnnnnnnnnnnnnnnnnnnnnnnnnnnnnnnnnnnnnnnnnnnnnnnnnnnnnnnnnnnnnnnnnnnnnnnnnnnnnnnnnnnnnnnnnnnnnnnnnnnnnnnnnnnnnnnnnnnnnnnnnnnnnnnnnnnnnnnnnnnnnnnnnnnnnnnnnnnnnnnnnnnnnnnnnnnnnnnnnnnnnnnnnnnnnnnnnnnnnnnnnnnnnnnnnnnnnnnnnnnnnnnnnnnnnnnnnnnnnnnnnnnnnnnnnnnnnnnnnnnnnnnnnnnnnnnnnnnnnnnnnnnnnnnnnnnnnnnnnnnnnnnnnnnnnnnnnnnnnnnnnnnnnnnnnnnnnnnnnnnnnnnnnnnnnnnnnnnnnnnnnnnnnnnnnnnnnnnnnnnnnnnnnnnnnnnnnnnnnnnnnnnnnnnnnnnnnnnnnnnnnnnnnnnnnnnnnnnnnnnnnnnnnnnnnnnnnnnnnnnnnnnnnnnnnnnnnnnnnnnnnnnnnnnnnnnnnnnnnnnnnnnnnnnnnnnnnnnnnnnnnnnnnnnnnnnnnnnnnnnnnnnnnnnnnnnnnnnnnnnnnnnnnnnnnnnnnnnnnnnnnnnnnnnnnnnnnnnnnnnnnnnnnnnnnnnnnnnnnnnnnnnnnnnnnnnnnnnnnnnnnnnnnnnnnnnnnnnnnnnnnnnnnnnnnnnnnnnnnnnnnnnnnnnnnnnnnnnnnnnnnnnnnnnnnnnnnnnnnnnnnnnnnnnnnnnnnnnnnnnnnnnnnnnnnnnnnnnnnnnnnnnnnnnnnnnnnnnnnnnnnnnnnnnnnnnnnnnnnnnnnnnnnnnnnnnnnnnnnnnnnnnnnnnnnnnnnnnnnnnnnnnnnnnnnnnnnnnnnnnnnnnnnnnnnnnnnnnnnnnnnnnnnnnnnnnnnnnnnnnnnnnnnnnnnnnnnnnnnnnnnnnnnnnnnnnnnnnnnnnnnnnnnnnnnnnnnnnnnnnnnnnnnnnnnnnnnnnnnnnnnnnnnnnnnnnnnnnnnnnnnnnnnnnnnnnnnnnnnnnnnnnnnnnnnnnnnnnnnnnnnnnnnnnnnnnnnnnnnnnnnnnnnnnnnnnnnnnnnnnnnnnnnnnnnnnnnnnnnnnnnnnnnnnnnnnnnnnnnnnnnnnnnnnnnnnnnnnnnnnnnnnnnnnnnnnnnnnnnnnnnnnnnnnnnnnnnnnnnnnnnnnnnnnnnnnnnnnnnnnnnnnnnnnnnnnnnnnnnnnnnnnnnnnnnnnnnnnnnnnnnnnnnnnnnnnnnnnnnnnnnnnnnnnnnnnnnnnnnnnnnnnnnnnnnnnnnnnnnnnnnnnnnnnnnnnnnnnnnnnnnnnnnnnnnnnnnnnnnnnnnnnnnnnnnnnnnnnnnnnnnnnnnnnnnnnnnnnnnnnnnnnnnnnnnnnnnnnnnnnnnnnnnnnnnnnnnnnnnnnnnnnnnnnnnnnnnnnnnnnnnnnnnnnnnnnnnnnnnnnnnnnnnnnnnnnnnnnnnnnnnnnnnnnnnnnnnnnnnnnnnnnnnnnnnnnnnnnnnnnnnnnnnnnnnnnnnnnnnnnnnnnnnnnnnnnnnnnnnnnnnnnnnnnnnnnnnnnnnnnnnnnnnnnnnnnnnnnnnnnnnnnnnnnnnnnnnnnnnnnnnnnnnnnnnnnnnnnnnnnnnnnnnnnnnnnnnnnnnnnnnnnnnnnnnnnnnnnnnnnnnnnnnnnnnnnnnnnnnnnnnnnnnnnnnnnnnnnnnnnnnnnnnnnnnnnnnnnnnnnnnnnnnnnnnnnnnnnnnnnnnnnnnnnnnnnnnnnnnnnnnnnnnnnnnnnnnnnnnnnnnnnnnnnnnnnnnnnnnnnnnnnnnnnnnnnnnnnnnnnnnnnnnnnnnnnnnnnnnnnnnnnnnnnnnnnnnnnnnnnnnnnnnnnnnnnnnnnnnnnnnnnnnnnnnnnnnnnnnnnnnnnnnnnnnnnnnnnnnnnnnnnnnnnnnnnnnnnnnnnnnnnnnnnnnnnnnnnnnnnnnnnnnnnnnnnnnnnnnnnnnnnnnnnnnnnnnnnnnnnnnnnnnnnnnnnnnnnnnnnnnnnnnnnnnnnnnnnnnnnnnnnnnnnnnnnnnnnnnnnnnnnnnnnnnnnnnnnnnnnnnnnnnnnnnnnnnnnnnnnnnnnnnnnnnnnnnnnnnnnnnnnnnnnnnnnnnnnnnnnnnnnnnnnnnnnnnnnnnnnnnnnnnnnnnnnnnnnnnnnnnnnnnnnnnnnnnnnnnnnnnnnnnnnnnnnnnnnnnnnnnnnnnnnnnnnnnnnnnnnnnnnnnnnnnnnnnnnnnnnnnnnnnnnnnnnnnnnnnnnnnnnnnnnnnnnnnnnnnnnnnnnnnnnnnnnnnnnnnnnnnnnnnnnnnnnnnnnnnnnnnnnnnnnnnnnnnnnnnnnnnnnnnnnnnnnnnnnnnnnnnnnnnnnnnnnnnnnnnnnnnnnnnnnnnnnnnnnnnnnnnnnnnnnnnnnnnnnnnnnnnnnnnnnnnnnnnnnnnnnnnnnnnnnnnnnnnnnnnnnnnnnnnnnnnnnnnnnnnnnnnnnnnnnnnnnnnnnnnnnnnnnnnnnnnnnnnnnnnnnnnnnnnnnnnnnnnnnnnnnnnnnnnnnnnnnnnnnnnnnnnnnnnnnnnnnnnnnnnnnnnnnnnnnnnnnnnnnnnnnnnnnnnnnnnnnnnnnnnnnnnnnnnnnnnnnnnnnnnnnnnnnnnnnnnnnnnnnnnnnnnnnnnnnnnnnnnnnnnnnnnnnnnnnnnnnnnnnnnnnnnnnnnnnnnnnnnnnnnnnnnnnnnnnnnnnnnnnnnnnnnnnnnnnnnnnnnnnnnnnnnnnnnnnnnnnnnnnnnnnnnnnnnnnnnnnnnnnnnnnnnnnnnnnnnnnnnnnnnnnnnnnnnnnnnnnnnnnnnnnnnnnnnnnnnnnnnnnnnnnnnnnnnnnnnnnnnnnnnnnnnnnnnnnnnnnnnnnnnnnnnnnnnnnnnnnnnnnnnnnnnnnnnnnnnnnnnnnnnnnnnnnnnnnnnnnnnnnnnnnnnnnnnnnnnnnnnnnnnnnnnnnnnnnnnnnnnnnnnnnnnnnnnnnnnnnnnnnnnnnnnnnnnnnnnnnnnnnnnnnnnnnnnnnnnnnnnnnnnnnnnnnnnnnnnnnnnnnnnnnnnnnnnnnnnnnnnnnnnnnnnnnnnnnnnnnnnnnnnnnnnnnnnnnnnnnnnnnnnnnnnnnnnnnnnnnnnnnnnnnnnnnnnnnnnnnnnnnnnnnnnnnnnnnnnnnnnnnnnnnnnnnnnnnnnnnnnnnnnnnnnnnnnnnnnnnnnnnnnnnnnnnnnnnnnnnnnnnnnnnnnnnnnnnnnnnnnnnnnnnnnnnnnnnnnnnnnnnnnnnnnnnnnnnnnnnnnnnnnnnnnnnnnnnnnnnnnnnnnnnnnnnnnnnnnnnnnnnnnnnnnnnnnnnnnnnnnnnnnnnnnnnnnnnnnnnnnnnnnnnnnnnnnnnnnnnnnnnnnnnnnnnnnnnnnnnnnnnnnnnnnnnnnnnnnnnnnnnnnnnnnnnnnnnnnnnnnnnnnnnnnnnnnnnnnnnnnnnnnnnnnnnnnnnnnnnnnnnnnnnnnnnnnnnnnnnnnnnnnnnnnnnnnnnnnnnnnnnnnnnnnnnnnnnnnnnnnnnnnnnnnnnnnnnnnnnnnnnnnnnnnnnnnnnnnnnnnnnnnnnnnnnnnnnnnnnnnnnnnnnnnnnnnnnnnnnnnnnnnnnnnnnnnnnnnnnnnnnnnnnnnnnnnnnnnnnnnnnnnnnnnnnnnnnnnnnnnnnnnnnnnnnnnnnnnnnnnnnnnnnnnnnnnnnnnnnnnnnnnnnnnnnnnnnnnnnnnnnnnnnnnnnnnnnnnnnnnnnnnnnnnnnnnnnnnnnnnnnnnnnnnnnnnnnnnnnnnnnnnnnnnnnnnnnnnnnnnnnnnnnnnnnnnnnnnnnnnnnnnnnnnnnnnnnnnnnnnnnnnnnnnnnnnnnnnnnnnnnnnnnnnnnnnnnnnnnnnnnnnnnnnnnnnnnnnnnnnnnnnnnnnnnnnnnnnnnnnnnnnnnnnnnnnnnnnnnnnnnnnnnnnnnnnnnnnnnnnnnnnnnnnnnnnnnnnnnnnnnnnnnnnnnnnnnnnnnnnnnnnnnnnnnnnnnnnnnnnnnnnnnnnnnnnnnnnnnnnnnnnnnnnnnnnnnnnnnnnnnnnnnnnnnnnnnnnnnnnnnnnnnnnnnnnnnnnnnnnnnnnnnnnnnnnnnnnnnnnnnnnnnnnnnnnnnnnnnnnnnnnnnnnnnnnnnnnnnnnnnnnnnnnnnnnnnnnnnnnnnnnnnnnnnnnnnnnnnnnnnnnnnnnnnnnnnnnnnnnnnnnnnnnnnnnnnnnnnnnnnnnnnnnnnnnnnnnnnnnnnnnnnnnnnnnnnnnnnnnnnnnnnnnnnnnnnnnnnnnnnnnnnnnnnnnnnnnnnnnnnnnnnnnnnnnnnnnnnnnnnnnnnnnnnnnnnnnnnnnnnnnnnnnnnnnnnnnnnnnnnnnnnnnnnnnnnnnnnnnnnnnnnnnnnnnnnnnnnnnnnnnnnnnnnnnnnnnnnnnnnnnnnnnnnnnnnnnnnnnnnnnnnnnnnnnnnnnnnnnnnnnnnnnnnnnnnnnnnnnnnnnnnnnnnnnnnnnnnnnnnnnnnnnnnnnnnnnnnnnnnnnnnnnnnnnnnnnnnnnnnnnnnnnnnnnnnnnnnnnnnnnnnnnnnnnnnnnnnnnnnnnnnnnnnnnnnnnnnnnnnnnnnnnnnnnnnnnnnnnnnnnnnnnnnnnnnnnnnnnnnnnnnnnnnnnnnnnnnnnnnnnnnnnnnnnnnnnnnnnnnnnnnnnnnnnnnnnnnnnnnnnnnnnnnnnnnnnnnnnnnnnnnnnnnnnnnnnnnnnnnnnnnnnnnnnnnnnnnnnnnnnnnnnnnnnnnnnnnnnnnnnnnnnnnnnnnnnnnnnnnnnnnnnnnnnnnnnnnnnnnnnnnnnnnnnnnnnnnnnnnnnnnnnnnnnnnnnnnnnnnnnnnnnnnnnnnnnnnnnnnnnnnnnnnnnnnnnnnnnnnnnnnnnnnnnnnnnnnnnnnnnnnnnnnnnnnnnnnnnnnnnnnnnnnnnnnnnnnnnnnnnnnnnnnnnnnnnnnnnnnnnnnnnnnnnnnnnnnnnnnnnnnnnnnnnnnnnnnnnnnnnnnnnnnnnnnnnnnnnnnnnnnnnnnnnnnnnnnnnnnnnnnnnnnnnnnnnnnnnnnnnnnnnnnnnnnnnnnnnnnnnnnnnnnnnnnnnnnnnnnnnnnnnnnnnnnnnnnnnnnnnnnnnnnnnnnnnnnnnnnnnnnnnnnnnnnnnnnnnnnnnnnnnnnnnnnnnnnnnnnnnnnnnnnnnnnnnnnnnnnnnnnnnnnnnnnnnnnnnnnnnnnnnnnnnnnnnnnnnnnnnnnnnnnnnnnnnnnnnnnnnnnnnnnnnnnnnnnnnnnnnnnnnnnnnnnnnnnnnnnnnnnnnnnnnnnnnnnnnnnnnnnnnnnnnnnnnnnnnnnnnnnnnnnnnnnnnnnnnnnnnnnnnnnnnnnnnnnnnnnnnnnnnnnnnnnnnnnnnnnnnnnnnnnnnnnnnnnnnnnnnnnnnnnnnnnnnnnnnnnnnnnnnnnnnnnnnnnnnnnnnnnnnnnnnnnnnnnnnnnnnnnnnnnnnnnnnnnnnnnnnnnnnnnnnnnnnnnnnnnnnnnnnnnnnnnnnnnnnnnnnnnnnnnnnnnnnnnnnnnnnnnnnnnnnnnnnnnnnnnnnnnnnnnnnnnnnnnnnnnnnnnnnnnnnnnnnnnnnnnnnnnnnnnnnnnnnnnnnnnnnnnnnnnnnnnnnnnnnnnnnnnnnnnnnnnnnnnnnnnnnnnnnnnnnnnnnnnnnnnnnnnnnnnnnnnnnnnnnnnnnnnnnnnnnnnnnnnnnnnnnnnnnnnnnnnnnnnnnnnnnnnnnnnnnnnnnnnnnnnnnnnnnnnnnnnnnnnnnnnnnnnnnnnnnnnnnnnnnnnnnnnnnnnnnnnnnnnnnnnnnnnnnnnnnnnnnnnnnnnnnnnnnnnnnnnnnnnnnnnnnnnnnnnnnnnnnnnnnnnnnnnnnnnnnnnnnnnnnnnnnnnnnnnnnnnnnnnnnnnnnnnnnnnnnnnnnnnnnnnnnnnnnnnnnnnnnnnnnnnnnnnnnnnnnnnnnnnnnnnnnnnnnnnnnnnnnnnnnnnnnnnnnnnnnnnnnnnnnnnnnnnnnnnnnnnnnnnnnnnnnnnnnnnnnnnnnnnnnnnnnnnnnnnnnnnnnnnnnnnnnnnnnnnnnnnnnnnnnnnnnnnnnnnnnnnnnnnnnnnnnnnnnnnnnnnnnnnnnnnnnnnnnnnnnnnnnnnnnnnnnnnnnnnnnnnnnnnnnnnnnnnnnnnnnnnnnnnnnnnnnnnnnnnnnnnnnnnnnnnnnnnnnnnnnnnnnnnnnnnnnnnnnnnnnnnnnnnnnnnnnnnnnnnnnnnnnnnnnnnnnnnnnnnnnnnnnnnnnnnnnnnnnnnnnnnnnnnnnnnnnnnnnnnnnnnnnnnnnnnnnnnnnnnnnnnnnnnnnnnnnnnnnnnnnnnnnnnnnnnnnnnnnnnnnnnnnnnnnnnnnnnnnnnnnnnnnnnnnnnnnnnnnnnnnnnnnnnnnnnnnnnnnnnnnnnnnnnnnnnnnnnnnnnnnnnnnnnnnnnnnnnnnnnnnnnnnnnnnnnnnnnnnnnnnnnnnnnnnnnnnnnnnnnnnnnnnnnnnnnnnnnnnnnnnnnnnnnnnnnnnnnnnnnnnnnnnnnnnnnnnnnnnnnnnnnnnnnnnnnnnnnnnnnnnnnnnnnnnnnnnnnnnnnnnnnnnnnnnnnnnnnnnnnnnnnnnnnnnnnnnnnnnnnnnnnnnnnnnnnnnnnnnnnnnnnnnnnnnnnnnnnnnnnnnnnnnnnnnnnnnnnnnnnnnnnnnnnnnnnnnnnnnnnnnnnnnnnnnnnnnnnnnnnnnnnnnnnnnnnnnnnnnnnnnnnnnnnnnnnnnnnnnnnnnnnnnnnnnnnnnnnnnnnnnnnnnnnnnnnnnnnnnnnnnnnnnnnnnnnnnnnnnnnnnnnnnnnnnnnnnnnnnnnnnnnnnnnnnnnnnnnnnnnnnnnnnnnnnnnnnnnnnnnnnnnnnnnnnnnnnnnnnnnnnnnnnnnnnnnnnnnnnnnnnnnnnnnnnnnnnnnnnnnnnnnnnnnnnnnnnnnnnnnnnnnnnnnnnnnnnnnnnnnnnnnnnnnnnnnnnnnnnnnnnnnnnnnnnnnnnnnnnnnnnnnnnnnnnnnnnnnnnnnnnnnnnnnnnnnnnnnnnnnnnnnnnnnnnnnnnnnnnnnnnnnnnnnnnnnnnnnnnnnnnnnnnnnnnnnnnnnnnnnnnnnnnnnnnnnnnnnnnnnnnnnnnnnnnnnnnnnnnnnnnnnnnnnnnnnnnnnnnnnnnnnnnnnnnnnnnnnnnnnnnnnnnnnnnnnnnnnnnnnnnnnnnnnnnnnnnnnnnnnnnnnnnnnnnnnnnnnnnnnnnnnnnnnnnnnnnnnnnnnnnnnnnnnnnnnnnnnnnnnnnnnnnnnnnnnnnnnnnnnnnnnnnnnnnnnnnnnnnnnnnnnnnnnnnnnnnnnnnnnnnnnnnnnnnnnnnnnnnnnnnnnnnnnnnnnnnnnnnnnnnnnnnnnnnnnnnnnnnnnnnnnnnnnnnnnnnnnnnnnnnnnnnnnnnnnnnnnnnnnnnnnnnnnnnnnnnnnnnnnnnnnnnnnnnnnnnnnnnnnnnnnnnnnnnnnnnnnnnnnnnnnnnnnnnnnnnnnnnnnnnnnnnnnnnnnnnnnnnnnnnnnnnnnnnnnnnnnnnnnnnnnnnnnnnnnnnnnnnnnnnnnnnnnnnnnnnnnnnnnnnnnnnnnnnnnnnnnnnnnnnnnnnnnnnnnnnnnnnnnnnnnnnnnnnnnnnnnnnnnnnnnnnnnnnnnnnnnnnnnnnnnnnnnnnnnnnnnnnnnnnnnnnnnnnnnnnnnnnnnnnnnnnnnnnnnnnnnnnnnnnnnnnnnnnnnnnnnnnnnnnnnnnnnnnnnnnnnnnnnnnnnnnnnnnnnnnnnnnnnnnnnnnnnnnnnnnnnnnnnnnnnnnnnnnnnnnnnnnnnnnnnnnnnnnnnnnnnnnnnnnnnnnnnnnnnnnnnnnnnnnnnnnnnnnnnnnnnnnnnnnnnnnnnnnnnnnnnnnnnnnnnnnnnnnnnnnnnnnnnnnnnnnnnnnnnnnnnnnnnnnnnnnnnnnnnnnnnnnnnnnnnnnnnnnnnnnnnnnnnnnnnnnnnnnnnnnnnnnnnnnnnnnnnnnnnnnnnnnnnnnnnnnnnnnnnnnnnnnnnnnnnnnnnnnnnnnnnnnnnnnnnnnnnnnnnnnnnnnnnnnnnnnnnnnnnnnnnnnnnnnnnnnnnnnnnnnnnnnnnnnnnnnnnnnnnnnnnnnnnnnnnnnnnnnnnnnnnnnnnnnnnnnnnnnnnnnnnnnnnnnnnnnnnnnnnnnnnnnnnnnnnnnnnnnnnnnnnnnnnnnnnnnnnnnnnnnnnnnnnnnnnnnnnnnnnnnnnnnnnnnnnnnnnnnnnnnnnnnnnnnnnnnnnnnnnnnnnnnnnnnnnnnnnnnnnnnnnnnnnnnnnnnnnnnnnnnnnnnnnnnnnnnnnnnnnnnnnnnnnnnnnnnnnnnnnnnnnnnnnnnnnnnnnnnnnnnnnnnnnnnnnnnnnnnnnnnnnnnnnnnnnnnnnnnnnnnnnnnnnnnnnnnnnnnnnnnnnnnnnnnnnnnnnnnnnnnnnnnnnnnnnnnnnnnnnnnnnnnnnnnnnnnnnnnnnnnnnnnnnnnnnnnnnnnnnnnnnnnnnnnnnnnnnnnnnnnnnnnnnnnnnnnnnnnnnnnnnnnnnnnnnnnnnnnnnnnnnnnnnnnnnnnnnnnnnnnnnnnnnnnnnnnnnnnnnnnnnnnnnnnnnnnnnnnnnnnnnnnnnnnnnnnnnnnnnnnnnnnnnnnnnnnnnnnnnnnnnnnnnnnnnnnnnnnnnnnnnnnnnnnnnnnnnnnnnnnnnnnnnnnnnnnnnnnnnnnnnnnnnnnnnnnnnnnnnnnnnnnnnnnnnnnnnnnnnnnnnnnnnnnnnnnnnnnnnnnnnnnnnnnnnnnnnnnnnnnnnnnnnnnnnnnnnnnnnnnnnnnnnnnnnnnnnnnnnnnnnnnnnnnnnnnnnnnnnnnnnnnnnnnnnnnnnnnnnnnnnnnnnnnnnnnnnnnnnnnnnnnnnnnnnnnnnnnnnnnnnnnnnnnnnnnnnnnnnnnnnnnnnnnnnnnnnnnnnnnnnnnnnnnnnnnnnnnnnnnnnnnnnnnnnnnnnnnnnnnnnnnnnnnnnnnnnnnnnnnnnnnnnnnnnnnnnnnnnnnnnnnnnnnnnnnnnnnnnnnnnnnnnnnnnnnnnnnnnnnnnnnnnnnnnnnnnnnnnnnnnnnnnnnnnnnnnnnnnnnnnnnnnnnnnnnnnnnnnnnnnnnnnnnnnnnnnnnnnnnnnnnnnnnnnnnnnnnnnnnnnnnnnnnnnnnnnnnnnnnnnnnnnnnnnnnnnnnnnnnnnnnnnnnnnnnnnnnnnnnnnnnnnnnnnnnnnnnnnnnnnnnnnnnnnnnnnnnnnnnnnnnnnnnnnnnnnnnnnnnnnnnnnnnnnnnnnnnnnnnnnnnnnnnnnnnnnnnnnnnnnnnnnnnnnnnnnnnnnnnnnnnnnnnnnnnnnnnnnnnnnnnnnnnnnnnnnnnnnnnnnnnnnnnnnnnnnnnnnnnnnnnnnnnnnnnnnnnnnnnnnnnnnnnnnnnnnnnnnnnnnnnnnnnnnnnnnnnnnnnnnnnnnnnnnnnnnnnnnnnnnnnnnnnnnnnnnnnnnnnnnnnnnnnnnnnnnnnnnnnnnnnnnnnnnnnnnnnnnnnnnnnnnnnnnnnnnnnnnnnnnnnnnnnnnnnnnnnnnnnnnnnnnnnnnnnnnnnnnnnnnnnnnnnnnnnnnnnnnnnnnnnnnnnnnnnnnnnnnnnnnnnnnnnnnnnnnnnnnnnnnnnnnnnnnnnnnnnnnnnnnnnnnnnnnnnnnnnnnnnnnnnnnnnnnnnnnnnnnnnnnnnnnnnnnnnnnnnnnnnnnnnnnnnnnnnnnnnnnnnnnnnnnnnnnnnnnnnnnnnnnnnnnnnnnnnnnnnnnnnnnnnnnnnnnnnnnnnnnnnnnnnnnnnnnnnnnnnnnnnnnnnnnnnnnnnnnnnnnnnnnnnnnnnnnnnnnnnnnnnnnnnnnnnnnnnnnnnnnnnnnnnnnnnnnnnnnnnnnnnnnnnnnnnnnnnnnnnnnnnnnnnnnnnnnnnnnnnnnnnnnnnnnnnnnnnnnnnnnnnnnnnnnnnnnnnnnnnnnnnnnnnnnnnnnnnnnnnnnnnnnnnnnnnnnnnnnnnnnnnnnnnnnnnnnnnnnnnnnnnnnnnnnnnnnnnnnnnnnnnnnnnnnnnnnnnnnnnnnnnnnnnnnnnnnnnnnnnnnnnnnnnnnnnnnnnnnnnnnnnnnnnnnnnnnnnnnnnnnnnnnnnnnnnnnnnnnnnnnnnnnnnnnnnnnnnnnnnnnnnnnnnnnnnnnnnnnnnnnnnnnnnnnnnnnnnnnnnnnnnnnnnnnnnnnnnnnnnnnnnnnnnnnnnnnnnnnnnnnnnnnnnnnnnnnnnnnnnnnnnnnnnnnnnnnnnnnnnnnnnnnnnnnnnnnnnnnnnnnnnnnnnnnnnnnnnnnnnnnnnnnnnnnnnnnnnnnnnnnnnnnnnnnnnnnnnnnnnnnnnnnnnnnnnnnnnnnnnnnnnnnnnnnnnnnnnnnnnnnnnnnnnnnnnnnnnnnnnnnnnnnnnnnnnnnnnnnnnnnnnnnnnnnnnnnnnnnnnnnnnnnnnnnnnnnnnnnnnnnnnnnnnnnnnnnnnnnnnnnnnnnnnnnnnnnnnnnnnnnnnnnnnnnnnnnnnnnnnnnnnnnnnnnnnnnnnnnnnnnnnnnnnnnnnnnnnnnnnnnnnnnnnnnnnnnnnnnnnnnnnnnnnnnnnnnnnnnnnnnnnnnnnnnnnnnnnnnnnnnnnnnnnnnnnnnnnnnnnnnnnnnnnnnnnnnnnnnnnnnnnnnnnnnnnnnnnnnnnnnnnnnnnnnnnnnnnnnnnnnnnnnnnnnnnnnnnnnnnnnnnnnnnnnnnnnnnnnnnnnnnnnnnnnnnnnnnnnnnnnnnnnnnnnnnnnnnnnnnnnnnnnnnnnnnnnnnnnnnnnnnnnnnnnnnnnnnnnnnnnnnnnnnnnnnnnnnnnnnnnnnnnnnnnnnnnnnnnnnnnnnnnnnnnnnnnnnnnnnnnnnnnnnnnnnnnnnnnnnnnnnnnnnnnnnnnnnnnnnnnnnnnnnnnnnnnnnnnnnnnnnnnnnnnnnnnnnnnnnnnnnnnnnnnnnnnnnnnnnnnnnnnnnnnnnnnnnnnnnnnnnnnnnnnnnnnnnnnnnnnnnnnnnnnnnnnnnnnnnnnnnnnnnnnnnnnnnnnnnnnnnnnnnnnnnnnnnnnnnnnnnnnnnnnnnnnnnnnnnnnnnnnnnnnnnnnnnnnnnnnnnnnnnnnnnnnnnnnnnnnnnnnnnnnnnnnnnnnnnnnnnnnnnnnnnnnnnnnnnnnnnnnnnnnnnnnnnnnnnnnnnnnnnnnnnnnnnnnnnnnnnnnnnnnnnnnnnnnnnnnnnnnnnnnnnnnnnnnnnnnnnnnnnnnnnnnnnnnnnnnnnnnnnnnnnnnnnnnnnnnnnnnnnnnnnnnnnnnnnnnnnnnnnnnnnnnnnnnnnnnnnnnnnnnnnnnnnnnnnnnnnnnnnnnnnnnnnnnnnnnnnnnnnnnnnnnnnnnnnnnnnnnnnnnnnnnnnnnnnnnnnnnnnnnnnnnnnnnnnnnnnnnnnnnnnnnnnnnnnnnnnnnnnnnnnnnnnnnnnnnnnnnnnnnnnnnnnnnnnnnnnnnnnnnnnnnnnnnnnnnnnnnnnnnnnnnnnnnnnnnnnnnnnnnnnnnnnnnnnnnnnnnnnnnnnnnnnnnnnnnnnnnnnnnnnnnnnnnnnnnnnnnnnnnnnnnnnnnnnnnnnnnnnnnnnnnnnnnnnnnnnnnnnnnnnnnnnnnnnnnnnnnnnnnnnnnnnnnnnnnnnnnnnnnnnnnnnnnnnnnnnnnnnnnnnnnnnnnnnnnnnnnnnnnnnnnnnnnnnnnnnnnnnnnnnnnnnnnnnnnnnnnnnnnnnnnnnnnnnnnnnnnnnnnnnnnnnnnnnnnnnnnnnnnnnnnnnnnnnnnnnnnnnnnnnnnnnnnnnnnnnnnnnnnnnnnnnnnnnnnnnnnnnnnnnnnnnnnnnnnnnnnnnnnnnnnnnnnnnnnnnnnnnnnnnnnnnnnnnnnnnnnnnnnnnnnnnnnnnnnnnnnnnnnnnnnnnnnnnnnnnnnnnnnnnnnnnnnnnnnnnnnnnnnnnnnnnnnnnnnnnnnnnnnnnnnnnnnnnnnnnnnnnnnnnnnnnnnnnnnnnnnnnnnnnnnnnnnnnnnnnnnnnnnnnnnnnnnnnnnnnnnnnnnnnnnnnnnnnnnnnnnnnnnnnnnnnnnnnnnnnnnnnnnnnnnnnnnnnnnnnnnnnnnnnnnnnnnnnnnnnnnnnnnnnnnnnnnnnnnnnnnnnnnnnnnnnnnnnnnnnnnnnnnnnnnnnnnnnnnnnnnnnnnnnnnnnnnnnnnnnnnnnnnnnnnnnnnnnnnnnnnnnnnnnnnnnnnnnnnnnnnnnnnnnnnnnnnnnnnnnnnnnnnnnnnnnnnnnnnnnnnnnnnnnnnnnnnnnnnnnnnnnnnnnnnnnnnnnnnnnnnnnnnnnnnnnnnnnnnnnnnnnnnnnnnnnnnnnnnnnnnnnnnnnnnnnnnnnnnnnnnnnnnnnnnnnnnnnnnnnnnnnnnnnnnnnnnnnnnnnnnnnnnnnnnnnnnnnnnnnnnnnnnnnnnnnnnnnnnnnnnnnnnnnnnnnnnnnnnnnnnnnnnnnnnnnnnnnnnnnnnnnnnnnnnnnnnnnnnnnnnnnnnnnnnnnnnnnnnnnnnnnnnnnnnnnnnnnnnnnnnnnnnnnnnnnnnnnnnnnnnnnnnnnnnnnnnnnnnnnnnnnnnnnnnnnnnnnnnnnnnnnnnnnnnnnnnnnnnnnnnnnnnnnnnnnnnnnnnnnnnnnnnnnnnnnnnnnnnnnnnnnnnnnnnnnnnnnnnnnnnnnnnnnnnnnnnnnnnnnnnnnnnnnnnnnnnnnnnnnnnnnnnnnnnnnnnnnnnnnnnnnnnnnnnnnnnnnnnnnnnnnnnnnnnnnnnnnnnnnnnnnnnnnnnnnnnnnnnnnnnnnnnnnnnnnnnnnnnnnnnnnnnnnnnnnnnnnnnnnnnnnnnnnnnnnnnnnnnnnnnnnnnnnnnnnnnnnnnnnnnnnnnnnnnnnnnnnnnnnnnnnnnnnnnnnnnnnnnnnnnnnnnnnnnnnnnnnnnnnnnnnnnnnnnnnnnnnnnnnnnnnnnnnnnnnnnnnnnnnnnnnnnnnnnnnnnnnnnnnnnnnnnnnnnnnnnnnnnnnnnnnnnnnnnnnnnnnnnnnnnnnnnnnnnnnnnnnnnnnnnnnnnnnnnnnnnnnnnnnnnnnnnnnnnnnnnnnnnnnnnnnnnnnnnnnnnnnnnnnnnnnnnnnnnnnnnnnnnnnnnnnnnnnnnnnnnnnnnnnnnnnnnnnnnnnnnnnnnnnnnnnnnnnnnnnnnnnnnnnnnnnnnnnnnnnnnnnnnnnnnnnnnnnnnnnnnnnnnnnnnnnnnnnnnnnnnnnnnnnnnnnnnnnnnnnnnnnnnnnnnnnnnnnnnnnnnnnnnnnnnnnnnnnnnnnnnnnnnnnnnnnnnnnnnnnnnnnnnnnnnnnnnnnnnnnnnnnnnnnnnnnnnnnnnnnnnnnnnnnnnnnnnnnnnnnnnnnnnnnnnnnnnnnnnnnnnnnnnnnnnnnnnnnnnnnnnnnnnnnnnnnnnnnnnnnnnnnnnnnnnnnnnnnnnnnnnnnnnnnnnnnnnnnnnnnnnnnnnnnnnnnnnnnnnnnnnnnnnnnnnnnnnnnnnnnnnnnnnnnnnnnnnnnnnnnnnnnnnnnnnnnnnnnnnnnnnnnnnnnnnnnnnnnnnnnnnnnnnnnnnnnnnnnnnnnnnnnnnnnnnnnnnnnnnnnnnnnnnnnnnnnnnnnnnnnnnnnnnnnnnnnnnnnnnnnnnnnnnnnnnnnnnnnnnnnnnnnnnnnnnnnnnnnnnnnnnnnnnnnnnnnnnnnnnnnnnnnnnnnnnnnnnnnnnnnnnnnnnnnnnnnnnnnnnnnnnnnnnnnnnnnnnnnnnnnnnnnnnnnnnnnnnnnnnnnnnnnnnnnnnnnnnnnnnnnnnnnnnnnnnnnnnnnnnnnnnnnnnnnnnnnnnnnnnnnnnnnnnnnnnnnnnnnnnnnnnnnnnnnnnnnnnnnnnnnnnnnnnnnnnnnnnnnnnnnnnnnnnnnnnnnnnnnnnnnnnnnnnnnnnnnnnnnnnnnnnnnnnnnnnnnnnnnnnnnnnnnnnnnnnnnnnnnnnnnnnnnnnnnnnnnnnnnnnnnnnnnnnnnnnnnnnnnnnnnnnnnnnnnnnnnnnnnnnnnnnnnnnnnnnnnnnnnnnnnnnnnnnnnnnnnnnnnnnnnnnnnnnnnnnnnnnnnnnnnnnnnnnnnnnnnnnnnnnnnnnnnnnnnnnnnnnnnnnnnnnnnnnnnnnnnnnnnnnnnnnnnnnnnnnnnnnnnnnnnnnnnnnnnnnnnnnnnnnnnnnnnnnnnnnnnnnnnnnnnnnnnnnnnnnnnnnnnnnnnnnnnnnnnnnnnnnnnnnnnnnnnnnnnnnnnnnnnnnnnnnnnnnnnnnnnnnnnnnnnnnnnnnnnnnnnnnnnnnnnnnnnnnnnnnnnnnnnnnnnnnnnnnnnnnnnnnnnnnnnnnnnnnnnnnnnnnnnnnnnnnnnnnnnnnnnnnnnnnnnnnnnnnnnnnnnnnnnnnnnnnnnnnnnnnnnnnnnnnnnnnnnnnnnnnnnnnnnnnnnnnnnnnnnnnnnnnnnnnnnnnnnnnnnnnnnnnnnnnnnnnnnnnnnnnnnnnnnnnnnnnnnnnnnnnnnnnnnnnnnnnnnnnnnnnnnnnnnnnnnnnnnnnnnnnnnnnnnnnnnnnnnnnnnnnnnnnnnnnnnnnnnnnnnnnnnnnnnnnnnnnnnnnnnnnnnnnnnnnnnnnnnnnnnnnnnnnnnnnnnnnnnnnnnnnnnnnnnnnnnnnnnnnnnnnnnnnnnnnnnnnnnnnnnnnnnnnnnnnnnnnnnnnnnnnnnnnnnnnnnnnnnnnnnnnnnnnnnnnnnnnnnnnnnnnnnnnnnnnnnnnnnnnnnnnnnnnnnnnnnnnnnnnnnnnnnnnnnnnnnnnnnnnnnnnnnnnnnnnnnnnnnnnnnnnnnnnnnnnnnnnnnnnnnnnnnnnnnnnnnnnnnnnnnnnnnnnnnnnnnnnnnnnnnnnnnnnnnnnnnnnnnnnnnnnnnnnnnnnnnnnnnnnnnnnnnnnnnnnnnnnnnnnnnnnnnnnnnnnnnnnnnnnnnnnnnnnnnnnnnnnnnnnnnnnnnnnnnnnnnnnnnnnnnnnnnnnnnnnnnnnnnnnnnnnnnnnnnnnnnnnnnnnnnnnnnnnnnnnnnnnnnnnnnnnnnnnnnnnnnnnnnnnnnnnnnnnnnnnnnnnnnnnnnnnnnnnnnnnnnnnnnnnnnnnnnnnnnnnnnnnnnnnnnnnnnnnnnnnnnnnnnnnnnnnnnnnnnnnnnnnnnnnnnnnnnnnnnnnnnnnnnnnnnnnnnnnnnnnnnnnnnnnnnnnnnnnnnnnnnnnnnnnnnnnnnnnnnnnnnnnnnnnnnnnnnnnnnnnnnnnnnnnnnnnnnnnnnnnnnnnnnnnnnnnnnnnnnnnnnnnnnnnnnnnnnnnnnnnnnnnnnnnnnnnnnnnnnnnnnnnnnnnnnnnnnnnnnnnnnnnnnnnnnnnnnnnnnnnnnnnnnnnnnnnnnnnnnnnnnnnnnnnnnnnnnnnnnnnnnnnnnnnnnnnnnnnnnnnnnnnnnnnnnnnnnnnnnnnnnnnnnnnnnnnnnnnnnnnnnnnnnnnnnnnnnnnnnnnnnnnnnnnnnnnnnnnnnnnnnnnnnnnnnnnnnnnnnnnnnnnnnnnnnnnnnnnnnnnnnnnnnnnnnnnnnnnnnnnnnnnnnnnnnnnnnnnnnnnnnnnnnnnnnnnnnnnnnnnnnnnnnnnnnnnnnnnnnnnnnnnnnnnnnnnnnnnnnnnnnnnnnnnnnnnnnnnnnnnnnnnnnnnnnnnnnnnnnnnnnnnnnnnnnnnnnnnnnnnnnnnnnnnnnnnnnnnnnnnnnnnnnnnnnnnnnnnnnnnnnnnnnnnnnnnnnnnnnnnnnnnnnnnnnnnnnnnnnnnnnnnnnnnnnnnnnnnnnnnnnnnnnnnnnnnnnnnnnnnnnnnnnnnnnnnnnnnnnnnnnnnnnnnnnnnnnnnnnnnnnnnnnnnnnnnnnnnnnnnnnnnnnnnnnnnnnnnnnnnnnnnnnnnnnnnnnnnnnnnnnnnnnnnnnnnnnnnnnnnnnnnnnnnnnnnnnnnnnnnnnnnnnnnnnnnnnnnnnnnnnnnnnnnnnnnnnnnnnnnnnnnnnnnnnnnnnnnnnnnnnnnnnnnnnnnnnnnnnnnnnnnnnnnnnnnnnnnnnnnnnnnnnnnnnnnnnnnnnnnnnnnnnnnnnnnnnnnnnnnnnnnnnnnnnnnnnnnnnnnnnnnnnnnnnnnnnnnnnnnnnnnnnnnnnnnnnnnnnnnnnnnnnnnnnnnnnnnnnnnnnnnnnnnnnnnnnnnnnnnnnnnnnnnnnnnnnnnnnnnnnnnnnnnnnnnnnnnnnnnnnnnnnnnnnnnnnnnnnnnnnnnnnnnnnnnnnnnnnnnnnnnnnnnnnnnnnnnnnnnnnnnnnnnnnnnnnnnnnnnnnnnnnnnnnnnnnnnnnnnnnnnnnnnnnnnnnnnnnnnnnnnnnnnnnnnnnnnnnnnnnnnnnnnnnnnnnnnnnnnnnnnnnnnnnnnnnnnnnnnnnnnnnnnnnnnnnnnnnnnnnnnnnnnnnnnnnnnnnnnnnnnnnnnnnnnnnnnnnnnnnnnnnnnnnnnnnnnnnnnnnnnnnnnnnnnnnnnnnnnnnnnnnnnnnnnnnnnnnnnnnnnnnnnnnnnnnnnnnnnnnnnnnnnnnnnnnnnnnnnnnnnnnnnnnnnnnnnnnnnnnnnnnnnnnnnnnnnnnnnnnnnnnnnnnnnnnnnnnnnnnnnnnnnnnnnnnnnnnnnnnnnnnnnnnnnnnnnnnnnnnnnnnnnnnnnnnnnnnnnnnnnnnnnnnnnnnnnnnnnnnnnnnnnnnnnnnnnnnnnnnnnnnnnnnnnnnnnnnnnnnnnnnnnnnnnnnnnnnnnnnnnnnnnnnnnnnnnnnnnnnnnnnnnnnnnnnnnnnnnnnnnnnnnnnnnnnnnnnnnnnnnnnnnnnnnnnnnnnnnnnnnnnnnnnnnnnnnnnnnnnnnnnnnnnnnnnnnnnnnnnnnnnnnnnnnnnnnnnnnnnnnnnnnnnnnnnnnnnnnnnnnnnnnnnnnnnnnnnnnnnnnnnnnnnnnnnnnnnnnnnnnnnnnnnnnnnnnnnnnnnnnnnnnnnnnnnnnnnnnnnnnnnnnnnnnnnnnnnnnnnnnnnnnnnnnnnnnnnnnnnnnnnnnnnnnnnnnnnnnnnnnnnnnnnnnnnnnnnnnnnnnnnnnnnnnnnnnnnnnnnnnnnnnnnnnnnnnnnnnnnnnnnnnnnnnnnnnnnnnnnnnnnnnnnnnnnnnnnnnnnnnnnnnnnnnnnnnnnnnnnnnnnnnnnnnnnnnnnnnnnnnnnnnnnnnnnnnnnnnnnnnnnnnnnnnnnnnnnnnnnnnnnnnnnnnnnnnnnnnnnnnnnnnnnnnnnnnnnnnnnnnnnnnnnnnnnnnnnnnnnnnnnnnnnnnnnnnnnnnnnnnnnnnnnnnnnnnnnnnnnnnnnnnnnnnnnnnnnnnnnnnnnnnnnnnnnnnnnnnnnnnnnnnnnnnnnnnnnnnnnnnnnnnnnnnnnnnnnnnnnnnnnnnnnnnnnnnnnnnnnnnnnnnnnnnnnnnnnnnnnnnnnnnnnnnnnnnnnnnnnnnnnnnnnnnnnnnnnnnnnnnnnnnnnnnnnnnnnnnnnnnnnnnnnnnnnnnnnnnnnnnnnnnnnnnnnnnnnnnnnnnnnnnnnnnnnnnnnnnnnnnnnnnnnnnnnnnnnnnnnnnnnnnnnnnnnnnnnnnnnnnnnnnnnnnnnnnnnnnnnnnnnnnnnnnnnnnnnnnnnnnnnnnnnnnnnnnnnnnnnnnnnnnnnnnnnnnnnnnnnnnnnnnnnnnnnnnnnnnnnnnnnnnnnnnnnnnnnnnnnnnnnnnnnnnnnnnnnnnnnnnnnnnnnnnnnnnnnnnnnnnnnnnnnnnnnnnnnnnnnnnnnnnnnnnnnnnnnnnnnnnnnnnnnnnnnnnnnnnnnnnnnnnnnnnnnnnnnnnnnnnnnnnnnnnnnnnnnnnnnnnnnnnnnnnnnnnnnnnnnnnnnnnnnnnnnnnnnnnnnnnnnnnnnnnnnnnnnnnnnnnnnnnnnnnnnnnnnnnnnnnnnnnnnnnnnnnnnnnnnnnnnnnnnnnnnnnnnnnnnnnnnnnnnnnnnnnnnnnnnnnnnnnnnnnnnnnnnnnnnnnnnnnnnnnnnnnnnnnnnnnnnnnnnnnnnnnnnnnnnnnnnnnnnnnnnnnnnnnnnnnnnnnnnnnnnnnnnnnnnnnnnnnnnnnnnnnnnnnnnnnnnnnnnnnnnnnnnnnnnnnnnnnnnnnnnnnnnnnnnnnnnnnnnnnnnnnnnnnnnnnnnnnnnnnnnnnnnnnnnnnnnnnnnnnnnnnnnnnnnnnnnnnnnnnnnnnnnnnnnnnnnnnnnnnnnnnnnnnnnnnnnnnnnnnnnnnnnnnnnnnnnnnnnnnnnnnnnnnnnnnnnnnnnnnnnnnnnnnnnnnnnnnnnnnnnnnnnnnnnnnnnnnnnnnnnnnnnnnnnnnnnnnnnnnnnnnnnnnnnnnnnnnnnnnnnnnnnnnnnnnnnnnnnnnnnnnnnnnnnnnnnnnnnnnnnnnnnnnnnnnnnnnnnnnnnnnnnnnnnnnnnnnnnnnnnnnnnnnnnnnnnnnnnnnnnnnnnnnnnnnnnnnnnnnnnnnnnnnnnnnnnnnnnnnnnnnnnnnnnnnnnnnnnnnnnnnnnnnnnnnnnnnnnnnnnnnnnnnnnnnnnnnnnnnnnnnnnnnnnnnnnnnnnnnnnnnnnnnnnnnnnnnnnnnnnnnnnnnnnnnnnnnnnnnnnnnnnnnnnnnnnnnnnnnnnnnnnnnnnnnnnnnnnnnnnnnnnnnnnnnnnnnnnnnnnnnnnnnnnnnnnnnnnnnnnnnnnnnnnnnnnnnnnnnnnnnnnnnnnnnnnnnnnnnnnnnnnnnnnnnnnnnnnnnnnnnnnnnnnnnnnnnnnnnnnnnnnnnnnnnnnnnnnnnnnnnnnnnnnnnnnnnnnnnnnnnnnnnnnnnnnnnnnnnnnnnnnnnnnnnnnnnnnnnnnnnnnnnnnnnnnnnnnnnnnnnnnnnnnnnnnnnnnnnnnnnnnnnnnnnnnnnnnnnnnnnnnnnnnnnnnnnnnnnnnnnnnnnnnnnnnnnnnnnnnnnnnnnnnnnnnnnnnnnnnnnnnnnnnnnnnnnnnnnnnnnnnnnnnnnnnnnnnnnnnnnnnnnnnnnnnnnnnnnnnnnnnnnnnnnnnnnnnnnnnnnnnnnnnnnnnnnnnnnnnnnnnnnnnnnnnnnnnnnnnnnnnnnnnnnnnnnnnnnnnnnnnnnnnnnnnnnnnnnnnnnnnnnnnnnnnnnnnnnnnnnnnnnnnnnnnnnnnnnnnnnnnnnnnnnnnnnnnnnnnnnnnnnnnnnnnnnnnnnnnnnnnnnnnnnnnnnnnnnnnnnnnnnnnnnnnnnnnnnnnnnnnnnnnnnnnnnnnnnnnnnnnnnnnnnnnnnnnnnnnnnnnnnnnnnnnnnnnnnnnnnnnnnnnnnnnnnnnnnnnnnnnnnnnnnnnnnnnnnnnnnnnnnnnnnnnnnnnnnnnnnnnnnnnnnnnnnnnnnnnnnnnnnnnnnnnnnnnnnnnnnnnnnnnnnnnnnnnnnnnnnnnnnnnnnnnnnnnnnnnnnnnnnnnnnnnnnnnnnnnnnnnnnnnnnnnnnnnnnnnnnnnnnnnnnnnnnnnnnnnnnnnnnnnnnnnnnnnnnnnnnnnnnnnnnnnnnnnnnnnnnnnnnnnnnnnnnnnnnnnnnnnnnnnnnnnnnnnnnnnnnnnnnnnnnnnnnnnnnnnnnnnnnnnnnnnnnnnnnnnnnnnnnnnnnnnnnnnnnnnnnnnnnnnnnnnnnnnnnnnnnnnnnnnnnnnnnnnnnnnnnnnnnnnnnnnnnnnnnnnnnnnnnnnnnnnnnnnnnnnnnnnnnnnnnnnnnnnnnnnnnnnnnnnnnnnnnnnnnnnnnnnnnnnnnnnnnnnnnnnnnnnnnnnnnnnnnnnnnnnnnnnnnnnnnnnnnnnnnnnnnnnnnnnnnnnnnnnnnnnnnnnnnnnnnnnnnnnnnnnnnnnnnnnnnnnnnnnnnnnnnnnnnnnnnnnnnnnnnnnnnnnnnnnnnnnnnnnnnnnnnnnnnnnnnnnnnnnnnnnnnnnnnnnnnnnnnnnnnnnnnnnnnnnnnnnnnnnnnnnnnnnnnnnnnnnnnnnnnnnnnnnnnnnnnnnnnnnnnnnnnnnnnnnnnnnnnnnnnnnnnnnnnnnnnnnnnnnnnnnnnnnnnnnnnnnnnnnnnnnnnnnnnnnnnnnnnnnnnnnnnnnnnnnnnnnnnnnnnnnnnnnnnnnnnnnnnnnnnnnnnnnnnnnnnnnnnnnnnnnnnnnnnnnnnnnnnnnnnnnnnnnnnnnnnnnnnnnnnnnnnnnnnnnnnnnnnnnnnnnnnnnnnnnnnnnnnnnnnnnnnnnnnnnnnnnnnnnnnnnnnnnnnnnnnnnnnnnnnnnnnnnnnnnnnnnnnnnnnnnnnnnnnnnnnnnnnnnnnnnnnnnnnnnnnnnnnnnnnnnnnnnnnnnnnnnnnnnnnnnnnnnnnnnnnnnnnnnnnnnnnnnnnnnnnnnnnnnnnnnnnnnnnnnnnnnnnnnnnnnnnnnnnnnnnnnnnnnnnnnnnnnnnnnnnnnnnnnnnnnnnnnnnnnnnnnnnnnnnnnnnnnnnnnnnnnnnnnnnnnnnnnnnnnnnnnnnnnnnnnnnnnnnnnnnnnnnnnnnnnnnnnnnnnnnnnnnnnnnnnnnnnnnnnnnnnnnnnnnnnnnnnnnnnnnnnnnnnnnnnnnnnnnnnnnnnnnnnnnnnnnnnnnnnnnnnnnnnnnnnnnnnnnnnnnnnnnnnnnnnnnnnnnnnnnnnnnnnnnnnnnnnnnnnnnnnnnnnnnnnnnnnnnnnnnnnnnnnnnnnnnnnnnnnnnnnnnnnnnnnnnnnnnnnnnnnnnnnnnnnnnnnnnnnnnnnnnnnnnnnnnnnnnnnnnnnnnnnnnnnnnnnnnnnnnnnnnnnnnnnnnnnnnnnnnnnnnnnnnnnnnnnnnnnnnnnnnnnnnnnnnnnnnnnnnnnnnnnnnnnnnnnnnnnnnnnnnnnnnnnnnnnnnnnnnnnnnnnnnnnnnnnnnnnnnnnnnnnnnnnnnnnnnnnnnnnnnnnnnnnnnnnnnnnnnnnnnnnnnnnnnnnnnnnnnnnnnnnnnnnnnnnnnnnnnnnnnnnnnnnnnnnnnnnnnnnnnnnnnnnnnnnnnnnnnnnnnnnnnnnnnnnnnnnnnnnnnnnnnnnnnnnnnnnnnnnnnnnnnnnnnnnnnnnnnnnnnnnnnnnnnnnnnnnnnnnnnnnnnnnnnnnnnnnnnnnnnnnnnnnnnnnnnnnnnnnnnnnnnnnnnnnnnnnnnnnnnnnnnnnnnnnnnnnnnnnnnnnnnnnnnnnnnnnnnnnnnnnnnnnnnnnnnnnnnnnnnnnnnnnnnnnnnnnnnnnnnnnnnnnnnnnnnnnnnnnnnnnnnnnnnnnnnnnnnnnnnnnnnnnnnnnnnnnnnnnnnnnnnnnnnnnnnnnnnnnnnnnnnnnnnnnnnnnnnnnnnnnnnnnnnnnnnnnnnnnnnnnnnnnnnnnnnnnnnnnnnnnnnnnnnnnnnnnnnnnnnnnnnnnnnnnnnnnnnnnnnnnnnnnnnnnnnnnnnnnnnnnnnnnnnnnnnnnnnnnnnnnnnnnnnnnnnnnnnnnnnnnnnnnnnnnnnnnnnnnnnnnnnnnnnnnnnnnnnnnnnnnnnnnnnnnnnnnnnnnnnnnnnnnnnnnnnnnnnnnnnnnnnnnnnnnnnnnnnnnnnnnnnnnnnnnnnnnnnnnnnnnnnnnnnnnnnnnnnnnnnnnnnnnnnnnnnnnnnnnnnnnnnnnnnnnnnnnnnnnnnnnnnnnnnnnnnnnnnnnnnnnnnnnnnnnnnnnnnnnnnnnnnnnnnnnnnnnnnnnnnnnnnnnnnnnnnnnnnnnnnnnnnnnnnnnnnnnnnnnnnnnnnnnnnnnnnnnnnnnnnnnnnnnnnnnnnnnnnnnnnnnnnnnnnnnnnnnnnnnnnnnnnnnnnnnnnnnnnnnnnnnnnnnnnnnnnnnnnnnnnnnnnnnnnnnnnnnnnnnnnnnnnnnnnnnnnnnnnnnnnnnnnnnnnnnnnnnnnnnnnnnnnnnnnnnnnnnnnnnnnnnnnnnnnnnnnnnnnnnnnnnnnnnnnnnnnnnnnnnnnnnnnnnnnnnnnnnnnnnnnnnnnnnnnnnnnnnnnnnnnnnnnnnnnnnnnnnnnnnnnnnnnnnnnnnnnnnnnnnnnnnnnnnnnnnnnnnnnnnnnnnnnnnnnnnnnnnnnnnnnnnnnnnnnnnnnnnnnnnnnnnnnnnnnnnnnnnnnnnnnnnnnnnnnnnnnnnnnnnnnnnnnnnnnnnnnnnnnnnnnnnnnnnnnnnnnnnnnnnnnnnnnnnnnnnnnnnnnnnnnnnnnnnnnnnnnnnnnnnnnnnnnnnnnnnnnnnnnnnnnnnnnnnnnnnnnnnnnnnnnnnnnnnnnnnnnnnnnnnnnnnnnnnnnnnnnnnnnnnnnnnnnnnnnnnnnnnnnnnnnnnnnnnnnnnnnnnnnnnnnnnnnnnnnnnnnnnnnnnnnnnnnnnnnnnnnnnnnnnnnnnnnnnnnnnnnnnnnnnnnnnnnnnnnnnnnnnnnnnnnnnnnnnnnnnnnnnnnnnnnnnnnnnnnnnnnnnnnnnnnnnnnnnnnnnnnnnnnnnnnnnnnnnnnnnnnnnnnnnnnnnnnnnnnnnnnnnnnnnnnnnnnnnnnnnnnnnnnnnnnnnnnnnnnnnnnnnnnnnnnnnnnnnnnnnnnnnnnnnnnnnnnnnnnnnnnnnnnnnnnnnnnnnnnnnnnnnnnnnnnnnnnnnnnnnnnnnnnnnnnnnnnnnnnnnnnnnnnnnnnnnnnnnnnnnnnnnnnnnnnnnnnnnnnnnnnnnnnnnnnnnnnnnnnnnnnnnnnnnnnnnnnnnnnnnnnnnnnnnnnnnnnnnnnnnnnnnnnnnnnnnnnnnnnnnnnnnnnnnnnnnnnnnnnnnnnnnnnnnnnnnnnnnnnnnnnnnnnnnnnnnnnnnnnnnnnnnnnnnnnnnnnnnnnnnnnnnnnnnnnnnnnnnnnnnnnnnnnnnnnnnnnnnnnnnnnnnnnnnnnnnnnnnnnnnnnnnnnnnnnnnnnnnnnnnnnnnnnnnnnnnnnnnnnnnnnnnnnnnnnnnnnnnnnnnnnnnnnnnnnnnnnnnnnnnnnnnnnnnnnnnnnnnnnnnnnnnnnnnnnnnnnnnnnnnnnnnnnnnnnnnnnnnnnnnnnnnnnnnnnnnnnnnnnnnnnnnnnnnnnnnnnnnnnnnnnnnnnnnnnnnnnnnnnnnnnnnnnnnnnnnnnnnnnnnnnnnnnnnnnnnnnnnnnnnnnnnnnnnnnnnnnnnnnnnnnnnnnnnnnnnnnnnnnnnnnnnnnnnnnnnnnnnnnnnnnnnnnnnnnnnnnnnnnnnnnnnnnnnnnnnnnnnnnnnnnnnnnnnnnnnnnnnnnnnnnnnnnnnnnnnnnnnnnnnnnnnnnnnnnnnnnnnnnnnnnnnnnnnnnnnnnnnnnnnnnnnnnnnnnnnnnnnnnnnnnnnnnnnnnnnnnnnnnnnnnnnnnnnnnnnnnnnnnnnnnnnnnnnnnnnnnnnnnnnnnnnnnnnnnnnnnnnnnnnnnnnnnnnnnnnnnnnnnnnnnnnnnnnnnnnnnnnnnnnnnnnnnnnnnnnnnnnnnnnnnnnnnnnnnnnnnnnnnnnnnnnnnnnnnnnnnnnnnnnnnnnnnnnnnnnnnnnnnnnnnnnnnnnnnnnnnnnnnnnnnnnnnnnnnnnnnnnnnnnnnnnnnnnnnnnnnnnnnnnnnnnnnnnnnnnnnnnnnnnnnnnnnnnnnnnnnnnnnnnnnnnnnnnnnnnnnnnnnnnnnnnnnnnnnnnnnnnnnnnnnnnnnnnnnnnnnnnnnnnnnnnnnnnnnnnnnnnnnnnnnnnnnnnnnnnnnnnnnnnnnnnnnnnnnnnnnnnnnnnnnnnnnnnnnnnnnnnnnnnnnnnnnnnnnnnnnnnnnnnnnnnnnnnnnnnnnnnnnnnnnnnnnnnnnnnnnnnnnnnnnnnnnnnnnnnnnnnnnnnnnnnnnnnnnnnnnnnnnnnnnnnnnnnnnnnnnnnnnnnnnnnnnnnnnnnnnnnnnnnnnnnnnnnnnnnnnnnnnnnnnnnnnnnnnnnnnnnnnnnnnnnnnnnnnnnnnnnnnnnnnnnnnnnnnnnnnnnnnnnnnnnnnnnnnnnnnnnnnnnnnnnnnnnnnnnnnnnnnnnnnnnnnnnnnnnnnnnnnnnnnnnnnnnnnnnnnnnnnnnnnnnnnnnnnnnnnnnnnnnnnnnnnnnnnnnnnnnnnnnnnnnnnnnnnnnnnnnnnnnnnnnnnnnnnnnnnnnnnnnnnnnnnnnnnnnnnnnnnnnnnnnnnnnnnnnnnnnnnnnnnnnnnnnnnnnnnnnnnnnnnnnnnnnnnnnnnnnnnnnnnnnnnnnnnnnnnnnnnnnnnnnnnnnnnnnnnnnnnnnnnnnnnnnnnnnnnnnnnnnnnnnnnnnnnnnnnnnnnnnnnnnnnnnnnnnnnnnnnnnnnnnnnnnnnnnnnnnnnnnnnnnnnnnnnnnnnnnnnnnnnnnnnnnnnnnnnnnnnnnnnnnnnnnnnnnnnnnnnnnnnnnnnnnnnnnnnnnnnnnnnnnnnnnnnnnnnnnnnnnnnnnnnnnnnnnnnnnnnnnnnnnnnnnnnnnnnnnnnnnnnnnnnnnnnnnnnnnnnnnnnnnnnnnnnnnnnnnnnnnnnnnnnnnnnnnnnnnnnnnnnnnnnnnnnnnnnnnnnnnnnnnnnnnnnnnnnnnnnnnnnnnnnnnnnnnnnnnnnnnnnnnnnnnnnnnnnnnnnnnnnnnnnnnnnnnnnnnnnnnnnnnnnnnnnnnnnnnnnnnnnnnnnnnnnnnnnnnnnnnnnnnnnnnnnnnnnnnnnnnnnnnnnnnnnnnnnnnnnnnnnnnnnnnnnnnnnnnnnnnnnnnnnnnnnnnnnnnnnnnnnnnnnnnnnnnnnnnnnnnnnnnnnnnnnnnnnnnnnnnnnnnnnnnnnnnnnnnnnnnnnnnnnnnnnnnnnnnnnnnnnnnnnnnnnnnnnnnnnnnnnnnnnnnnnnnnnnnnnnnnnnnnnnnnnnnnnnnnnnnnnnnnnnnnnnnnnnnnnnnnnnnnnnnnnnnnnnnnnnnnnnnnnnnnnnnnnnnnnnnnnnnnnnnnnnnnnnnnnnnnnnnnnnnnnnnnnnnnnnnnnnnnnnnnnnnnnnnnnnnnnnnnnnnnnnnnnnnnnnnnnnnnnnnnnnnnnnnnnnnnnnnnnnnnnnnnnnnnnnnnnnnnnnnnnnnnnnnnnnnnnnnnnnnnnnnnnnnnnnnnnnnnnnnnnnnnnnnnnnnnnnnnnnnnnnnnnnnnnnnnnnnnnnnnnnnnnnnnnnnnnnnnnnnnnnnnnnnnnnnnnnnnnnnnnnnnnnnnnnnnnnnnnnnnnnnnnnnnnnnnnnnnnnnnnnnnnnnnnnnnnnnnnnnnnnnnnnnnnnnnnnnnnnnnnnnnnnnnnnnnnnnnnnnnnnnnnnnnnnnnnnnnnnnnnnnnnnnnnnnnnnnnnnnnnnnnnnnnnnnnnnnnnnnnnnnnnnnnnnnnnnnnnnnnnnnnnnnnnnnnnnnnnnnnnnnnnnnnnnnnnnnnnnnnnnnnnnnnnnnnnnnnnnnnnnnnnnnnnnnnnnnnnnnnnnnnnnnnnnnnnnnnnnnnnnnnnnnnnnnnnnnnnnnnnnnnnnnnnnnnnnnnnnnnnnnnnnnnnnnnnnnnnnnnnnnnnnnnnnnnnnnnnnnnnnnnnnnnnnnnnnnnnnnnnnnnnnnnnnnnnnnnnnnnnnnnnnnnnnnnnnnnnnnnnnnnnnnnnnnnnnnnnnnnnnnnnnnnnnnnnnnnnnnnnnnnnnnnnnnnnnnnnnnnnnnnnnnnnnnnnnnnnnnnnnnnnnnnnnnnnnnnnnnnnnnnnnnnnnnnnnnnnnnnnnnnnnnnnnnnnnnnnnnnnnnnnnnnnnnnnnnnnnnnnnnnnnnnnnnnnnnnnnnnnnnnnnnnnnnnnnnnnnnnnnnnnnnnnnnnnnnnnnnnnnnnnnnnnnnnnnnnnnnnnnnnnnnnnnnnnnnnnnnnnnnnnnnnnnnnnnnnnnnnnnnnnnnnnnnnnnnnnnnnnnnnnnnnnnnnnnnnnnnnnnnnnnnnnnnnnnnnnnnnnnnnnnnnnnnnnnnnnnnnnnnnnnnnnnnnnnnnnnnnnnnnnnnnnnnnnnnnnnnnnnnnnnnnnnnnnnnnnnnnnnnnnnnnnnnnnnnnnnnnnnnnnnnnnnnnnnnnnnnnnnnnnnnnnnnnnnnnnnnnnnnnnnnnnnnnnnnnnnnnnnnnnnnnnnnnnnnnnnnnnnnnnnnnnnnnnnnnnnnnnnnnnnnnnnnnnnnnnnnnnnnnnnnnnnnnnnnnnnnnnnnnnnnnnnnnnnnnnnnnnnnnnnnnnnnnnnnnnnnnnnnnnnnnnnnnnnnnnnnnnnnnnnnnnnnnnnnnnnnnnnnnnnnnnnnnnnnnnnnnnnnnnnnnnnnnnnnnnnnnnnnnnnnnnnnnnnnnnnnnnnnnnnnnnnnnnnnnnnnnnnnnnnnnnnnnnnnnnnnnnnnnnnnnnnnnnnnnnnnnnnnnnnnnnnnnnnnnnnnnnnnnnnnnnnnnnnnnnnnnnnnnnnnnnnnnnnnnnnnnnnnnnnnnnnnnnnnnnnnnnnnnnnnnnnnnnnnnnnnnnnnnnnnnnnnnnnnnnnnnnnnnnnnnnnnnnnnnnnnnnnnnnnnnnnnnnnnnnnnnnnnnnnnnnnnnnnnnnnnnnnnnnnnnnnnnnnnnnnnnnnnnnnnnnnnnnnnnnnnnnnnnnnnnnnnnnnnnnnnnnnnnnnnnnnnnnnnnnnnnnnnnnnnnnnnnnnnnnnnnnnnnnnnnnnnnnnnnnnnnnnnnnnnnnnnnnnnnnnnnnnnnnnnnnnnnnnnnnnnnnnnnnnnnnnnnnnnnnnnnnnnnnnnnnnnnnnnnnnnnnnnnnnnnnnnnnnnnnnnnnnnnnnnnnnnnnnnnnnnnnnnnnnnnnnnnnnnnnnnnnnnnnnnnnnnnnnnnnnnnnnnnnnnnnnnnnnnnnnnnnnnnnnnnnnnnnnnnnnnnnnnnnnnnnnnnnnnnnnnnnnnnnnnnnnnnnnnnnnnnnnnnnnnnnnnnnnnnnnnnnnnnnnnnnnnnnnnnnnnnnnnnnnnnnnnnnnnnnnnnnnnnnnnnnnnnnnnnnnnnnnnnnnnnnnnnnnnnnnnnnnnnnnnnnnnnnnnnnnnnnnnnnnnnnnnnnnnnnnnnnnnnnnnnnnnnnnnnnnnnnnnnnnnnnnnnnnnnnnnnnnnnnnnnnnnnnnnnnnnnnnnnnnnnnnnnnnnnnnnnnnnnnnnnnnnnnnnnnnnnnnnnnnnnnnnnnnnnnnnnnnnnnnnnnnnnnnnnnnnnnnnnnnnnnnnnnnnnnnnnnnnnnnnnnnnnnnnnnnnnnnnnnnnnnnnnnnnnnnnnnnnnnnnnnnnnnnnnnnnnnnnnnnnnnnnnnnnnnnnnnnnnnnnnnnnnnnnnnnnnnnnnnnnnnnnnnnnnnnnnnnnnnnnnnnnnnnnnnnnnnnnnnnnnnnnnnnnnnnnnnnnnnnnnnnnnnnnnnnnnnnnnnnnnnnnnnnnnnnnnnnnnnnnnnnnnnnnnnnnnnnnnnnnnnnnnnnnnnnnnnnnnnnnnnnnnnnnnnnnnnnnnnnnnnnnnnnnnnnnnnnnnnnnnnnnnnnnnnnnnnnnnnnnnnnnnnnnnnnnnnnnnnnnnnnnnnnnnnnnnnnnnnnnnnnnnnnnnnnnnnnnnnnnnnnnnnnnnnnnnnnnnnnnnnnnnnnnnnnnnnnnnnnnnnnnnnnnnnnnnnnnnnnnnnnnnnnnnnnnnnnnnnnnnnnnnnnnnnnnnnnnnnnnnnnnnnnnnnnnnnnnnnnnnnnnnnnnnnnnnnnnnnnnnnnnnnnnnnnnnnnnnnnnnnnnnnnnnnnnnnnnnnnnnnnnnnnnnnnnnnnnnnnnnnnnnnnnnnnnnnnnnnnnnnnnnnnnnnnnnnnnnnnnnnnnnnnnnnnnnnnnnnnnnnnnnnnnnnnnnnnnnnnnnnnnnnnnnnnnnnnnnnnnnnnnnnnnnnnnnnnnnnnnnnnnnnnnnnnnnnnnnnnnnnnnnnnnnnnnnnnnnnnnnnnnnnnnnnnnnnnnnnnnnnnnnnnnnnnnnnnnnnnnnnnnnnnnnnnnnnnnnnnnnnnnnnnnnnnnnnnnnnnnnnnnnnnnnnnnnnnnnnnnnnnnnnnnnnnnnnnnnnnnnnnnnnnnnnnnnnnnnnnnnnnnnnnnnnnnnnnnnnnnnnnnnnnnnnnnnnnnnnnnnnnnnnnnnnnnnnnnnnnnnnnnnnnnnnnnnnnnnnnnnnnnnnnnnnnnnnnnnnnnnnnnnnnnnnnnnnnnnnnnnnnnnnnnnnnnnnnnnnnnnnnnnnnnnnnnnnnnnnnnnnnnnnnnnnnnnnnnnnnnnnnnnnnnnnnnnnnnnnnnnnnnnnnnnnnnnnnnnnnnnnnnnnnnnnnnnnnnnnnnnnnnnnnnnnnnnnnnnnnnnnnnnnnnnnnnnnnnnnnnnnnnnnnnnnnnnnnnnnnnnnnnnnnnnnnnnnnnnnnnnnnnnnnnnnnnnnnnnnnnnnnnnnnnnnnnnnnnnnnnnnnnnnnnnnnnnnnnnnnnnnnnnnnnnnnnnnnnnnnnnnnnnnnnnnnnnnnnnnnnnnnnnnnnnnnnnnnnnnnnnnnnnnnnnnnnnnnnnnnnnnnnnnnnnnnnnnnnnnnnnnnnnnnnnnnnnnnnnnnnnnnnnnnnnnnnnnnnnnnnnnnnnnnnnnnnnnnnnnnnnnnnnnnnnnnnnnnnnnnnnnnnnnnnnnnnnnnnnnnnnnnnnnnnnnnnnnnnnnnnnnnnnnnnnnnnnnnnnnnnnnnnnnnnnnnnnnnnnnnnnnnnnnnnnnnnnnnnnnnnnnnnnnnnnnnnnnnnnnnnnnnnnnnnnnnnnnnnnnnnnnnnnnnnnnnnnnnnnnnnnnnnnnnnnnnnnnnnnnnnnnnnnnnnnnnnnnnnnnnnnnnnnnnnnnnnnnnnnnnnnnnnnnnnnnnnnnnnnnnnnnnnnnnnnnnnnnnnnnnnnnnnnnnnnnnnnnnnnnnnnnnnnnnnnnnnnnnnnnnnnnnnnnnnnnnnnnnnnnnnnnnnnnnnnnnnnnnnnnnnnnnnnnnnnnnnnnnnnnnnnnnnnnnnnnnnnnnnnnnnnnnnnnnnnnnnnnnnnnnnnnnnnnnnnnnnnnnnnnnnnnnnnnnnnnnnnnnnnnnnnnnnnnnnnnnnnnnnnnnnnnnnnnnnnnnnnnnnnnnnnnnnnnnnnnnnnnnnnnnnnnnnnnnnnnnnnnnnnnnnnnnnnnnnnnnnnnnnnnnnnnnnnnnnnnnnnnnnnnnnnnnnnnnnnnnnnnnnnnnnnnnnnnnnnnnnnnnnnnnnnnnnnnnnnnnnnnnnnnnnnnnnnnnnnnnnnnnnnnnnnnnnnnnnnnnnnnnnnnnnnnnnnnnnnnnnnnnnnnnnnnnnnnnnnnnnnnnnnnnnnnnnnnnnnnnnnnnnnnnnnnnnnnnnnnnnnnnnnnnnnnnnnnnnnnnnnnnnnnnnnnnnnnnnnnnnnnnnnnnnnnnnnnnnnnnnnnnnnnnnnnnnnnnnnnnnnnnnnnnnnnnnnnnnnnnnnnnnnnnnnnnnnnnnnnnnnnnnnnnnnnnnnnnnnnnnnnnnnnnnnnnnnnnnnnnnnnnnnnnnnnnnnnnnnnnnnnnnnnnnnnnnnnnnnnnnnnnnnnnnnnnnnnnnnnnnnnnnnnnnnnnnnnnnnnnnnnnnnnnnnnnnnnnnnnnnnnnnnnnnnnnnnnnnnnnnnnnnnnnnnnnnnnnnnnnnnnnnnnnnnnnnnnnnnnnnnnnnnnnnnnnnnnnnnnnnnnnnnnnnnnnnnnnnnnnnnnnnnnnnnnnnnnnnnnnnnnnnnnnnnnnnnnnnnnnnnnnnnnnnnnnnnnnnnnnnnnnnnnnnnnnnnnnnnnnnnnnnnnnnnnnnnnnnnnnnnnnnnnnnnnnnnnnnnnnnnnnnnnnnnnnnnnnnnnnnnnnnnnnnnnnnnnnnnnnnnnnnnnnnnnnnnnnnnnnnnnnnnnnnnnnnnnnnnnnnnnnnnnnnnnnnnnnnnnnnnnnnnnnnnnnnnnnnnnnnnnnnnnnnnnnnnnnnnnnnnnnnnnnnnnnnnnnnnnnnnnnnnnnnnnnnnnnnnnnnnnnnnnnnnnnnnnnnnnnnnnnnnnnnnnnnnnnnnnnnnnnnnnnnnnnnnnnnnnnnnnnnnnnnnnnnnnnnnnnnnnnnnnnnnnnnnnnnnnnnnnnnnnnnnnnnnnnnnnnnnnnnnnnnnnnnnnnnnnnnnnnnnnnnnnnnnnnnnnnnnnnnnnnnnnnnnnnnnnnnnnnnnnnnnnnnnnnnnnnnnnnnnnnnnnnnnnnnnnnnnnnnnnnnnnnnnnnnnnnnnnnnnnnnnnnnnnnnnnnnnnnnnnnnnnnnnnnnnnnnnnnnnnnnnnnnnnnnnnnnnnnnnnnnnnnnnnnnnnnnnnnnnnnnnnnnnnnnnnnnnnnnnnnnnnnnnnnnnnnnnnnnnnnnnnnnnnnnnnnnnnnnnnnnnnnnnnnnnnnnnnnnnnnnnnnnnnnnnnnnnnnnnnnnnnnnnnnnnnnnnnnnnnnnnnnnnnnnnnnnnnnnnnnnnnnnnnnnnnnnnnnnnnnnnnnnnnnnnnnnnnnnnnnnnnnnnnnnnnnnnnnnnnnnnnnnnnnnnnnnnnnnnnnnnnnnnnnnnnnnnnnnnnnnnnnnnnnnnnnnnnnnnnnnnnnnnnnnnnnnnnnnnnnnnnnnnnnnnnnnnnnnnnnnnnnnnnnnnnnnnnnnnnnnnnnnnnnnnnnnnnnnnnnnnnnnnnnnnnnnnnnnnnnnnnnnnnnnnnnnnnnnnnnnnnnnnnnnnnnnnnnnnnnnnnnnnnnnnnnnnnnnnnnnnnnnnnnnnnnnnnnnnnnnnnnnnnnnnnnnnnnnnnnnnnnnnnnnnnnnnnnnnnnnnnnnnnnnnnnnnnnnnnnnnnnnnnnnnnnnnnnnnnnnnnnnnnnnnnnnnnnnnnnnnnnnnnnnnnnnnnnnnnnnnnnnnnnnnnnnnnnnnnnnnnnnnnnnnnnnnnnnnnnnnnnnnnnnnnnnnnnnnnnnnnnnnnnnnnnnnnnnnnnnnnnnnnnnnnnnnnnnnnnnnnnnnnnnnnnnnnnnnnnnnnnnnnnnnnnnnnnnnnnnnnnnnnnnnnnnnnnnnnnnnnnnnnnnnnnnnnnnnnnnnnnnnnnnnnnnnnnnnnnnnnnnnnnnnnnnnnnnnnnnnnnnnnnnnnnnnnnnnnnnnnnnnnnnnnnnnnnnnnnnnnnnnnnnnnnnnnnnnnnnnnnnnnnnnnnnnnnnnnnnnnnnnnnnnnnnnnnnnnnnnnnnnnnnnnnnnnnnnnnnnnnnnnnnnnnnnnnnnnnnnnnnnnnnnnnnnnnnnnnnnnnnnnnnnnnnnnnnnnnnnnnnnnnnnnnnnnnnnnnnnnnnnnnnnnnnnnnnnnnnnnnnnnnnnnnnnnnnnnnnnnnnnnnnnnnnnnnnnnnnnnnnnnnnnnnnnnnnnnnnnnnnnnnnnnnnnnnnnnnnnnnnnnnnnnnnnnnnnnnnnnnnnnnnnnnnnnnnnnnnnnnnnnnnnnnnnnnnnnnnnnnnnnnnnnnnnnnnnnnnnnnnnnnnnnnnnnnnnnnnnnnnnnnnnnnnnnnnnnnnnnnnnnnnnnnnnnnnnnnnnnnnnnnnnnnnnnnnnnnnnnnnnnnnnnnnnnnnnnnnnnnnnnnnnnnnnnnnnnnnnnnnnnnnnnnnnnnnnnnnnnnnnnnnnnnnnnnnnnnnnnnnnnnnnnnnnnnnnnnnnnnnnnnnnnnnnnnnnnnnnnnnnnnnnnnnnnnnnnnnnnnnnnnnnnnnnnnnnnnnnnnnnnnnnnnnnnnnnnnnnnnnnnnnnnnnnnnnnnnnnnnnnnnnnnnnnnnnnnnnnnnnnnnnnnnnnnnnnnnnnnnnnnnnnnnnnnnnnnnnnnnnnnnnnnnnnnnnnnnnnnnnnnnnnnnnnnnnnnnnnnnnnnnnnnnnnnnnnnnnnnnnnnnnnnnnnnnnnnnnnnnnnnnnnnnnnnnnnnnnnnnnnnnnnnnnnnnnnnnnnnnnnnnnnnnnnnnnnnnnnnnnnnnnnnnnnnnnnnnnnnnnnnnnnnnnnnnnnnnnnnnnnnnnnnnnnnnnnnnnnnnnnnnnnnnnnnnnnnnnnnnnnnnnnnnnnnnnnnnnnnnnnnnnnnnnnnnnnnnnnnnnnnnnnnnnnnnnnnnnnnnnnnnnnnnnnnnnnnnnnnnnnnnnnnnnnnnnnnnnnnnnnnnnnnnnnnnnnnnnnnnnnnnnnnnnnnnnnnnnnnnnnnnnnnnnnnnnnnnnnnnnnnnnnnnnnnnnnnnnnnnnnnnnnnnnnnnnnnnnnnnnnnnnnnnnnnnnnnnnnnnnnnnnnnnnnnnnnnnnnnnnnnnnnnnnnnnnnnnnnnnnnnnnnnnnnnnnnnnnnnnnnnnnnnnnnnnnnnnnnnnnnnnnnnnnnnnnnnnnnnnnnnnnnnnnnnnnnnnnnnnnnnnnnnnnnnnnnnnnnnnnnnnnnnnnnnnnnnnnnnnnnnnnnnnnnnnnnnnnnnnnnnnnnnnnnnnnnnnnnnnnnnnnnnnnnnnnnnnnnnnnnnnnnnnnnnnnnnnnnnnnnnnnnnnnnnnnnnnnnnnnnnnnnnnnnnnnnnnnnnnnnnnnnnnnnnnnnnnnnnnnnnnnnnnnnnnnnnnnnnnnnnnnnnnnnnnnnnnnnnnnnnnnnnnnnnnnnnnnnnnnnnnnnnnnnnnnnnnnnnnnnnnnnnnnnnnnnnnnnnnnnnnnnnnnnnnnnnnnnnnnnnnnnnnnnnnnnnnnnnnnnnnnnnnnnnnnnnnnnnnnnnnnnnnnnnnnnnnnnnnnnnnnnnnnnnnnnnnnnnnnnnnnnnnnnnnnnnnnnnnnnnnnnnnnnnnnnnnnnnnnnnnnnnnnnnnnnnnnnnnnnnnnnnnnnnnnnnnnnnnnnnnnnnnnnnnnnnnnnnnnnnnnnnnnnnnnnnnnnnnnnnnnnnnnnnnnnnnnnnnnnnnnnnnnnnnnnnnnnnnnnnnnnnnnnnnnnnnnnnnnnnnnnnnnnnnnnnnnnnnnnnnnnnnnnnnnnnnnnnnnnnnnnnnnnnnnnnnnnnnnnnnnnnnnnnnnnnnnnnnnnnnnnnnnnnnnnnnnnnnnnnnnnnnnnnnnnnnnnnnnnnnnnnnnnnnnnnnnnnnnnnnnnnnnnnnnnnnnnnnnnnnnnnnnnnnnnnnnnnnnnnnnnnnnnnnnnnnnnnnnnnnnnnnnnnnnnnnnnnnnnnnnnnnnnnnnnnnnnnnnnnnnnnnnnnnnnnnnnnnnnnnnnnnnnnnnnnnnnnnnnnnnnnnnnnnnnnnnnnnnnnnnnnnnnnnnnnnnnnnnnnnnnnnnnnnnnnnnnnnnnnnnnnnnnnnnnnnnnnnnnnnnnnnnnnnnnnnnnnnnnnnnnnnnnnnnnnnnnnnnnnnnnnnnnnnnnnnnnnnnnnnnnnnnnnnnnnnnnnnnnnnnnnnnnnnnnnnnnnnnnnnnnnnnnnnnnnnnnnnnnnnnnnnnnnnnnnnnnnnnnnnnnnnnnnnnnnnnnnnnnnnnnnnnnnnnnnnnnnnnnnnnnnnnnnnnnnnnnnnnnnnnnnnnnnnnnnnnnnnnnnnnnnnnnnnnnnnnnnnnnnnnnnnnnnnnnnnnnnnnnnnnnnnnnnnnnnnnnnnnnnnnnnnnnnnnnnnnnnnnnnnnnnnnnnnnnnnnnnnnnnnnnnnnnnnnnnnnnnnnnnnnnnnnnnnnnnnnnnnnnnnnnnnnnnnnnnnnnnnnnnnnnnnnnnnnnnnnnnnnnnnnnnnnnnnnnnnnnnnnnnnnnnnnnnnnnnnnnnnnnnnnnnnnnnnnnnnnnnnnnnnnnnnnnnnnnnnnnnnnnnnnnnnnnnnnnnnnnnnnnnnnnnnnnnnnnnnnnnnnnnnnnnnnnnnnnnnnnnnnnnnnnnnnnnnnnnnnnnnnnnnnnnnnnnnnnnnnnnnnnnnnnnnnnnnnnnnnnnnnnnnnnnnnnnnnnnnnnnnnnnnnnnnnnnnnnnnnnnnnnnnnnnnnnnnnnnnnnnnnnnnnnnnnnnnnnnnnnnnnnnnnnnnnnnnnnnnnnnnnnnnnnnnnnnnnnnnnnnnnnnnnnnnnnnnnnnnnnnnnnnnnnnnnnnnnnnnnnnnnnnnnnnnnnnnnnnnnnnnnnnnnnnnnnnnnnnnnnnnnnnnnnnnnnnnnnnnnnnnnnnnnnnnnnnnnnnnnnnnnnnnnnnnnnnnnnnnnnnnnnnnnnnnnnnnnnnnnnnnnnnnnnnnnnnnnnnnnnnnnnnnnnnnnnnnnnnnnnnnnnnnnnnnnnnnnnnnnnnnnnnnnnnnnnnnnnnnnnnnnnnnnnnnnnnnnnnnnnnnnnnnnnnnnnnnnnnnnnnnnnnnnnnnnnnnnnnnnnnnnnnnnnnnnnnnnnnnnnnnnnnnnnnnnnnnnnnnnnnnnnnnnnnnnnnnnnnnnnnnnnnnnnnnnnnnnnnnnnnnnnnnnnnnnnnnnnnnnnnnnnnnnnnnnnnnnnnnnnnnnnnnnnnnnnnnnnnnnnnnnnnnnnnnnnnnnnnnnnnnnnnnnnnnnnnnnnnnnnnnnnnnnnnnnnnnnnnnnnnnnnnnnnnnnnnnnnnnnnnnnnnnnnnnnnnnnnnnnnnnnnnnnnnnnnnnnnnnnnnnnnnnnnnnnnnnnnnnnnnnnnnnnnnnnnnnnnnnnnnnnnnnnnnnnnnnnnnnnnnnnnnnnnnnnnnnnnnnnnnnnnnnnnnnnnnnnnnnnnnnnnnnnnnnnnnnnnnnnnnnnnnnnnnnnnnnnnnnnnnnnnnnnnnnnnnnnnnnnnnnnnnnnnnnnnnnnnnnnnnnnnnnnnnnnnnnnnnnnnnnnnnnnnnnnnnnnnnnnnnnnnnnnnnnnnnnnnnnnnnnnnnnnnnnnnnnnnnnnnnnnnnnnnnnnnnnnnnnnnnnnnnnnnnnnnnnnnnnnnnnnnnnnnnnnnnnnnnnnnnnnnnnnnnnnnnnnnnnnnnnnnnnnnnnnnnnnnnnnnnnnnnnnnnnnnnnnnnnnnnnnnnnnnnnnnnnnnnnnnnnnnnnnnnnnnnnnnnnnnnnnnnnnnnnnnnnnnnnnnnnnnnnnnnnnnnnnnnnnnnnnnnnnnnnnnnnnnnnnnnnnnnnnnnnnnnnnnnnnnnnnnnnnnnnnnnnnnnnnnnnnnnnnnnnnnnnnnnnnnnnnnnnnnnnnnnnnnnnnnnnnnnnnnnnnnnnnnnnnnnnnnnnnnnnnnnnnnnnnnnnnnnnnnnnnnnnnnnnnnnnnnnnnnnnnnnnnnnnnnnnnnnnnnnnnnnnnnnnnnnnnnnnnnnnnnnnnnnnnnnnnnnnnnnnnnnnnnnnnnnnnnnnnnnnnnnnnnnnnnnnnnnnnnnnnnnnnnnnnnnnnnnnnnnnnnnnnnnnnnnnnnnnnnnnnnnnnnnnnnnnnnnnnnnnnnnnnnnnnnnnnnnnnnnnnnnnnnnnnnnnnnnnnnnnnnnnnnnnnnnnnnnnnnnnnnnnnnnnnnnnnnnnnnnnnnnnnnnnnnnnnnnnnnnnnnnnnnnnnnnnnnnnnnnnnnnnnnnnnnnnnnnnnnnnnnnnnnnnnnnnnnnnnnnnnnnnnnnnnnnnnnnnnnnnnnnnnnnnnnnnnnnnnnnnnnnnnnnnnnnnnnnnnnnnnnnnnnnnnnnnnnnnnnnnnnnnnnnnnnnnnnnnnnnnnnnnnnnnnnnnnnnnnnnnnnnnnnnnnnnnnnnnnnnnnnnnnnnnnnnnnnnnnnnnnnnnnnnnnnnnnnnnnnnnnnnnnnnnnnnnnnnnnnnnnnnnnnnnnnnnnnnnnnnnnnnnnnnnnnnnnnnnnnnnnnnnnnnnnnnnnnnnnnnnnnnnnnnnnnnnnnnnnnnnnnnnnnnnnnnnnnnnnnnnnnnnnnnnnnnnnnnnnnnnnnnnnnnnnnnnnnnnnnnnnnnnnnnnnnnnnnnnnnnnnnnnnnnnnnnnnnnnnnnnnnnnnnnnnnnnnnnnnnnnnnnnnnnnnnnnnnnnnnnnnnnnnnnnnnnnnnnnnnnnnnnnnnnnnnnnnnnnnnnnnnnnnnnnnnnnnnnnnnnnnnnnnnnnnnnnnnnnnnnnnnnnnnnnnnnnnnnnnnnnnnnnnnnnnnnnnnnnnnnnnnnnnnnnnnnnnnnnnnnnnnnnnnnnnnnnnnnnnnnnnnnnnnnnnnnnnnnnnnnnnnnnnnnnnnnnnnnnnnnnnnnnnnnnnnnnnnnnnnnnnnnnnnnnnnnnnnnnnnnnnnnnnnnnnnnnnnnnnnnnnnnnnnnnnnnnnnnnnnnnnnnnnnnnnnnnnnnnnnnnnnnnnnnnnnnnnnnnnnnnnnnnnnnnnnnnnnnnnnnnnnnnnnnnnnnnnnnnnnnnnnnnnnnnnnnnnnnnnnnnnnnnnnnnnnnnnnnnnnnnnnnnnnnnnnnnnnnnnnnnnnnnnnnnnnnnnnnnnnnnnnnnnnnnnnnnnnnnnnnnnnnnnnnnnnnnnnnnnnnnnnnnnnnnnnnnnnnnnnnnnnnnnnnnnnnnnnnnnnnnnnnnnnnnnnnnnnnnnnnnnnnnnnnnnnnnnnnnnnnnnnnnnnnnnnnnnnnnnnnnnnnnnnnnnnnnnnnnnnnnnnnnnnnnnnnnnnnnnnnnnnnnnnnnnnnnnnnnnnnnnnnnnnnnnnnnnnnnnnnnnnnnnnnnnnnnnnnnnnnnnnnnnnnnnnnnnnnnnnnnnnnnnnnnnnnnnnnnnnnnnnnnnnnnnnnnnnnnnnnnnnnnnnnnnnnnnnnnnnnnnnnnnnnnnnnnnnnnnnnnnnnnnnnnnnnnnnnnnnnnnnnnnnnnnnnnnnnnnnnnnnnnnnnnnnnnnnnnnnnnnnnnnnnnnnnnnnnnnnnnnnnnnnnnnnnnnnnnnnnnnnnnnnnnnnnnnnnnnnnnnnnnnnnnnnnnnnnnnnnnnnnnnnnnnnnnnnnnnnnnnnnnnnnnnnnnnnnnnnnnnnnnnnnnnnnnnnnnnnnnnnnnnnnnnnnnnnnnnnnnnnnnnnnnnnnnnnnnnnnnnnnnnnnnnnnnnnnnnnnnnnnnnnnnnnnnnnnnnnnnnnnnnnnnnnnnnnnnnnnnnnnnnnnnnnnnnnnnnnnnnnnnnnnnnnnnnnnnnnnnnnnnnnnnnnnnnnnnnnnnnnnnnnnnnnnnnnnnnnnnnnnnnnnnnnnnnnnnnnnnnnnnnnnnnnnnnnnnnnnnnnnnnnnnnnnnnnnnnnnnnnnnnnnnnnnnnnnnnnnnnnnnnnnnnnnnnnnnnnnnnnnnnnnnnnnnnnnnnnnnnnnnnnnnnnnnnnnnnnnnnnnnnnnnnnnnnnnnnnnnnnnnnnnnnnnnnnnnnnnnnnnnnnnnnnnnnnnnnnnnnnnnnnnnnnnnnnnnnnnnnnnnnnnnnnnnnnnnnnnnnnnnnnnnnnnnnnnnnnnnnnnnnnnnnnnnnnnnnnnnnnnnnnnnnnnnnnnnnnnnnnnnnnnnnnnnnnnnnnnnnnnnnnnnnnnnnnnnnnnnnnnnnnnnnnnnnnnnnnnnnnnnnnnnnnnnnnnnnnnnnnnnnnnnnnnnnnnnnnnnnnnnnnnnnnnnnnnnnnnnnnnnnnnnnnnnnnnnnnnnnnnnnnnnnnnnnnnnnnnnnnnnnnnnnnnnnnnnnnnnnnnnnnnnnnnnnnnnnnnnnnnnnnnnnnnnnnnnnnnnnnnnnnnnnnnnnnnnnnnnnnnnnnnnnnnnnnnnnnnnnnnnnnnnnnnnnnnnnnnnnnnnnnnnnnnnnnnnnnnnnnnnnnnnnnnnnnnnnnnnnnnnnnnnnnnnnnnnnnnnnnnnnnnnnnnnnnnnnnnnnnnnnnnnnnnnnnnnnnnnnnnnnnnnnnnnnnnnnnnnnnnnnnnnnnnnnnnnnnnnnnnnnnnnnnnnnnnnnnnnnnnnnnnnnnnnnnnnnnnnnnnnnnnnnnnnnnnnnnnnnnnnnnnnnnnnnnnnnnnnnnnnnnnnnnnnnnnnnnnnnnnnnnnnnnnnnnnnnnnnnnnnnnnnnnnnnnnnnnnnnnnnnnnnnnnnnnnnnnnnnnnnnnnnnnnnnnnnnnnnnnnnnnnnnnnnnnnnnnnnnnnnnnnnnnnnnnnnnnnnnnnnnnnnnnnnnnnnnnnnnnnnnnnnnnnnnnnnnnnnnnnnnnnnnnnnnnnnnnnnnnnnnnnnnnnnnnnnnnnnnnnnnnnnnnnnnnnnnnnnnnnnnnnnnnnnnnnnnnnnnnnnnnnnnnnnnnnnnnnnnnnnnnnnnnnnnnnnnnnnnnnnnnnnnnnnnnnnnnnnnnnnnnnnnnnnnnnnnnnnnnnnnnnnnnnnnnnnnnnnnnnnnnnnnnnnnnnnnnnnnnnnnnnnnnnnnnnnnnnnnnnnnnnnnnnnnnnnnnnnnnnnnnnnnnnnnnnnnnnnnnnnnnnnnnnnnnnnnnnnnnnnnnnnnnnnnnnnnnnnnnnnnnnnnnnnnnnnnnnnnnnnnnnnnnnnnnnnnnnnnnnnnnnnnnnnnnnnnnnnnnnnnnnnnnnnnnnnnnnnnnnnnnnnnnnnnnnnnnnnnnnnnnnnnnnnnnnnnnnnnnnnnnnnnnnnnnnnnnnnnnnnnnnnnnnnnnnnnnnnnnnnnnnnnnnnnnnnnnnnnnnnnnnnnnnnnnnnnnnnnnnnnnnnnnnnnnnnnnnnnnnnnnnnnnnnnnnnnnnnnnnnnnnnnnnnnnnnnnnnnnnnnnnnnnnnnnnnnnnnnnnnnnnnnnnnnnnnnnnnnnnnnnnnnnnnnnnnnnnnnnnnnnnnnnnnnnnnnnnnnnnnnnnnnnnnnnnnnnnnnnnnnnnnnnnnnnnnnnnnnnnnnnnnnnnnnnnnnnnnnnnnnnnnnnnnnnnnnnnnnnnnnnnnnnnnnnnnnnnnnnnnnnnnnnnnnnnnnnnnnnnnnnnnnnnnnnnnnnnnnnnnnnnnnnnnnnnnnnnnnnnnnnnnnnnnnnnnnnnnnnnnnnnnnnnnnnnnnnnnnnnnnnnnnnnnnnnnnnnnnnnnnnnnnnnnnnnnnnnnnnnnnnnnnnnnnnnnnnnnnnnnnnnnnnnnnnnnnnnnnnnnnnnnnnnnnnnnnnnnnnnnnnnnnnnnnnnnnnnnnnnnnnnnnnnnnnnnnnnnnnnnnnnnnnnnnnnnnnnnnnnnnnnnnnnnnnnnnnnnnnnnnnnnnnnnnnnnnnnnnnnnnnnnnnnnnnnnnnnnnnnnnnnnnnnnnnnnnnnnnnnnnnnnnnnnnnnnnnnnnnnnnnnnnnnnnnnnnnnnnnnnnnnnnnnnnnnnnnnnnnnnnnnnnnnnnnnnnnnnnnnnnnnnnnnnnnnnnnnnnnnnnnnnnnnnnnnnnnnnnnnnnnnnnnnnnnnnnnnnnnnnnnnnnnnnnnnnnnnnnnnnnnnnnnnnnnnnnnnnnnnnnnnnnnnnnnnnnnnnnnnnnnnnnnnnnnnnnnnnnnnnnnnnnnnnnnnnnnnnnnnnnnnnnnnnnnnnnnnnnnnnnnnnnnnnnnnnnnnnnnnnnnnnnnnnnnnnnnnnnnnnnnnnnnnnnnnnnnnnnnnnnnnnnnnnnnnnnnnnnnnnnnnnnnnnnnnnnnnnnnnnnnnnnnnnnnnnnnnnnnnnnnnnnnnnnnnnnnnnnnnnnnnnnnnnnnnnnnnnnnnnnnnnnnnnnnnnnnnnnnnnnnnnnnnnnnnnnnnnnnnnnnnnnnnnnnnnnnnnnnnnnnnnnnnnnnnnnnnnnnnnnnnnnnnnnnnnnnnnnnnnnnnnnnnnnnnnnnnnnnnnnnnnnnnnnnnnnnnnnnnnnnnnnnnnnnnnnnnnnnnnnnnnnnnnnnnnnnnnnnnnnnnnnnnnnnnnnnnnnnnnnnnnnnnnnnnnnnnnnnnnnnnnnnnnnnnnnnnnnnnnnnnnnnnnnnnnnnnnnnnnnnnnnnnnnnnnnnnnnnnnnnnnnnnnnnnnnnnnnnnnnnnnnnnnnnnnnnnnnnnnnnnnnnnnnnnnnnnnnnnnnnnnnnnnnnnnnnnnnnnnnnnnnnnnnnnnnnnnnnnnnnnnnnnnnnnnnnnnnnnnnnnnnnnnnnnnnnnnnnnnnnnnnnnnnnnnnnnnnnnnnnnnnnnnnnnnnnnnnnnnnnnnnnnnnnnnnnnnnnnnnnnnnnnnnnnnnnnnnnnnnnnnnnnnnnnnnnnnnnnnnnnnnnnnnnnnnnnnnnnnnnnnnnnnnnnnnnnnnnnnnnnnnnnnnnnnnnnnnnnnnnnnnnnnnnnnnnnnnnnnnnnnnnnnnnnnnnnnnnnnnnnnnnnnnnnnnnnnnnnnnnnnnnnnnnnnnnnnnnnnnnnnnnnnnnnnnnnnnnnnnnnnnnnnnnnnnnnnnnnnnnnnnnnnnnnnnnnnnnnnnnnnnnnnnnnnnnnnnnnnnnnnnnnnnnnnnnnnnnnnnnnnnnnnnnnnnnnnnnnnnnnnnnnnnnnnnnnnnnnnnnnnnnnnnnnnnnnnnnnnnnnnnnnnnnnnnnnnnnnnnnnnnnnnnnnnnnnnnnnnnnnnnnnnnnnnnnnnnnnnnnnnnnnnnnnnnnnnnnnnnnnnnnnnnnnnnnnnnnnnnnnnnnnnnnnnnnnnnnnnnnnnnnnnnnnnnnnnnnnnnnnnnnnnnnnnnnnnnnnnnnnnnnnnnnnnnnnnnnnnnnnnnnnnnnnnnnnnnnnnnnnnnnnnnnnnnnnnnnnnnnnnnnnnnnnnnnnnnnnnnnnnnnnnnnnnnnnnnnnnnnnnnnnnnnnnnnnnnnnnnnnnnnnnnnnnnnnnnnnnnnnnnnnnnnnnnnnnnnnnnnnnnnnnnnnnnnnnnnnnnnnnnnnnnnnnnnnnnnnnnnnnnnnnnnnnnnnnnnnnnnnnnnnnnnnnnnnnnnnnnnnnnnnnnnnnnnnnnnnnnnnnnnnnnnnnnnnnnnnnnnnnnnnnnnnnnnnnnnnnnnnnnnnnnnnnnnnnnnnnnnnnnnnnnnnnnnnnnnnnnnnnnnnnnnnnnnnnnnnnnnnnnnnnnnnnnnnnnnnnnnnnnnnnnnnnnnnnnnnnnnnnnnnnnnnnnnnnnnnnnnnnnnnnnnnnnnnnnnnnnnnnnnnnnnnnnnnnnnnnnnnnnnnnnnnnnnnnnnnnnnnnnnnnnnnnnnnnnnnnnnnnnnnnnnnnnnnnnnnnnnnnnnnnnnnnnnnnnnnnnnnnnnnnnnnnnnnnnnnnnnnnnnnnnnnnnnnnnnnnnnnnnnnnnnnnnnnnnnnnnnnnnnnnnnnnnnnnnnnnnnnnnnnnnnnnnnnnnnnnnnnnnnnnnnnnnnnnnnnnnnnnnnnnnnnnnnnnnnnnnnnnnnnnnnnnnnnnnnnnnnnnnnnnnnnnnnnnnnnnnnnnnnnnnnnnnnnnnnnnnnnnnnnnnnnnnnnnnnnnnnnnnnnnnnnnnnnnnnnnnnnnnnnnnnnnnnnnnnnnnnnnnnnnnnnnnnnnnnnnnnnnnnnnnnnnnnnnnnnnnnnnnnnnnnnnnnnnnnnnnnnnnnnnnnnnnnnnnnnnnnnnnnnnnnnnnnnnnnnnnnnnnnnnnnnnnnnnnnnnnnnnnnnnnnnnnnnnnnnnnnnnnnnnnnnnnnnnnnnnnnnnnnnnnnnnnnnnnnnnnnnnnnnnnnnnnnnnnnnnnnnnnnnnnnnnnnnnnnnnnnnnnnnnnnnnnnnnnnnnnnnnnnnnnnnnnnnnnnnnnnnnnnnnnnnnnnnnnnnnnnnnnnnnnnnnnnnnnnnnnnnnnnnnnnnnnnnnnnnnnnnnnnnnnnnnnnnnnnnnnnnnnnnnnnnnnnnnnnnnnnnnnnnnnnnnnnnnnnnnnnnnnnnnnnnnnnnnnnnnnnnnnnnnnnnnnnnnnnnnnnnnnnnnnnnnnnnnnnnnnnnnnnnnnnnnnnnnnnnnnnnnnnnnnnnnnnnnnnnnnnnnnnnnnnnnnnnnnnnnnnnnnnnnnnnnnnnnnnnnnnnnnnnnnnnnnnnnnnnnnnnnnnnnnnnnnnnnnnnnnnnnnnnnnnnnnnnnnnnnnnnnnnnnnnnnnnnnnnnnnnnnnnnnnnnnnnnnnnnnnnnnnnnnnnnnnnnnnnnnnnnnnnnnnnnnnnnnnnnnnnnnnnnnnnnnnnnnnnnnnnnnnnnnnnnnnnnnnnnnnnnnnnnnnnnnnnnnnnnnnnnnnnnnnnnnnnnnnnnnnnnnnnnnnnnnnnnnnnnnnnnnnnnnnnnnnnnnnnnnnnnnnnnnnnnnnnnnnnnnnnnnnnnnnnnnnnnnnnnnnnnnnnnnnnnnnnnnnnnnnnnnnnnnnnnnnnnnnnnnnnnnnnnnnnnnnnnnnnnnnnnnnnnnnnnnnnnnnnnnnnnnnnnnnnnnnnnnnnnnnnnnnnnnnnnnnnnnnnnnnnnnnnnnnnnnnnnnnnnnnnnnnnnnnnnnnnnnnnnnnnnnnnnnnnnnnnnnnnnnnnnnnnnnnnnnnnnnnnnnnnnnnnnnnnnnnnnnnnnnnnnnnnnnnnnnnnnnnnnnnnnnnnnnnnnnnnnnnnnnnnnnnnnnnnnnnnnnnnnnnnnnnnnnnnnnnnnnnnnnnnnnnnnnnnnnnnnnnnnnnnnnnnnnnnnnnnnnnnnnnnnnnnnnnnnnnnnnnnnnnnnnnnnnnnnnnnnnnnnnnnnnnnnnnnnnnnnnnnnnnnnnnnnnnnnnnnnnnnnnnnnnnnnnnnnnnnnnnnnnnnnnnnnnnnnnnnnnnnnnnnnnnnnnnnnnnnnnnnnnnnnnnnnnnnnnnnnnnnnnnnnnnnnnnnnnnnnnnnnnnnnnnnnnnnnnnnnnnnnnnnnnnnnnnnnnnnnnnnnnnnnnnnnnnnnnnnnnnnnnnnnnnnnnnnnnnnnnnnnnnnnnnnnnnnnnnnnnnnnnnnnnnnnnnnnnnnnnnnnnnnnnnnnnnnnnnnnnnnnnnnnnnnnnnnnnnnnnnnnnnnnnnnnnnnnnnnnnnnnnnnnnnnnnnnnnnnnnnnnnnnnnnnnnnnnnnnnnnnnnnnnnnnnnnnnnnnnnnnnnnnnnnnnnnnnnnnnnnnnnnnnnnnnnnnnnnnnnnnnnnnnnnnnnnnnnnnnnnnnnnnnnnnnnnnnnnnnnnnnnnnnnnnnnnnnnnnnnnnnnnnnnnnnnnnnnnnnnnnnnnnnnnnnnnnnnnnnnnnnnnnnnnnnnnnnnnnnnnnnnnnnnnnnnnnnnnnnnnnnnnnnnnnnnnnnnnnnnnnnnnnnnnnnnnnnnnnnnnnnnnnnnnnnnnnnnnnnnnnnnnnnnnnnnnnnnnnnnnnnnnnnnnnnnnnnnnnnnnnnnnnnnnnnnnnnnnnnnnnnnnnnnnnnnnnnnnnnnnnnnnnnnnnnnnnnnnnnnnnnnnnnnnnnnnnnnnnnnnnnnnnnnnnnnnnnnnnnnnnnnnnnnnnnnnnnnnnnnnnnnnnnnnnnnnnnnnnnnnnnnnnnnnnnnnnnnnnnnnnnnnnnnnnnnnnnnnnnnnnnnnnnnnnnnnnnnnnnnnnnnnnnnnnnnnnnnnnnnnnnnnnnnnnnnnnnnnnnnnnnnnnnnnnnnnnnnnnnnnnnnnnnnnnnnnnnnnnnnnnnnnnnnnnnnnnnnnnnnnnnnnnnnnnnnnnnnnnnnnnnnnnnnnnnnnnnnnnnnnnnnnnnnnnnnnnnnnnnnnnnnnnnnnnnnnnnnnnnnnnnnnnnnnnnnnnnnnnnnnnnnnnnnnnnnnnnnnnnnnnnnnnnnnnnnnnnnnnnnnnnnnnnnnnnnnnnnnnnnnnnnnnnnnnnnnnnnnnnnnnnnnnnnnnnnnnnnnnnnnnnnnnnnnnnnnnnnnnnnnnnnnnnnnnnnnnnnnnnnnnnnnnnnnnnnnnnnnnnnnnnnnnnnnnnnnnnnnnnnnnnnnnnnnnnnnnnnnnnnnnnnnnnnnnnnnnnnnnnnnnnnnnnnnnnnnnnnnnnnnnnnnnnnnnnnnnnnnnnnnnnnnnnnnnnnnnnnnnnnnnnnnnnnnnnnnnnnnnnnnnnnnnnnnnnnnnnnnnnnnnnnnnnnnnnnnnnnnnnnnnnnnnnnnnnnnnnnnnnnnnnnnnnnnnnnnnnnnnnnnnnnnnnnnnnnnnnnnnnnnnnnnnnnnnnnnnnnnnnnnnnnnnnnnnnnnnnnnnnnnnnnnnnnnnnnnnnnnnnnnnnnnnnnnnnnnnnnnnnnnnnnnnnnnnnnnnnnnnnnnnnnnnnnnnnnnnnnnnnnnnnnnnnnnnnnnnnnnnnnnnnnnnnnnnnnnnnnnnnnnnnnnnnnnnnnnnnnnnnnnnnnnnnnnnnnnnnnnnnnnnnnnnnnnnnnnnnnnnnnnnnnnnnnnnnnnnnnnnnnnnnnnnnnnnnnnnnnnnnnnnnnnnnnnnnnnnnnnnnnnnnnnnnnnnnnnnnnnnnnnnnnnnnnnnnnnnnnnnnnnnnnnnnnnnnnnnnnnnnnnnnnnnnnnnnnnnnnnnnnnnnnnnnnnnnnnnnnnnnnnnnnnnnnnnnnnnnnnnnnnnnnnnnnnnnnnnnnnnnnnnnnnnnnnnnnnnnnnnnnnnnnnnnnnnnnnnnnnnnnnnnnnnnnnnnnnnnnnnnnnnnnnnnnnnnnnnnnnnnnnnnnnnnnnnnnnnnnnnnnnnnnnnnnnnnnnnnnnnnnnnnnnnnnnnnnnnnnnnnnnnnnnnnnnnnnnnnnnnnnnnnnnnnnnnnnnnnnnnnnnnnnnnnnnnnnnnnnnnnnnnnnnnnnnnnnnnnnnnnnnnnnnnnnnnnnnnnnnnnnnnnnnnnnnnnnnnnnnnnnnnnnnnnnnnnnnnnnnnnnnnnnnnnnnnnnnnnnnnnnnnnnnnnnnnnnnnnnnnnnnnnnnnnnnnnnnnnnnnnnnnnnnnnnnnnnnnnnnnnnnnnnnnnnnnnnnnnnnnnnnnnnnnnnnnnnnnnnnnnnnnnnnnnnnnnnnnnnnnnnnnnnnnnnnnnnnnnnnnnnnnnnnnnnnnnnnnnnnnnnnnnnnnnnnnnnnnnnnnnnnnnnnnnnnnnnnnnnnnnnnnnnnnnnnnnnnnnnnnnnnnnnnnnnnnnnnnnnnnnnnnnnnnnnnnnnnnnnnnnnnnnnnnnnnnnnnnnnnnnnnnnnnnnnnnnnnnnnnnnnnnnnnnnnnnnnnnnnnnnnnnnnnnnnnnnnnnnnnnnnnnnnnnnnnnnnnnnnnnnnnnnnnnnnnnnnnnnnnnnnnnnnnnnnnnnnnnnnnnnnnnnnnnnnnnnnnnnnnnnnnnnnnnnnnnnnnnnnnnnnnnnnnnnnnnnnnnnnnnnnnnnnnnnnnnnnnnnnnnnnnnnnnnnnnnnnnnnnnnnnnnnnnnnnnnnnnnnnnnnnnnnnnnnnnnnnnnnnnnnnnnnnnnnnnnnnnnnnnnnnnnnnnnnnnnnnnnnnnnnnnnnnnnnnnnnnnnnnnnnnnnnnnnnnnnnnnnnnnnnnnnnnnnnnnnnnnnnnnnnnnnnnnnnnnnnnnnnnnnnnnnnnnnnnnnnnnnnnnnnnnnnnnnnnnnnnnnnnnnnnnnnnnnnnnnnnnnnnnnnnnnnnnnnnnnnnnnnnnnnnnnnnnnnnnnnnnnnnnnnnnnnnnnnnnnnnnnnnnnnnnnnnnnnnnnnnnnnnnnnnnnnnnnnnnnnnnnnnnnnnnnnnnnnnnnnnnnnnnnnnnnnnnnnnnnnnnnnnnnnnnnnnnnnnnnnnnnnnnnnnnnnnnnnnnnnnnnnnnnnnnnnnnnnnnnnnnnnnnnnnnnnnnnnnnnnnnnnnnnnnnnnnnnnnnnnnnnnnnnnnnnnnnnnnnnnnnnnnnnnnnnnnnnnnnnnnnnnnnnnnnnnnnnnnnnnnnnnnnnnnnnnnnnnnnnnnnnnnnnnnnnnnnnnnnnnnnnnnnnnnnnnnnnnnnnnnnnnnnnnnnnnnnnnnnnnnnnnnnnnnnnnnnnnnnnnnnnnnnnnnnnnnnnnnnnnnnnnnnnnnnnnnnnnnnnnnnnnnnnnnnnnnnnnnnnnnnnnnnnnnnnnnnnnnnnnnnnnnnnnnnnnnnnnnnnnnnnnnnnnnnnnnnnnnnnnnnnnnnnnnnnnnnnnnnnnnnnnnnnnnnnnnnnnnnnnnnnnnnnnnnnnnnnnnnnnnnnnnnnnnnnnnnnnnnnnnnnnnnnnnnnnnnnnnnnnnnnnnnnnnnnnnnnnnnnnnnnnnnnnnnnnnnnnnnnnnnnnnnnnnnnnnnnnnnnnnnnnnnnnnnnnnnnnnnnnnnnnnnnnnnnnnnnnnnnnnnnnnnnnnnnnnnnnnnnnnnnnnnnnnnnnnnnnnnnnnnnnnnnnnnnnnnnnnnnnnnnnnnnnnnnnnnnnnnnnnnnnnnnnnnnnnnnnnnnnnnnnnnnnnnnnnnnnnnnnnnnnnnnnnnnnnnnnnnnnnnnnnnnnnnnnnnnnnnnnnnnnnnnnnnnnnnnnnnnnnnnnnnnnnnnnnnnnnnnnnnnnnnnnnnnnnnnnnnnnnnnnnnnnnnnnnnnnnnnnnnnnnnnnnnnnnnnnnnnnnnnnnnnnnnnnnnnnnnnnnnnnnnnnnnnnnnnnnnnnnnnnnnnnnnnnnnnnnnnnnnnnnnnnnnnnnnnnnnnnnnnnnnnnnnnnnnnnnnnnnnnnnnnnnnnnnnnnnnnnnnnnnnnnnnnnnnnnnnnnnnnnnnnnnnnnnnnnnnnnnnnnnnnnnnnnnnnnnnnnnnnnnnnnnnnnnnnnnnnnnnnnnnnnnnnnnnnnnnnnnnnnnnnnnnnnnnnnnnnnnnnnnnnnnnnnnnnnnnnnnnnnnnnnnnnnnnnnnnnnnnnnnnnnnnnnnnnnnnnnnnnnnnnnnnnnnnnnnnnnnnnnnnnnnnnnnnnnnnnnnnnnnnnnnnnnnnnnnnnnnnnnnnnnnnnnnnnnnnnnnnnnnnnnnnnnnnnnnnnnnnnnnnnnnnnnnnnnnnnnnnnnnnnnnnnnnnnnnnnnnnnnnnnnnnnnnnnnnnnnnnnnnnnnnnnnnnnnnnnnnnnnnnnnnnnnnnnnnnnnnnnnnnnnnnnnnnnnnnnnnnnnnnnnnnnnnnnnnnnnnnnnnnnnnnnnnnnnnnnnnnnnnnnnnnnnnnnnnnnnnnnnnnnnnnnnnnnnnnnnnnnnnnnnnnnnnnnnnnnnnnnnnnnnnnnnnnnnnnnnnnnnnnnnnnnnnnnnnnnnnnnnnnnnnnnnnnnnnnnnnnnnnnnnnnnnnnnnnnnnnnnnnnnnnnnnnnnnnnnnnnnnnnnnnnnnnnnnnnnnnnnnnnnnnnnnnnnnnnnnnnnnnnnnnnnnnnnnnnnnnnnnnnnnnnnnnnnnnnnnnnnnnnnnnnnnnnnnnnnnnnnnnnnnnnnnnnnnnnnnnnnnnnnnnnnnnnnnnnnnnnnnnnnnnnnnnnnnnnnnnnnnnnnnnnnnnnnnnnnnnnnnnnnnnnnnnnnnnnnnnnnnnnnnnnnnnnnnnnnnnnnnnnnnnnnnnnnnnnnnnnnnnnnnnnnnnnnnnnnnnnnnnnnnnnnnnnnnnnnnnnnnnnnnnnnnnnnnnnnnnnnnnnnnnnnnnnnnnnnnnnnnnnnnnnnnnnnnnnnnnnnnnnnnnnnnnnnnnnnnnnnnnnnnnnnnnnnnnnnnnnnnnnnnnnnnnnnnnnnnnnnnnnnnnnnnnnnnnnnnnnnnnnnnnnnnnnnnnnnnnnnnnnnnnnnnnnnnnnnnnnnnnnnnnnnnnnnnnnnnnnnnnnnnnnnnnnnnnnnnnnnnnnnnnnnnnnnnnnnnnnnnnnnnnnnnnnnnnnnnnnnnnnnnnnnnnnnnnnnnnnnnnnnnnnnnnnnnnnnnnnnnnnnnnnnnnnnnnnnnnnnnnnnnnnnnnnnnnnnnnnnnnnnnnnnnnnnnnnnnnnnnnnnnnnnnnnnnnnnnnnnnnnnnnnnnnnnnnnnnnnnnnnnnnnnnnnnnnnnnnnnnnnnnnnnnnnnnnnnnnnnnnnnnnnnnnnnnnnnnnnnnnnnnnnnnnnnnnnnnnnnnnnnnnnnnnnnnnnnnnnnnnnnnnnnnnnnnnnnnnnnnnnnnnnnnnnnnnnnnnnnnnnnnnnnnnnnnnnnnnnnnnnnnnnnnnnnnnnnnnnnnnnnnnnnnnnnnnnnnnnnnnnnnnnnnnnnnnnnnnnnnnnnnnnnnnnnnnnnnnnnnnnnnnnnnnnnnnnnnnnnnnnnnnnnnnnnnnnnnnnnnnnnnnnnnnnnnnnnnnnnnnnnnnnnnnnnnnnnnnnnnnnnnnnnnnnnnnnnnnnnnnnnnnnnnnnnnnnnnnnnnnnnnnnnnnnnnnnnnnnnnnnnnnnnnnnnnnnnnnnnnnnnnnnnnnnnnnnnnnnnnnnnnnnnnnnnnnnnnnnnnnnnnnnnnnnnnnnnnnnnnnnnnnnnnnnnnnnnnnnnnnnnnnnnnnnnnnnnnnnnnnnnnnnnnnnnnnnnnnnnnnnnnnnnnnnnnnnnnnnnnnnnnnnnnnnnnnnnnnnnnnnnnnnnnnnnnnnnnnnnnnnnnnnnnnnnnnnnnnnnnnnnnnnnnnnnnnnnnnnnnnnnnnnnnnnnnnnnnnnnnnnnnnnnnnnnnnnnnnnnnnnnnnnnnnnnnnnnnnnnnnnnnnnnnnnnnnnnnnnnnnnnnnnnnnnnnnnnnnnnnnnnnnnnnnnnnnnnnnnnnnnnnnnnnnnnnnnnnnnnnnnnnnnnnnnnnnnnnnnnnnnnnnnnnnnnnnnnnnnnnnnnnnnnnnnnnnnnnnnnnnnnnnnnnnnnnnnnnnnnnnnnnnnnnnnnnnnnnnnnnnnnnnnnnnnnnnnnnnnnnnnnnnnnnnnnnnnnnnnnnnnnnnnnnnnnnnnnnnnnnnnnnnnnnnnnnnnnnnnnnnnnnnnnnnnnnnnnnnnnnnnnnnnnnnnnnnnnnnnnnnnnnnnnnnnnnnnnnnnnnnnnnnnnnnnnnnnnnnnnnnnnnnnnnnnnnnnnnnnnnnnnnnnnnnnnnnnnnnnnnnnnnnnnnnnnnnnnnnnnnnnnnnnnnnnnnnnnnnnnnnnnnnnnnnnnnnnnnnnnnnnnnnnnnnnnnnnnnnnnnnnnnnnnnnnnnnnnnnnnnnnnnnnnnnnnnnnnnnnnnnnnnnnnnnnnnnnnnnnnnnnnnnnnnnnnnnnnnnnnnnnnnnnnnnnnnnnnnnnnnnnnnnnnnnnnnnnnnnnnnnnnnnnnnnnnnnnnnnnnnnnnnnnnnnnnnnnnnnnnnnnnnnnnnnnnnnnnnnnnnnnnnnnnnnnnnnnnnnnnnnnnnnnnnnnnnnnnnnnnnnnnnnnnnnnnnnnnnnnnnnnnnnnnnnnnnnnnnnnnnnnnnnnnnnnnnnnnnnnnnnnnnnnnnnnnnnnnnnnnnnnnnnnnnnnnnnnnnnnnnnnnnnnnnnnnnnnnnnnnnnnnnnnnnnnnnnnnnnnnnnnnnnnnnnnnnnnnnnnnnnnnnnnnnnnnnnnnnnnnnnnnnnnnnnnnnnnnnnnnnnnnnnnnnnnnnnnnnnnnnnnnnnnnnnnnnnnnnnnnnnnnnnnnnnnnnnnnnnnnnnnnnnnnnnnnnnnnnnnnnnnnnnnnnnnnnnnnnnnnnnnnnnnnnnnnnnnnnnnnnnnnnnnnnnnnnnnnnnnnnnnnnnnnnnnnnnnnnnnnnnnnnnnnnnnnnnnnnnnnnnnnnnnnnnnnnnnnnnnnnnnnnnnnnnnnnnnnnnnnnnnnnnnnnnnnnnnnnnnnnnnnnnnnnnnnnnnnnnnnnnnnnnnnnnnnnnnnnnnnnnnnnnnnnnnnnnnnnnnnnnnnnnnnnnnnnnnnnnnnnnnnnnnnnnnnnnnnnnnnnnnnnnnnnnnnnnnnnnnnnnnnnnnnnnnnnnnnnnnnnnnnnnnnnnnnnnnnnnnnnnnnnnnnnnnnnnnnnnnnnnnnnnnnnnnnnnnnnnnnnnnnnnnnnnnnnnnnnnnnnnnnnnnnnnnnnnnnnnnnnnnnnnnnnnnnnnnnnnnnnnnnnnnnnnnnnnnnnnnnnnnnnnnnnnnnnnnnnnnnnnnnnnnnnnnnnnnnnnnnnnnnnnnnnnnnnnnnnnnnnnnnnnnnnnnnnnnnnnnnnnnnnnnnnnnnnnnnnnnnnnnnnnnnnnnnnnnnnnnnnnnnnnnnnnnnnnnnnnnnnnnnnnnnnnnnnnnnnnnnnnnnnnnnnnnnnnnnnnnnnnnnnnnnnnnnnnnnnnnnnnnnnnnnnnnnnnnnnnnnnnnnnnnnnnnnnnnnnnnnnnnnnnnnnnnnnnnnnnnnnnnnnnnnnnnnnnnnnnnnnnnnnnnnnnnnnnnnnnnnnnnnnnnnnnnnnnnnnnnnnnnnnnnnnnnnnnnnnnnnnnnnnnnnnnnnnnnnnnnnnnnnnnnnnnnnnnnnnnnnnnnnnnnnnnnnnnnnnnnnnnnnnnnnnnnnnnnnnnnnnnnnnnnnnnnnnnnnnnnnnnnnnnnnnnnnnnnnnnnnnnnnnnnnnnnnnnnnnnnnnnnnnnnnnnnnnnnnnnnnnnnnnnnnnnnnnnnnnnnnnnnnnnnnnnnnnnnnnnnnnnnnnnnnnnnnnnnnnnnnnnnnnnnnnnnnnnnnnnnnnnnnnnnnnnnnnnnnnnnnnnnnnnnnnnnnnnnnnnnnnnnnnnnnnnnnnnnnnnnnnnnnnnnnnnnnnnnnnnnnnnnnnnnnnnnnnnnnnnnnnnnnnnnnnnnnnnnnnnnnnnnnnnnnnnnnnnnnnnnnnnnnnnnnnnnnnnnnnnnnnnnnnnnnnnnnnnnnnnnnnnnnnnnnnnnnnnnnnnnnnnnnnnnnnnnnnnnnnnnnnnnnnnnnnnnnnnnnnnnnnnnnnnnnnnnnnnnnnnnnnnnnnnnnnnnnnnnnnnnnnnnnnnnnnnnnnnnnnnnnnnnnnnnnnnnnnnnnnnnnnnnnnnnnnnnnnnnnnnnnnnnnnnnnnnnnnnnnnnnnnnnnnnnnnnnnnnnnnnnnnnnnnnnnnnnnnnnnnnnnnnnnnnnnnnnnnnnnnnnnnnnnnnnnnnnnnnnnnnnnnnnnnnnnnnnnnnnnnnnnnnnnnnnnnnnnnnnnnnnnnnnnnnnnnnnnnnnnnnnnnnnnnnnnnnnnnnnnnnnnnnnnnnnnnnnnnnnnnnnnnnnnnnnnnnnnnnnnnnnnnnnnnnnnnnnnnnnnnnnnnnnnnnnnnnnnnnnnnnnnnnnnnnnnnnnnnnnnnnnnnnnnnnnnnnnnnnnnnnnnnnnnnnnnnnnnnnnnnnnnnnnnnnnnnnnnnnnnnnnnnnnnnnnnnnnnnnnnnnnnnnnnnnnnnnnnnnnnnnnnnnnnnnnnnnnnnnnnnnnnnnnnnnnnnnnnnnnnnnnnnnnnnnnnnnnnnnnnnnnnnnnnnnnnnnnnnnnnnnnnnnnnnnnnnnnnnnnnnnnnnnnnnnnnnnnnnnnnnnnnnnnnnnnnnnnnnnnnnnnnnnnnnnnnnnnnnnnnnnnnnnnnnnnnnnnnnnnnnnnnnnnnnnnnnnnnnnnnnnnnnnnnnnnnnnnnnnnnnnnnnnnnnnnnnnnnnnnnnnnnnnnnnnnnnnnnnnnnnnnnnnnnnnnnnnnnnnnnnnnnnnnnnnnnnnnnnnnnnnnnnnnnnnnnnnnnnnnnnnnnnnnnnnnnnnnnnnnnnnnnnnnnnnnnnnnnnnnnnnnnnnnnnnnnnnnnnnnnnnnnnnnnnnnnnnnnnnnnnnnnnnnnnnnnnnnnnnnnnnnnnnnnnnnnnnnnnnnnnnnnnnnnnnnnnnnnnnnnnnnnnnnnnnnnnnnnnnnnnnnnnnnnnnnnnnnnnnnnnnnnnnnnnnnnnnnnnnnnnnnnnnnnnnnnnnnnnnnnnnnnnnnnnnnnnnnnnnnnnnnnnnnnnnnnnnnnnnnnnnnnnnnnnnnnnnnnnnnnnnnnnnnnnnnnnnnnnnnnnnnnnnnnnnnnnnnnnnnnnnnnnnnnnnnnnnnnnnnnnnnnnnnnnnnnnnnnnnnnnnnnnnnnnnnnnnnnnnnnnnnnnnnnnnnnnnnnnnnnnnnnnnnnnnnnnnnnnnnnnnnnnnnnnnnnnnnnnnnnnnnnnnnnnnnnnnnnnnnnnnnnnnnnnnnnnnnnnnnnnnnnnnnnnnnnnnnnnnnnnnnnnnnnnnnnnnnnnnnnnnnnnnnnnnnnnnnnnnnnnnnnnnnnnnnnnnnnnnnnnnnnnnnnnnnnnnnnnnnnnnnnnnnnnnnnnnnnnnnnnnnnnnnnnnnnnnnnnnnnnnnnnnnnnnnnnnnnnnnnnnnnnnnnnnnnnnnnnnnnnnnnnnnnnnnnnnnnnnnnnnnnnnnnnnnnnnnnnnnnnnnnnnnnnnnnnnnnnnnnnnnnnnnnnnnnnnnnnnnnnnnnnnnnnnnnnnnnnnnnnnnnnnnnnnnnnnnnnnnnnnnnnnnnnnnnnnnnnnnnnnnnnnnnnnnnnnnnnnnnnnnnnnnnnnnnnnnnnnnnnnnnnnnnnnnnnnnnnnnnnnnnnnnnnnnnnnnnnnnnnnnnnnnnnnnnnnnnnnnnnnnnnnnnnnnnnnnnnnnnnnnnnnnnnnnnnnnnnnnnnnnnnnnnnnnnnnnnnnnnnnnnnnnnnnnnnnnnnnnnnnnnnnnnnnnnnnnnnnnnnnnnnnnnnnnnnnnnnnnnnnnnnnnnnnnnnnnnnnnnnnnnnnnnnnnnnnnnnnnnnnnnnnnnnnnnnnnnnnnnnnnnnnnnnnnnnnnnnnnnnnnnnnnnnnnnnnnnnnnnnnnnnnnnnnnnnnnnnnnnnnnnnnnnnnnnnnnnnnnnnnnnnnnnnnnnnnnnnnnnnnnnnnnnnnnnnnnnnnnnnnnnnnnnnnnnnnnnnnnnnnnnnnnnnnnnnnnnnnnnnnnnnnnnnnnnnnnnnnnnnnnnnnnnnnnnnnnnnnnnnnnnnnnnnnnnnnnnnnnnnnnnnnnnnnnnnnnnnnnnnnnnnnnnnnnnnnnnnnnnnnnnnnnnnnnnnnnnnnnnnnnnnnnnnnnnnnnnnnnnnnnnnnnnnnnnnnnnnnnnnnnnnnnnnnnnnnnnnnnnnnnnnnnnnnnnnnnnnnnnnnnnnnnnnnnnnnnnnnnnnnnnnnnnnnnnnnnnnnnnnnnnnnnnnnnnnnnnnnnnnnnnnnnnnnnnnnnnnnnnnnnnnnnnnnnnnnnnnnnnnnnnnnnnnnnnnnnnnnnnnnnnnnnnnnnnnnnnnnnnnnnnnnnnnnnnnnnnnnnnnnnnnnnnnnnnnnnnnnnnnnnnnnnnnnnnnnnnnnnnnnnnnnnnnnnnnnnnnnnnnnnnnnnnnnnnnnnnnnnnnnnnnnnnnnnnnnnnnnnnnnnnnnnnnnnnnnnnnnnnnnnnnnnnnnnnnnnnnnnnnnnnnnnnnnnnnnnnnnnnnnnnnnnnnnnnnnnnnnnnnnnnnnnnnnnnnnnnnnnnnnnnnnnnnnnnnnnnnnnnnnnnnnnnnnnnnnnnnnnnnnnnnnnnnnnnnnnnnnnnnnnnnnnnnnnnnnnnnnnnnnnnnnnnnnnnnnnnnnnnnnnnnnnnnnnnnnnnnnnnnnnnnnnnnnnnnnnnnnnnnnnnnnnnnnnnnnnnnnnnnnnnnnnnnnnnnnnnnnnnnnnnnnnnnnnnnnnnnnnnnnnnnnnnnnnnnnnnnnnnnnnnnnnnnnnnnnnnnnnnnnnnnnnnnnnnnnnnnnnnnnnnnnnnnnnnnnnnnnnnnnnnnnnnnnnnnnnnnnnnnnnnnnnnnnnnnnnnnnnnnnnnnnnnnnnnnnnnnnnnnnnnnnnnnnnnnnnnnnnnnnnnnnnnnnnnnnnnnnnnnnnnnnnnnnnnnnnnnnnnnnnnnnnnnnnnnnnnnnnnnnnnnnnnnnnnnnnnnnnnnnnnnnnnnnnnnnnnnnnnnnnnnnnnnnnnnnnnnnnnnnnnnnnnnnnnnnnnnnnnnnnnnnnnnnnnnnnnnnnnnnnnnnnnnnnnnnnnnnnnnnnnnnnnnnnnnnnnnnnnnnnnnnnnnnnnnnnnnnnnnnnnnnnnnnnnnnnnnnnnnnnnnnnnnnnnnnnnnnnnnnnnnnnnnnnnnnnnnnnnnnnnnnnnnnnnnnnnnnnnnnnnnnnnnnnnnnnnnnnnnnnnnnnnnnnnnnnnnnnnnnnnnnnnnnnnnnnnnnnnnnnnnnnnnnnnnnnnnnnnnnnnnnnnnnnnnnnnnnnnnnnnnnnnnnnnnnnnnnnnnnnnnnnnnnnnnnnnnnnnnnnnnnnnnnnnnnnnnnnnnnnnnnnnnnnnnnnnnnnnnnnnnnnnnnnnnnnnnnnnnnnnnnnnnnnnnnnnnnnnnnnnnnnnnnnnnnnnnnnnnnnnnnnnnnnnnnnnnnnnnnnnnnnnnnnnnnnnnnnnnnnnnnnnnnnnnnnnnnnnnnnnnnnnnnnnnnnnnnnnnnnnnnnnnnnnnnnnnnnnnnnnnnnnnnnnnnnnnnnnnnnnnnnnnnnnnnnnnnnnnnnnnnnnnnnnnnnnnnnnnnnnnnnnnnnnnnnnnnnnnnnnnnnnnnnnnnnnnnnnnnnnnnnnnnnnnnnnnnnnnnnnnnnnnnnnnnnnnnnnnnnnnnnnnnnnnnnnnnnnnnnnnnnnnnnnnnnnnnnnnnnnnnnnnnnnnnnnnnnnnnnnnnnnnnnnnnnnnnnnnnnnnnnnnnnnnnnnnnnnnnnnnnnnnnnnnnnnnnnnnnnnnnnnnnnnnnnnnnnnnnnnnnnnnnnnnnnnnnnnnnnnnnnnnnnnnnnnnnnnnnnnnnnnnnnnnnnnnnnnnnnnnnnnnnnnnnnnnnnnnnnnnnnnnnnnnnnnnnnnnnnnnnnnnnnnnnnnnnnnnnnnnnnnnnnnnnnnnnnnnnnnnnnnnnnnnnnnnnnnnnnnnnnnnnnnnnnnnnnnnnnnnnnnnnnnnnnnnnnnnnnnnnnnnnnnnnnnnnnnnnnnnnnnnnnnnnnnnnnnnnnnnnnnnnnnnnnnnnnnnnnnnnnnnnnnnnnnnnnnnnnnnnnnnnnnnnnnnnnnnnnnnnnnnnnnnnnnnnnnnnnnnnnnnnnnnnnnnnnnnnnnnnnnnnnnnnnnnnnnnnnnnnnnnnnnnnnnnnnnnnnnnnnnnnnnnnnnnnnnnnnnnnnnnnnnnnnnnnnnnnnnnnnnnnnnnnnnnnnnnnnnnnnnnnnnnnnnnnnnnnnnnnnnnnnnnnnnnnnnnnnnnnnnnnnnnnnnnnnnnnnnnnnnnnnnnnnnnnnnnnnnnnnnnnnnnnnnnnnnnnnnnnnnnnnnnnnnnnnnnnnnnnnnnnnnnnnnnnnnnnnnnnnnnnnnnnnnnnnnnnnnnnnnnnnnnnnnnnnnnnnnnnnnnnnnnnnnnnnnnnnnnnnnnnnnnnnnnnnnnnnnnnnnnnnnnnnnnnnnnnnnnnnnnnnnnnnnnnnnnnnnnnnnnnnnnnnnnnnnnnnnnnnnnnnnnnnnnnnnnnnnnnnnnnnnnnnnnnnnnnnnnnnnnnnnnnnnnnnnnnnnnnnnnnnnnnnnnnnnnnnnnnnnnnnnnnnnnnnnnnnnnnnnnnnnnnnnnnnnnnnnnnnnnnnnnnnnnnnnnnnnnnnnnnnnnnnnnnnnnnnnnnnnnnnnnnnnnnnnnnnnnnnnnnnnnnnnnnnnnnnnnnnnnnnnnnnnnnnnnnnnnnnnnnnnnnnnnnnnnnnnnnnnnnnnnnnnnnnnnnnnnnnnnnnnnnnnnnnnnnnnnnnnnnnnnnnnnnnnnnnnnnnnnnnnnnnnnnnnnnnnnnnnnnnnnnnnnnnnnnnnnnnnnnnnnnnnnnnnnnnnnnnnnnnnnnnnnnnnnnnnnnnnnnnnnnnnnnnnnnnnnnnnnnnnnnnnnnnnnnnnnnnnnnnnnnnnnnnnnnnnnnnnnnnnnnnnnnnnnnnnnnnnnnnnnnnnnnnnnnnnnnnnnnnnnnnnnnnnnnnnnnnnnnnnnnnnnnnnnnnnnnnnnnnnnnnnnnnnnnnnnnnnnnnnnnnnnnnnnnnnnnnnnnnnnnnnnnnnnnnnnnnnnnnnnnnnnnnnnnnnnnnnnnnnnnnnnnnnnnnnnnnnnnnnnnnnnnnnnnnnnnnnnnnnnnnnnnnnnnnnnnnnnnnnnnnnnnnnnnnnnnnnnnnnnnnnnnnnnnnnnnnnnnnnnnnnnnnnnnnnnnnnnnnnnnnnnnnnnnnnnnnnnnnnnnnnnnnnnnnnnnnnnnnnnnnnnnnnnnnnnnnnnnnnnnnnnnnnnnnnnnnnnnnnnnnnnnnnnnnnnnnnnnnnnnnnnnnnnnnnnnnnnnnnnnnnnnnnnnnnnnnnnnnnnnnnnnnnnnnnnnnnnnnnnnnnnnnnnnnnnnnnnnnnnnnnnnnnnnnnnnnnnnnnnnnnnnnnnnnnnnnnnnnnnnnnnnnnnnnnnnnnnnnnnnnnnnnnnnnnnnnnnnnnnnnnnnnnnnnnnnnnnnnnnnnnnnnnnnnnnnnnnnnnnnnnnnnnnnnnnnnnnnnnnnnnnnnnnnnnnnnnnnnnnnnnnnnnnnnnnnnnnnnnnnnnnnnnnnnnnnnnnnnnnnnnnnnnnnnnnnnnnnnnnnnnnnnnnnnnnnnnnnnnnnnnnnnnnnnnnnnnnnnnnnnnnnnnnnnnnnnnnnnnnnnnnnnnnnnnnnnnnnnnnnnnnnnnnnnnnnnnnnnnnnnnnnnnnnnnnnnnnnnnnnnnnnnnnnnnnnnnnnnnnnnnnnnnnnnnnnnnnnnnnnnnnnnnnnnnnnnnnnnnnnnnnnnnnnnnnnnnnnnnnnnnnnnnnnnnnnnnnnnnnnnnnnnnnnnnnnnnnnnnnnnnnnnnnnnnnnnnnnnnnnnnnnnnnnnnnnnnnnnnnnnnnnnnnnnnnnnnnnnnnnnnnnnnnnnnnnnnnnnnnnnnnnnnnnnnnnnnnnnnnnnnnnnnnnnnnnnnnnnnnnnnnnnnnnnnnnnnnnnnnnnnnnnnnnnnnnnnnnnnnnnnnnnnnnnnnnnnnnnnnnnnnnnnnnnnnnnnnnnnnnnnnnnnnnnnnnnnnnnnnnnnnnnnnnnnnnnnnnnnnnnnnnnnnnnnnnnnnnnnnnnnnnnnnnnnnnnnnnnnnnnnnnnnnnnnnnnnnnnnnnnnnnnnnnnnnnnnnnnnnnnnnnnnnnnnnnnnnnnnnnnnnnnnnnnnnnnnnnnnnnnnnnnnnnnnnnnnnnnnnnnnnnnnnnnnnnnnnnnnnnnnnnnnnnnnnnnnnnnnnnnnnnnnnnnnnnnnnnnnnnnnnnnnnnnnnnnnnnnnnnnnnnnnnnnnnnnnnnnnnnnnnnnnnnnnnnnnnnnnnnnnnnnnnnnnnnnnnnnnnnnnnnnnnnnnnnnnnnnnnnnnnnnnnnnnnnnnnnnnnnnnnnnnnnnnnnnnnnnnnnnnnnnnnnnnnnnnnnnnnnnnnnnnnnnnnnnnnnnnnnnnnnnnnnnnnnnnnnnnnnnnnnnnnnnnnnnnnnnnnnnnnnnnnnnnnnnnnnnnnnnnnnnnnnnnnnnnnnnnnnnnnnnnnnnnnnnnnnnnnnnnnnnnnnnnnnnnnnnnnnnnnnnnnnnnnnnnnnnnnnnnnnnnnnnnnnnnnnnnnnnnnnnnnnnnnnnnnnnnnnnnnnnnnnnnnnnnnnnnnnnnnnnnnnnnnnnnnnnnnnnnnnnnnnnnnnnnnnnnnnnnnnnnnnnnnnnnnnnnnnnnnnnnnnnnnnnnnnnnnnnnnnnnnnnnnnnnnnnnnnnnnnnnnnnnnnnnnnnnnnnnnnnnnnnnnnnnnnnnnnnnnnnnnnnnnnnnnnnnnnnnnnnnnnnnnnnnnnnnnnnnnnnnnnnnnnnnnnnnnnnnnnnnnnnnnnnnnnnnnnnnnnnnnnnnnnnnnnnnnnnnnnnnnnnnnnnnnnnnnnnnnnnnnnnnnnnnnnnnnnnnnnnnnnnnnnnnnnnnnnnnnnnnnnnnnnnnnnnnnnnnnnnnnnnnnnnnnnnnnnnnnnnnnnnnnnnnnnnnnnnnnnnnnnnnnnnnnnnnnnnnnnnnnnnnnnnnnnnnnnnnnnnnnnnnnnnnnnnnnnnnnnnnnnnnnnnnnnnnnnnnnnnnnnnnnnnnnnnnnnnnnnnnnnnnnnnnnnnnnnnnnnnnnnnnnnnnnnnnnnnnnnnnnnnnnnnnnnnnnnnnnnnnnnnnnnnnnnnnnnnnnnnnnnnnnnnnnnnnnnnnnnnnnnnnnnnnnnnnnnnnnnnnnnnnnnnnnnnnnnnnnnnnnnnnnnnnnnnnnnnnnnnnnnnnnnnnnnnnnnnnnnnnnnnnnnnnnnnnnnnnnnnnnnnnnnnnnnnnnnnnnnnnnnnnnnnnnnnnnnnnnnnnnnnnnnnnnnnnnnnnnnnnnnnnnnnnnnnnnnnnnnnnnnnnnnnnnnnnnnnnnnnnnnnnnnnnnnnnnnnnnnnnnnnnnnnnnnnnnnnnnnnnnnnnnnnnnnnnnnnnnnnnnnnnnnnnnnnnnnnnnnnnnnnnnnnnnnnnnnnnnnnnnnnnnnnnnnnnnnnnnnnnnnnnnnnnnnnnnnnnnnnnnnnnnnnnnnnnnnnnnnnnnnnnnnnnnnnnnnnnnnnnnnnnnnnnnnnnnnnnnnnnnnnnnnnnnnnnnnnnnnnnnnnnnnnnnnnnnnnnnnnnnnnnnnnnnnnnnnnnnnnnnnnnnnnnnnnnnnnnnnnnnnnnnnnnnnnnnnnnnnnnnnnnnnnnnnnnnnnnnnnnnnnnnnnnnnnnnnnnnnnnnnnnnnnnnnnnnnnnnnnnnnnnnnnnnnnnnnnnnnnnnnnnnnnnnnnnnnnnnnnnnnnnnnnnnnnnnnnnnnnnnnnnnnnnnnnnnnnnnnnnnnnnnnnnnnnnnnnnnnnnnnnnnnnnnnnnnnnnnnnnnnnnnnnnnnnnnnnnnnnnnnnnnnnnnnnnnnnnnnnnnnnnnnnnnnnnnnnnnnnnnnnnnnnnnnnnnnnnnnnnnnnnnnnnnnnnnnnnnnnnnnnnnnnnnnnnnnnnnnnnnnnnnnnnnnnnnnnnnnnnnnnnnnnnnnnnnnnnnnnnnnnnnnnnnnnnnnnnnnnnnnnnnnnnnnnnnnnnnnnnnnnnnnnnnnnnnnnnnnnnnnnnnnnnnnnnnnnnnnnnnnnnnnnnnnnnnnnnnnnnnnnnnnnnnnnnnnnnnnnnnnnnnnnnnnnnnnnnnnnnnnnnnnnnnnnnnnnnnnnnnnnnnnnnnnnnnnnnnnnnnnnnnnnnnnnnnnnnnnnnnnnnnnnnnnnnnnnnnnnnnnnnnnnnnnnnnnnnnnnnnnnnnnnnnnnnnnnnnnnnnnnnnnnnnnnnnnnnnnnnnnnnnnnnnnnnnnnnnnnnnnnnnnnnnnnnnnnnnnnnnnnnnnnnnnnnnnnnnnnnnnnnnnnnnnnnnnnnnnnnnnnnnnnnnnnnnnnnnnnnnnnnnnnnnnnnnnnnnnnnnnnnnnnnnnnnnnnnnnnnnnnnnnnnnnnnnnnnnnnnnnnnnnnnnnnnnnnnnnnnnnnnnnnnnnnnnnnnnnnnnnnnnnnnnnnnnnnnnnnnnnnnnnnnnnnnnnnnnnnnnnnnnnnnnnnnnnnnnnnnnnnnnnnnnnnnnnnnnnnnnnnnnnnnnnnnnnnnnnnnnnnnnnnnnnnnnnnnnnnnnnnnnnnnnnnnnnnnnnnnnnnnnnnnnnnnnnnnnnnnnnnnnnnnnnnnnnnnnnnnnnnnnnnnnnnnnnnnnnnnnnnnnnnnnnnnnnnnnnnnnnnnnnnnnnnnnnnnnnnnnnnnnnnnnnnnnnnnnnnnnnnnnnnnnnnnnnnnnnnnnnnnnnnnnnnnnnnnnnnnnnnnnnnnnnnnnnnnnnnnnnnnnnnnnnnnnnnnnnnnnnnnnnnnnnnnnnnnnnnnnnnnnnnnnnnnnnnnnnnnnnnnnnnnnnnnnnnnnnnnnnnnnnnnnnnnnnnnnnnnnnnnnnnnnnnnnnnnnnnnnnnnnnnnnnnnnnnnnnnnnnnnnnnnnnnnnnnnnnnnnnnnnnnnnnnnnnnnnnnnnnnnnnnnnnnnnnnnnnnnnnnnnnnnnnnnnnnnnnnnnnnnnnnnnnnnnnnnnnnnnnnnnnnnnnnnnnnnnnnnnnnnnnnnnnnnnnnnnnnnnnnnnnnnnnnnnnnnnnnnnnnnnnnnnnnnnnnnnnnnnnnnnnnnnnnnnnnnnnnnnnnnnnnnnnnnnnnnnnnnnnnnnnnnnnnnnnnnnnnnnnnnnnnnnnnnnnnnnnnnnnnnnnnnnnnnnnnnnnnnnnnnnnnnnnnnnnnnnnnnnnnnnnnnnnnnnnnnnnnnnnnnnnnnnnnnnnnnnnnnnnnnnnnnnnnnnnnnnnnnnnnnnnnnnnnnnnnnnnnnnnnnnnnnnnnnnnnnnnnnnnnnnnnnnnnnnnnnnnnnnnnnnnnnnnnnnnnnnnnnnnnnnnnnnnnnnnnnnnnnnnnnnnnnnnnnnnnnnnnnnnnnnnnnnnnnnnnnnnnnnnnnnnnnnnnnnnnnnnnnnnnnnnnnnnnnnnnnnnnnnnnnnnnnnnnnnnnnnnnnnnnnnnnnnnnnnnnnnnnnnnnnnnnnnnnnnnnnnnnnnnnnnnnnnnnnnnnnnnnnnnnnnnnnnnnnnnnnnnnnnnnnnnnnnnnnnnnnnnnnnnnnnnnnnnnnnnnnnnnnnnnnnnnnnnnnnnnnnnnnnnnnnnnnnnnnnnnnnnnnnnnnnnnnnnnnnnnnnnnnnnnnnnnnnnnnnnnnnnnnnnnnnnnnnnnnnnnnnnnnnnnnnnnnnnnnnnnnnnnnnnnnnnnnnnnnnnnnnnnnnnnnnnnnnnnnnnnnnnnnnnnnnnnnnnnnnnnnnnnnnnnnnnnnnnnnnnnnnnnnnnnnnnnnnnnnnnnnnnnnnnnnnnnnnnnnnnnnnnnnnnnnnnnnnnnnnnnnnnnnnnnnnnnnnnnnnnnnnnnnnnnnnnnnnnnnnnnnnnnnnnnnnnnnnnnnnnnnnnnnnnnnnnnnnnnnnnnnnnnnnnnnnnnnnnnnnnnnnnnnnnnnnnnnnnnnnnnnnnnnnnnnnnnnnnnnnnnnnnnnnnnnnnnnnnnnnnnnnnnnnnnnnnnnnnnnnnnnnnnnnnnnnnnnnnnnnnnnnnnnnnnnnnnnnnnnnnnnnnnnnnnnnnnnnnnnnnnnnnnnnnnnnnnnnnnnnnnnnnnnnnnnnnnnnnnnnnnnnnnnnnnnnnnnnnnnnnnnnnnnnnnnnnnnnnnnnnnnnnnnnnnnnnnnnnnnnnnnnnnnnnnnnnnnnnnnnnnnnnnnnnnnnnnnnnnnnnnnnnnnnnnnnnnnnnnnnnnnnnnnnnnnnnnnnnnnnnnnnnnnnnnnnnnnnnnnnnnnnnnnnnnnnnnnnnnnnnnnnnnnnnnnnnnnnnnnnnnnnnnnnnnnnnnnnnnnnnnnnnnnnnnnnnnnnnnnnnnnnnnnnnnnnnnnnnnnnnnnnnnnnnnnnnnnnnnnnnnnnnnnnnnnnnnnnnnnnnnnnnnnnnnnnnnnnnnnnnnnnnnnnnnnnnnnnnnnnnnnnnnnnnnnnnnnnnnnnnnnnnnnnnnnnnnnnnnnnnnnnnnnnnnnnnnnnnnnnnnnnnnnnnnnnnnnnnnnnnnnnnnnnnnnnnnnnnnnnnnnnnnnnnnnnnnnnnnnnnnnnnnnnnnnnnnnnnnnnnnnnnnnnnnnnnnnnnnnnnnnnnnnnnnnnnnnnnnnnnnnnnnnnnnnnnnnnnnnnnnnnnnnnnnnnnnnnnnnnnnnnnnnnnnnnnnnnnnnnnnnnnnnnnnnnnnnnnnnnnnnnnnnnnnnnnnnnnnnnnnnnnnnnnnnnnnnnnnnnnnnnnnnnnnnnnnnnnnnnnnnnnnnnnnnnnnnnnnnnnnnnnnnnnnnnnnnnnnnnnnnnnnnnnnnnnnnnnnnnnnnnnnnnnnnnnnnnnnnnnnnnnnnnnnnnnnnnnnnnnnnnnnnnnnnnnnnnnnnnnnnnnnnnnnnnnnnnnnnnnnnnnnnnnnnnnnnnnnnnnnnnnnnnnnnnnnnnnnnnnnnnnnnnnnnnnnnnnnnnnnnnnnnnnnnnnnnnnnnnnnnnnnnnnnnnnnnnnnnnnnnnnnnnnnnnnnnnnnnnnnnnnnnnnnnnnnnnnnnnnnnnnnnnnnnnnnnnnnnnnnnnnnnnnnnnnnnnnnnnnnnnnnnnnnnnnnnnnnnnnnnnnnnnnnnnnnnnnnnnnnnnnnnnnnnnnnnnnnnnnnnnnnnnnnnnnnnnnnnnnnnnnnnnnnnnnnnnnnnnnnnnnnnnnnnnnnnnnnnnnnnnnnnnnnnnnnnnnnnnnnnnnnnnnnnnnnnnnnnnnnnnnnnnnnnnnnnnnnnnnnnnnnnnnnnnnnnnnnnnnnnnnnnnnnnnnnnnnnnnnnnnnnnnnnnnnnnnnnnnnnnnnnnnnnnnnnnnnnnnnnnnnnnnnnnnnnnnnnnnnnnnnnnnnnnnnnnnnnnnnnnnnnnnnnnnnnnnnnnnnnnnnnnnnnnnnnnnnnnnnnnnnnnnnnnnnnnnnnnnnnnnnnnnnnnnnnnnnnnnnnnnnnnnnnnnnnnnnnnnnnnnnnnnnnnnnnnnnnnnnnnnnnnnnnnnnnnnnnnnnnnnnnnnnnnnnnnnnnnnnnnnnnnnnnnnnnnnnnnnnnnnnnnnnnnnnnnnnnnnnnnnnnnnnnnnnnnnnnnnnnnnnnnnnnnnnnnnnnnnnnnnnnnnnnnnnnnnnnnnnnnnnnnnnnnnnnnnnnnnnnnnnnnnnnnnnnnnnnnnnnnnnnnnnnnnnnnnnnnnnnnnnnnnnnnnnnnnnnnnnnnnnnnnnnnnnnnnnnnnnnnnnnnnnnnnnnnnnnnnnnnnnnnnnnnnnnnnnnnnnnnnnnnnnnnnnnnnnnnnnnnnnnnnnnnnnnnnnnnnnnnnnnnnnnnnnnnnnnnnnnnnnnnnnnnnnnnnnnnnnnnnnnnnnnnnnnnnnnnnnnnnnnnnnnnnnnnnnnnnnnnnnnnnnnnnnnnnnnnnnnnnnnnnnnnnnnnnnnnnnnnnnnnnnnnnnnnnnnnnnnnnnnnnnnnnnnnnnnnnnnnnnnnnnnnnnnnnnnnnnnnnnnnnnnnnnnnnnnnnnnnnnnnnnnnnnnnnnnnnnnnnnnnnnnnnnnnnnnnnnnnnnnnnnnnnnnnnnnnnnnnnnnnnnnnnnnnnnnnnnnnnnnnnnnnnnnnnnnnnnnnnnnnnnnnnnnnnnnnnnnnnnnnnnnnnnnnnnnnnnnnnnnnnnnnnnnnnnnnnnnnnnnnnnnnnnnnnnnnnnnnnnnnnnnnnnnnnnnnnnnnnnnnnnnnnnnnnnnnnnnnnnnnnnnnnnnnnnnnnnnnnnnnnnnnnnnnnnnnnnnnnnnnnnnnnnnnnnnnnnnnnnnnnnnnnnnnnnnnnnnnnnnnnnnnnnnnnnnnnnnnnnnnnnnnnnnnnnnnnnnnnnnnnnnnnnnnnnnnnnnnnnnnnnnnnnnnnnnnnnnnnnnnnnnnnnnnnnnnnnnnnnnnnnnnnnnnnnnnnnnnnnnnnnnnnnnnnnnnnnnnnnnnnnnnnnnnnnnnnnnnnnnnnnnnnnnnnnnnnnnnnnnnnnnnnnnnnnnnnnnnnnnnnnnnnnnnnnnnnnnnnnnnnnnnnnnnnnnnnnnnnnnnnnnnnnnnnnnnnnnnnnnnnnnnnnnnnnnnnnnnnnnnnnnnnnnnnnnnnnnnnnnnnnnnnnnnnnnnnnnnnnnnnnnnnnnnnnnnnnnnnnnnnnnnnnnnnnnnnnnnnnnnnnnnnnnnnnnnnnnnnnnnnnnnnnnnnnnnnnnnnnnnnnnnnnnnnnnnnnnnnnnnnnnnnnnnnnnnnnnnnnnnnnnnnnnnnnnnnnnnnnnnnnnnnnnnnnnnnnnnnnnnnnnnnnnnnnnnnnnnnnnnnnnnnnnnnnnnnnnnnnnnnnnnnnnnnnnnnnnnnnnnnnnnnnnnnnnnnnnnnnnnnnnnnnnnnnnnnnnnnnnnnnnnnnnnnnnnnnnnnnnnnnnnnnnnnnnnnnnnnnnnnnnnnnnnnnnnnnnnnnnnnnnnnnnnnnnnnnnnnnnnnnnnnnnnnnnnnnnnnnnnnnnnnnnnnnnnnnnnnnnnnnnnnnnnnnnnnnnnnnnnnnnnnnnnnnnnnnnnnnnnnnnnnnnnnnnnnnnnnnnnnnnnnnnnnnnnnnnnnnnnnnnnnnnnnnnnnnnnnnnnnnnnnnnnnnnnnnnnnnnnnnnnnnnnnnnnnnnnnnnnnnnnnnnnnnnnnnnnnnnnnnnnnnnnnnnnnnnnnnnnnnnnnnnnnnnnnnnnnnnnnnnnnnnnnnnnnnnnnnnnnnnnnnnnnnnnnnnnnnnnnnnnnnnnnnnnnnnnnnnnnnnnnnnnnnnnnnnnnnnnnnnnnnnnnnnnnnnnnnnnnnnnnnnnnnnnnnnnnnnnnnnnnnnnnnnnnnnnnnnnnnnnnnnnnnnnnnnnnnnnnnnnnnnnnnnnnnnnnnnnnnnnnnnnnnnnnnnnnnnnnnnnnnnnnnnnnnnnnnnnnnnnnnnnnnnnnnnnnnnnnnnnnnnnnnnnnnnnnnnnnnnnnnnnnnnnnnnnnnnnnnnnnnnnnnnnnnnnnnnnnnnnnnnnnnnnnnnnnnnnnnnnnnnnnnnnnnnnnnnnnnnnnnnnnnnnnnnnnnnnnnnnnnnnnnnnnnnnnnnnnnnnnnnnnnnnnnnnnnnnnnnnnnnnnnnnnnnnnnnnnnnnnnnnnnnnnnnnnnnnnnnnnnnnnnnnnnnnnnnnnnnnnnnnnnnnnnnnnnnnnnnnnnnnnnnnnnnnnnnnnnnnnnnnnnnnnnnnnnnnnnnnnnnnnnnnnnnnnnnnnnnnnnnnnnnnnnnnnnnnnnnnnnnnnnnnnnnnnnnnnnnnnnnnnnnnnnnnnnnnnnnnnnnnnnnnnnnnnnnnnnnnnnnnnnnnnnnnnnnnnnnnnnnnnnnnnnnnnnnnnnnnnnnnnnnnnnnnnnnnnnnnnnnnnnnnnnnnnnnnnnnnnnnnnnnnnnnnnnnnnnnnnnnnnnnnnnnnnnnnnnnnnnnnnnnnnnnnnnnnnnnnnnnnnnnnnnnnnnnnnnnnnnnnnnnnnnnnnnnnnnnnnnnnnnnnnnnnnnnnnnnnnnnnnnnnnnnnnnnnnnnnnnnnnnnnnnnnnnnnnnnnnnnnnnnnnnnnnnnnnnnnnnnnnnnnnnnnnnnnnnnnnnnnnnnnnnnnnnnnnnnnnnnnnnnnnnnnnnnnnnnnnnnnnnnnnnnnnnnnnnnnnnnnnnnnnnnnnnnnnnnnnnnnnnnnnnnnnnnnnnnnnnnnnnnnnnnnnnnnnnnnnnnnnnnnnnnnnnnnnnnnnnnnnnnnnnnnnnnnnnnnnnnnnnnnnnnnnnnnnnnnnnnnnnnnnnnnnnnnnnnnnnnnnnnnnnnnnnnnnnnnnnnnnnnnnnnnnnnnnnnnnnnnnnnnnnnnnnnnnnnnnnnnnnnnnnnnnnnnnnnnnnnnnnnnnnnnnnnnnnnnnnnnnnnnnnnnnnnnnnnnnnnnnnnnnnnnnnnnnnnnnnnnnnnnnnnnnnnnnnnnnnnnnnnnnnnnnnnnnnnnnnnnnnnnnnnnnnnnnnnnnnnnnnnnnnnnnnnnnnnnnnnnnnnnnnnnnnnnnnnnnnnnnnnnnnnnnnnnnnnnnnnnnnnnnnnnnnnnnnnnnnnnnnnnnnnnnnnnnnnnnnnnnnnnnnnnnnnnnnnnnnnnnnnnnnnnnnnnnnnnnnnnnnnnnnnnnnnnnnnnnnnnnnnnnnnnnnnnnnnnnnnnnnnnnnnnnnnnnnnnnnnnnnnnnnnnnnnnnnnnnnnnnnnnnnnnnnnnnnnnnnnnnnnnnnnnnnnnnnnnnnnnnnnnnnnnnnnnnnnnnnnnnnnnnnnnnnnnnnnnnnnnnnnnnnnnnnnnnnnnnnnnnnnnnnnnnnnnnnnnnnnnnnnnnnnnnnnnnnnnnnnnnnnnnnnnnnnnnnnnnnnnnnnnnnnnnnnnnnnnnnnnnnnnnnnnnnnnnnnnnnnnnnnnnnnnnnnnnnnnnnnnnnnnnnnnnnnnnnnnnnnnnnnnnnnnnnnnnnnnnnnnnnnnnnnnnnnnnnnnnnnnnnnnnnnnnnnnnnnnnnnnnnnnnnnnnnnnnnnnnnnnnnnnnnnnnnnnnnnnnnnnnnnnnnnnnnnnnnnnnnnnnnnnnnnnnnnnnnnnnnnnnnnnnnnnnnnnnnnnnnnnnnnnnnnnnnnnnnnnnnnnnnnnnnnnnnnnnnnnnnnnnnnnnnnnnnnnnnnnnnnnnnnnnnnnnnnnnnnnnnnnnnnnnnnnnnnnnnnnnnnnnnnnnnnnnnnnnnnnnnnnnnnnnnnnnnnnnnnnnnnnnnnnnnnnnnnnnnnnnnnnnnnnnnnnnnnnnnnnnnnnnnnnnnnnnnnnnnnnnnnnnnnnnnnnnnnnnnnnnnnnnnnnnnnnnnnnnnnnnnnnnnnnnnnnnnnnnnnnnnnnnnnnnnnnnnnnnnnnnnnnnnnnnnnnnnnnnnnnnnnnnnnnnnnnnnnnnnnnnnnnnnnnnnnnnnnnnnnnnnnnnnnnnnnnnnnnnnnnnnnnnnnnnnnnnnnnnnnnnnnnnnnnnnnnnnnnnnnnnnnnnnnnnnnnnnnnnnnnnnnnnnnnnnnnnnnnnnnnnnnnnnnnnnnnnnnnnnnnnnnnnnnnnnnnnnnnnnnnnnnnnnnnnnnnnnnnnnnnnnnnnnnnnnnnnnnnnnnnnnnnnnnnnnnnnnnnnnnnnnnnnnnnnnnnnnnnnnnnnnnnnnnnnnnnnnnnnnnnnnnnnnnnnnnnnnnnnnnnnnnnnnnnnnnnnnnnnnnnnnnnnnnnnnnnnnnnnnnnnnnnnnnnnnnnnnnnnnnnnnnnnnnnnnnnnnnnnnnnnnnnnnnnnnnnnnnnnnnnnnnnnnnnnnnnnnnnnnnnnnnnnnnnnnnnnnnnnnnnnnnnnnnnnnnnnnnnnnnnnnnnnnnnnnnnnnnnnnnnnnnnnnnnnnnnnnnnnnnnnnnnnnnnnnnnnnnnnnnnnnnnnnnnnnnnnnnnnnnnnnnnnnnnnnnnnnnnnnnnnnnnnnnnnnnnnnnnnnnnnnnnnnnnnnnnnnnnnnnnnnnnnnnnnnnnnnnnnnnnnnnnnnnnnnnnnnnnnnnnnnnnnnnnnnnnnnnnnnnnnnnnnnnnnnnnnnnnnnnnnnnnnnnnnnnnnnnnnnnnnnnnnnnnnnnnnnnnnnnnnnnnnnnnnnnnnnnnnnnnnnnnnnnnnnnnnnnnnnnnnnnnnnnnnnnnnnnnnnnnnnnnnnnnnnnnnnnnnnnnnnnnnnnnnnnnnnnnnnnnnnnnnnnnnnnnnnnnnnnnnnnnnnnnnnnnnnnnnnnnnnnnnnnnnnnnnnnnnnnnnnnnnnnnnnnnnnnnnnnnnnnnnnnnnnnnnnnnnnnnnnnnnnnnnnnnnnnnnnnnnnnnnnnnnnnnnnnnnnnnnnnnnnnnnnnnnnnnnnnnnnnnnnnnnnnnnnnnnnnnnnnnnnnnnnnnnnnnnnnnnnnnnnnnnnnnnnnnnnnnnnnnnnnnnnnnnnnnnnnnnnnnnnnnnnnnnnnnnnnnnnnnnnnnnnnnnnnnnnnnnnnnnnnnnnnnnnnnnnnnnnnnnnnnnnnnnnnnnnnnnnnnnnnnnnnnnnnnnnnnnnnnnnnnnnnnnnnnnnnnnnnnnnnnnnnnnnnnnnnnnnnnnnnnnnnnnnnnnnnnnnnnnnnnnnnnnnnnnnnnnnnnnnnnnnnnnnnnnnnnnnnnnnnnnnnnnnnnnnnnnnnnnnnnnnnnnnnnnnnnnnnnnnnnnnnnnnnnnnnnnnnnnnnnnnnnnnnnnnnnnnnnnnnnnnnnnnnnnnnnnnnnnnnnnnnnnnnnnnnnnnnnnnnnnnnnnnnnnnnnnnnnnnnnnnnnnnnnnnnnnnnnnnnnnnnnnnnnnnnnnnnnnnnnnnnnnnnnnnnnnnnnnnnnnnnnnnnnnnnnnnnnnnnnnnnnnnnnnnnnnnnnnnnnnnnnnnnnnnnnnnnnnnnnnnnnnnnnnnnnnnnnnnnnnnnnnnnnnnnnnnnnnnnnnnnnnnnnnnnnnnnnnnnnnnnnnnnnnnnnnnnnnnnnnnnnnnnnnnnnnnnnnnnnnnnnnnnnnnnnnnnnnnnnnnnnnnnnnnnnnnnnnnnnnnnnnnnnnnnnnnnnnnnnnnnnnnnnnnnnnnnnnnnnnnnnnnnnnnnnnnnnnnnnnnnnnnnnnnnnnnnnnnnnnnnnnnnnnnnnnnnnnnnnnnnnnnnnnnnnnnnnnnnnnnnnnnnnnnnnnnnnnnnnnnnnnnnnnnnnnnnnnnnnnnnnnnnnnnnnnnnnnnnnnnnnnnnnnnnnnnnnnnnnnnnnnnnnnnnnnnnnnnnnnnnnnnnnnnnnnnnnnnnnnnnnnnnnnnnnnnnnnnnnnnnnnnnnnnnnnnnnnnnnnnnnnnnnnnnnnnnnnnnnnnnnnnnnnnnnnnnnnnnnnnnnnnnnnnnnnnnnnnnnnnnnnnnnnnnnnnnnnnnnnnnnnnnnnnnnnnnnnnnnnnnnnnnnnnnnnnnnnnnnnnnnnnnnnnnnnnnnnnnnnnnnnnnnnnnnnnnnnnnnnnnnnnnnnnnnnnnnnnnnnnnnnnnnnnnnnnnnnnnnnnnnnnnnnnnnnnnnnnnnnnnnnnnnnnnnnnnnnnnnnnnnnnnnnnnnnnnnnnnnnnnnnnnnnnnnnnnnnnnnnnnnnnnnnnnnnnnnnnnnnnnnnnnnnnnnnnnnnnnnnnnnnnnnnnnnnnnnnnnnnnnnnnnnnnnnnnnnnnnnnnnnnnnnnnnnnnnnnnnnnnnnnnnnnnnnnnnnnnnnnnnnnnnnnnnnnnnnnnnnnnnnnnnnnnnnnnnnnnnnnnnnnnnnnnnnnnnnnnnnnnnnnnnnnnnnnnnnnnnnnnnnnnnnnnnnnnnnnnnnnnnnnnnnnnnnnnnnnnnnnnnnnnnnnnnnnnnnnnnnnnnnnnnnnnnnnnnnnnnnnnnnnnnnnnnnnnnnnnnnnnnnnnnnnnnnnnnnnnnnnnnnnnnnnnnnnnnnnnnnnnnnnnnnnnnnnnnnnnnnnnnnnnnnnnnnnnnnnnnnnnnnnnnnnnnnnnnnnnnnnnnnnnnnnnnnnnnnnnnnnnnnnnnnnnnnnnnnnnnnnnnnnnnnnnnnnnnnnnnnnnnnnnnnnnnnnnnnnnnnnnnnnnnnnnnnnnnnnnnnnnnnnnnnnnnnnnnnnnnnnnnnnnnnnnnnnnnnnnnnnnnnnnnnnnnnnnnnnnnnnnnnnnnnnnnnnnnnnnnnnnnnnnnnnnnnnnnnnnnnnnnnnnnnnnnnnnnnnnnnnnnnnnnnnnnnnnnnnnnnnnnnnnnnnnnnnnnnnnnnnnnnnnnnnnnnnnnnnnnnnnnnnnnnnnnnnnnnnnnnnnnnnnnnnnnnnnnnnnnnnnnnnnnnnnnnnnnnnnnnnnnnnnnnnnnnnnnnnnnnnnnnnnnnnnnnnnnnnnnnnnnnnnnnnnnnnnnnnnnnnnnnnnnnnnnnnnnnnnnnnnnnnnnnnnnnnnnnnnnnnnnnnnnnnnnnnnnnnnnnnnnnnnnnnnnnnnnnnnnnnnnnnnnnnnnnnnnnnnnnnnnnnnnnnnnnnnnnnnnnnnnnnnnnnnnnnnnnnnnnnnnnnnnnnnnnnnnnnnnnnnnnnnnnnnnnnnnnnnnnnnnnnnnnnnnnnnnnnnnnnnnnnnnnnnnnnnnnnnnnnnnnnnnnnnnnnnnnnnnnnnnnnnnnnnnnnnnnnnnnnnnnnnnnnnnnnnnnnnnnnnnnnnnnnnnnnnnnnnnnnnnnnnnnnnnnnnnnnnnnnnnnnnnnnnnnnnnnnnnnnnnnnnnnnnnnnnnnnnnnnnnnnnnnnnnnnnnnnnnnnnnnnnnnnnnnnnnnnnnnnnnnnnnnnnnnnnnnnnnnnnnnnnnnnnnnnnnnnnnnnnnnnnnnnnnnnnnnnnnnnnnnnnnnnnnnnnnnnnnnnnnnnnnnnnnnnnnnnnnnnnnnnnnnnnnnnnnnnnnnnnnnnnnnnnnnnnnnnnnnnnnnnnnnnnnnnnnnnnnnnnnnnnnnnnnnnnnnnnnnnnnnnnnnnnnnnnnnnnnnnnnnnnnnnnnnnnnnnnnnnnnnnnnnnnnnnnnnnnnnnnnnnnnnnnnnnnnnnnnnnnnnnnnnnnnnnnnnnnnnnnnnnnnnnnnnnnnnnnnnnnnnnnnnnnnnnnnnnnnnnnnnnnnnnnnnnnnnnnnnnnnnnnnnnnnnnnnnnnnnnnnnnnnnnnnnnnnnnnnnnnnnnnnnnnnnnnnnnnnnnnnnnnnnnnnnnnnnnnnnnnnnnnnnnnnnnnnnnnnnnnnnnnnnnnnnnnnnnnnnnnnnnnnnnnnnnnnnnnnnnnnnnnnnnnnnnnnnnnnnnnnnnnnnnnnnnnnnnnnnnnnnnnnnnnnnnnnnnnnnnnnnnnnnnnnnnnnnnnnnnnnnnnnnnnnnnnnnnnnnnnnnnnnnnnnnnnnnnnnnnnnnnnnnnnnnnnnnnnnnnnnnnnnnnnnnnnnnnnnnnnnnnnnnnnnnnnnnnnnnnnnnnnnnnnnnnnnnnnnnnnnnnnnnnnnnnnnnnnnnnnnnnnnnnnnnnnnnnnnnnnnnnnnnnnnnnnnnnnnnnnnnnnnnnnnnnnnnnnnnnnnnnnnnnnnnnnnnnnnnnnnnnnnnnnnnnnnnnnnnnnnnnnnnnnnnnnnnnnnnnnnnnnnnnnnnnnnnnnnnnnnnnnnnnnnnnnnnnnnnnnnnnnnnnnnnnnnnnnnnnnnnnnnnnnnnnnnnnnnnnnnnnnnnnnnnnnnnnnnnnnnnnnnnnnnnnnnnnnnnnnnnnnnnnnnnnnnnnnnnnnnnnnnnnnnnnnnnnnnnnnnnnnnnnnnnnnnnnnnnnnnnnnnnnnnnnnnnnnnnnnnnnnnnnnnnnnnnnnnnnnnnnnnnnnnnnnnnnnnnnnnnnnnnnnnnnnnnnnnnnnnnnnnnnnnnnnnnnnnnnnnnnnnnnnnnnnnnnnnnnnnnnnnnnnnnnnnnnnnnnnnnnnnnnnnnnnnnnnnnnnnnnnnnnnnnnnnnnnnnnnnnnnnnnnnnnnnnnnnnnnnnnnnnnnnnnnnnnnnnnnnnnnnnnnnnnnnnnnnnnnnnnnnnnnnnnnnnnnnnnnnnnnnnnnnnnnnnnnnnnnnnnnnnnnnnnnnnnnnnnnnnnnnnnnnnnnnnnnnnnnnnnnnnnnnnnnnnnnnnnnnnnnnnnnnnnnnnnnnnnnnnnnnnnnnnnnnnnnnnnnnnnnnnnnnnnnnnnnnnnnnnnnnnnnnnnnnnnnnnnnnnnnnnnnnnnnnnnnnnnnnnnnnnnnnnnnnnnnnnnnnnnnnnnnnnnnnnnnnnnnnnnnnnnnnnnnnnnnnnnnnnnnnnnnnnnnnnnnnnnnnnnnnnnnnnnnnnnnnnnnnnnnnnnnnnnnnnnnnnnnnnnnnnnnnnnnnnnnnnnnnnnnnnnnnnnnnnnnnnnnnnnnnnnnnnnnnnnnnnnnnnnnnnnnnnnnnnnnnnnnnnnnnnnnnnnnnnnnnnnnnnnnnnnnnnnnnnnnnnnnnnnnnnnnnnnnnnnnnnnnnnnnnnnnnnnnnnnnnnnnnnnnnnnnnnnnnnnnnnnnnnnnnnnnnnnnnnnnnnnnnnnnnnnnnnnnnnnnnnnnnnnnnnnnnnnnnnnnnnnnnnnnnnnnnnnnnnnnnnnnnnnnnnnnnnnnnnnnnnnnnnnnnnnnnnnnnnnnnnnnnnnnnnnnnnnnnnnnnnnnnnnnnnnnnnnnnnnnnnnnnnnnnnnnnnnnnnnnnnnnnnnnnnnnnnnnnnnnnnnnnnnnnnnnnnnnnnnnnnnnnnnnnnnnnnnnnnnnnnnnnnnnnnnnnnnnnnnnnnnnnnnnnnnnnnnnnnnnnnnnnnnnnnnnnnnnnnnnnnnnnnnnnnnnnnnnnnnnnnnnnnnnnnnnnnnnnnnnnnnnnnnnnnnnnnnnnnnnnnnnnnnnnnnnnnnnnnnnnnnnnnnnnnnnnnnnnnnnnnnnnnnnnnnnnnnnnnnnnnnnnnnnnnnnnnnnnnnnnnnnnnnnnnnnnnnnnnnnnnnnnnnnnnnnnnnnnnnnnnnnnnnnnnnnnnnnnnnnnnnnnnnnnnnnnnnnnnnnnnnnnnnnnnnnnnnnnnnnnnnnnnnnnnnnnnnnnnnnnnnnnnnnnnnnnnnnnnnnnnnnnnnnnnnnnnnnnnnnnnnnnnnnnnnnnnnnnnnnnnnnnnnnnnnnnnnnnnnnnnnnnnnnnnnnnnnnnnnnnnnnnnnnnnnnnnnnnnnnnnnnnnnnnnnnnnnnnnnnnnnnnnnnnnnnnnnnnnnnnnnnnnnnnnnnnnnnnnnnnnnnnnnnnnnnnnnnnnnnnnnnnnnnnnnnnnnnnnnnnnnnnnnnnnnnnnnnnnnnnnnnnnnnnnnnnnnnnnnnnnnnnnnnnnnnnnnnnnnnnnnnnnnnnnnnnnnnnnnnnnnnnnnnnnnnnnnnnnnnnnnnnnnnnnnnnnnnnnnnnnnnnnnnnnnnnnnnnnnnnnnnnnnnnnnnnnnnnnnnnnnnnnnnnnnnnnnnnnnnnnnnnnnnnnnnnnnnnnnnnnnnnnnnnnnnnnnnnnnnnnnnnnnnnnnnnnnnnnnnnnnnnnnnnnnnnnnnnnnnnnnnnnnnnnnnnnnnnnnnnnnnnnnnnnnnnnnnnnnnnnnnnnnnnnnnnnnnnnnnnnnnnnnnnnnnnnnnnnnnnnnnnnnnnnnnnnnnnnnnnnnnnnnnnnnnnnnnnnnnnnnnnnnnnnnnnnnnnnnnnnnnnnnnnnnnnnnnnnnnnnnnnnnnnnnnnnnnnnnnnnnnnnnnnnnnnnnnnnnnnnnnnnnnnnnnnnnnnnnnnnnnnnnnnnnnnnnnnnnnnnnnnnnnnnnnnnnnnnnnnnnnnnnnnnnnnnnnnnnnnnnnnnnnnnnnnnnnnnnnnnnnnnnnnnnnnnnnnnnnnnnnnnnnnnnnnnnnnnnnnnnnnnnnnnnnnnnnnnnnnnnnnnnnnnnnnnnnnnnnnnnnnnnnnnnnnnnnnnnnnnnnnnnnnnnnnnnnnnnnnnnnnnnnnnnnnnnnnnnnnnnnnnnnnnnnnnnnnnnnnnnnnnnnnnnnnnnnnnnnnnnnnnnnnnnnnnnnnnnnnnnnnnnnnnnnnnnnnnnnnnnnnnnnnnnnnnnnnnnnnnnnnnnnnnnnnnnnnnnnnnnnnnnnnnnnnnnnnnnnnnnnnnnnnnnnnnnnnnnnnnnnnnnnnnnnnnnnnnnnnnnnnnnnnnnnnnnnnnnnnnnnnnnnnnnnnnnnnnnnnnnnnnnnnnnnnnnnnnnnnnnnnnnnnnnnnnnnnnnnnnnnnnnnnnnnnnnnnnnnnnnnnnnnnnnnnnnnnnnnnnnnnnnnnnnnnnnnnnnnnnnnnnnnnnnnnnnnnnnnnnnnnnnnnnnnnnnnnnnnnnnnnnnnnnnnnnnnnnnnnnnnnnnnnnnnnnnnnnnnnnnnnnnnnnnnnnnnnnnnnnnnnnnnnnnnnnnnnnnnnnnnnnnnnnnnnnnnnnnnnnnnnnnnnnnnnnnnnnnnnnnnnnnnnnnnnnnnnnnnnnnnnnnnnnnnnnnnnnnnnnnnnnnnnnnnnnnnnnnnnnnnnnnnnnnnnnnnnnnnnnnnnnnnnnnnnnnnnnnnnnnnnnnnnnnnnnnnnnnnnnnnnnnnnnnnnnnnnnnnnnnnnnnnnnnnnnnnnnnnnnnnnnnnnnnnnnnnnnnnnnnnnnnnnnnnnnnnnnnnnnnnnnnnnnnnnnnnnnnnnnnnnnnnnnnnnnnnnnnnnnnnnnnnnnnnnnnnnnnnnnnnnnnnnnnnnnnnnnnnnnnnnnnnnnnnnnnnnnnnnnnnnnnnnnnnnnnnnnnnnnnnnnnnnnnnnnnnnnnnnnnnnnnnnnnnnnnnnnnnnnnnnnnnnnnnnnnnnnnnnnnnnnnnnnnnnnnnnnnnnnnnnnnnnnnnnnnnnnnnnnnnnnnnnnnnnnnnnnnnnnnnnnnnnnnnnnnnnnnnnnnnnnnnnnnnnnnnnnnnnnnnnnnnnnnnnnnnnnnnnnnnnnnnnnnnnnnnnnnnnnnnnnnnnnnnnnnnnnnnnnnnnnnnnnnnnnnnnnnnnnnnnnnnnnnnnnnnnnnnnnnnnnnnnnnnnnnnnnnnnnnnnnnnnnnnnnnnnnnnnnnnnnnnnnnnnnnnnnnnnnnnnnnnnnnnnnnnnnnnnnnnnnnnnnnnnnnnnnnnnnnnnnnnnnnnnnnnnnnnnnnnnnnnnnnnnnnnnnnnnnnnnnnnnnnnnnnnnnnnnnnnnnnnnnnnnnnnnnnnnnnnnnnnnnnnnnnnnnnnnnnnnnnnnnnnnnnnnnnnnnnnnnnnnnnnnnnnnnnnnnnnnnnnnnnnnnnnnnnnnnnnnnnnnnnnnnnnnnnnnnnnnnnnnnnnnnnnnnnnnnnnnnnnnnnnnnnnnnnnnnnnnnnnnnnnnnnnnnnnnnnnnnnnnnnnnnnnnnnnnnnnnnnnnnnnnnnnnnnnnnnnnnnnnnnnnnnnnnnnnnnnnnnnnnnnnnnnnnnnnnnnnnnnnnnnnnnnnnnnnnnnnnnnnnnnnnnnnnnnnnnnnnnnnnnnnnnnnnnnnnnnnnnnnnnnnnnnnnnnnnnnnnnnnnnnnnnnnnnnnnnnnnnnnnnnnnnnnnnnnnnnnnnnnnnnnnnnnnnnnnnnnnnnnnnnnnnnnnnnnnnnnnnnnnnnnnnnnnnnnnnnnnnnnnnnnnnnnnnnnnnnnnnnnnnnnnnnnnnnnnnnnnnnnnnnnnnnnnnnnnnnnnnnnnnnnnnnnnnnnnnnnnnnnnnnnnnnnnnnnnnnnnnnnnnnnnnnnnnnnnnnnnnnnnnnnnnnnnnnnnnnnnnnnnnnnnnnnnnnnnnnnnnnnnnnnnnnnnnnnnnnnnnnnnnnnnnnnnnnnnnnnnnnnnnnnnnnnnnnnnnnnnnnnnnnnnnnnnnnnnnnnnnnnnnnnnnnnnnnnnnnnnnnnnnnnnnnnnnnnnnnnnnnnnnnnnnnnnnnnnnnnnnnnnnnnnnnnnnnnnnnnnnnnnnnnnnnnnnnnnnnnnnnnnnnnnnnnnnnnnnnnnnnnnnnnnnnnnnnnnnnnnnnnnnnnnnnnnnnnnnnnnnnnnnnnnnnnnnnnnnnnnnnnnnnnnnnnnnnnnnnnnnnnnnnnnnnnnnnnnnnnnnnnnnnnnnnnnnnnnnnnnnnnnnnnnnnnnnnnnnnnnnnnnnnnnnnnnnnnnnnnnnnnnnnnnnnnnnnnnnnnnnnnnnnnnnnnnnnnnnnnnnnnnnnnnnnnnnnnnnnnnnnnnnnnnnnnnnnnnnnnnnnnnnnnnnnnnnnnnnnnnnnnnnnnnnnnnnnnnnnnnnnnnnnnnnnnnnnnnnnnnnnnnnnnnnnnnnnnnnnnnnnnnnnnnnnnnnnnnnnnnnnnnnnnnnnnnnnnnnnnnnnnnnnnnnnnnnnnnnnnnnnnnnnnnnnnnnnnnnnnnnnnnnnnnnnnnnnnnnnnnnnnnnnnnnnnnnnnnnnnnnnnnnnnnnnnnnnnnnnnnnnnnnnnnnnnnnnnnnnnnnnnnnnnnnnnnnnnnnnnnnnnnnnnnnnnnnnnnnnnnnnnnnnnnnnnnnnnnnnnnnnnnnnnnnnnnnnnnnnnnnnnnnnnnnnnnnnnnnnnnnnnnnnnnnnnnnnnnnnnnnnnnnnnnnnnnnnnnnnnnnnnnnnnnnnnnnnnnnnnnnnnnnnnnnnnnnnnnnnnnnnnnnnnnnnnnnnnnnnnnnnnnnnnnnnnnnnnnnnnnnnnnnnnnnnnnnnnnnnnnnnnnnnnnnnnnnnnnnnnnnnnnnnnnnnnnnnnnnnnnnnnnnnnnnnnnnnnnnnnnnnnnnnnnnnnnnnnnnnnnnnnnnnnnnnnnnnnnnnnnnnnnnnnnnnnnnnnnnnnnnnnnnnnnnnnnnnnnnnnnnnnnnnnnnnnnnnnnnnnnnnnnnnnnnnnnnnnnnnnnnnnnnnnnnnnnnnnnnnnnnnnnnnnnnnnnnnnnnnnnnnnnnnnnnnnnnnnnnnnnnnnnnnnnnnnnnnnnnnnnnnnnnnnnnnnnnnnnnnnnnnnnnnnnnnnnnnnnnnnnnnnnnnnnnnnnnnnnnnnnnnnnnnnnnnnnnnnnnnnnnnnnnnnnnnnnnnnnnnnnnnnnnnnnnnnnnnnnnnnnnnnnnnnnnnnnnnnnnnnnnnnnnnnnnnnnnnnnnnnnnnnnnnnnnnnnnnnnnnnnnnnnnnnnnnnnnnnnnnnnnnnnnnnnnnnnnnnnnnnnnnnnnnnnnnnnnnnnnnnnnnnnnnnnnnnnnnnnnnnnnnnnnnnnnnnnnnnnnnnnnnnnnnnnnnnnnnnnnnnnnnnnnnnnnnnnnnnnnnnnnnnnnnnnnnnnnnnnnnnnnnnnnnnnnnnnnnnnnnnnnnnnnnnnnnnnnnnnnnnnnnnnnnnnnnnnnnnnnnnnnnnnnnnnnnnnnnnnnnnnnnnnnnnnnnnnnnnnnnnnnnnnnnnnnnnnnnnnnnnnnnnnnnnnnnnnnnnnnnnnnnnnnnnnnnnnnnnnnnnnnnnnnnnnnnnnnnnnnnnnnnnnnnnnnnnnnnnnnnnnnnnnnnnnnnnnnnnnnnnnnnnnnnnnnnnnnnnnnnnnnnnnnnnnnnnnnnnnnnnnnnnnnnnnnnnnnnnnnnnnnnnnnnnnnnnnnnnnnnnnnnnnnnnnnnnnnnnnnnnnnnnnnnnnnnnnnnnnnnnnnnnnnnnnnnnnnnnnnnnnnnnnnnnnnnnnnnnnnnnnnnnnnnnnnnnnnnnnnnnnnnnnnnnnnnnnnnnnnnnnnnnnnnnnnnnnnnnnnnnnnnnnnnnnnnnnnnnnnnnnnnnnnnnnnnnnnnnnnnnnnnnnnnnnnnnnnnnnnnnnnnnnnnnnnnnnnnnnnnnnnnnnnnnnnnnnnnnnnnnnnnnnnnnnnnnnnnnnnnnnnnnnnnnnnnnnnnnnnnnnnnnnnnnnnnnnnnnnnnnnnnnnnnnnnnnnnnnnnnnnnnnnnnnnnnnnnnnnnnnnnnnnnnnnnnnnnnnnnnnnnnnnnnnnnnnnnnnnnnnnnnnnnnnnnnnnnnnnnnnnnnnnnnnnnnnnnnnnnnnnnnnnnnnnnnnnnnnnnnnnnnnnnnnnnnnnnnnnnnnnnnnnnnnnnnnnnnnnnnnnnnnnnnnnnnnnnnnnnnnnnnnnnnnnnnnnnnnnnnnnnnnnnnnnnnnnnnnnnnnnnnnnnnnnnnnnnnnnnnnnnnnnnnnnnnnnnnnnnnnnnnnnnnnnnnnnnnnnnnnnnnnnnnnnnnnnnnnnnnnnnnnnnnnnnnnnnnnnnnnnnnnnnnnnnnnnnnnnnnnnnnnnnnnnnnnnnnnnnnnnnnnnnnnnnnnnnnnnnnnnnnnnnnnnnnnnnnnnnnnnnnnnnnnnnnnnnnnnnnnnnnnnnnnnnnnnnnnnnnnnnnnnnnnnnnnnnnnnnnnnnnnnnnnnnnnnnnnnnnnnnnnnnnnnnnnnnnnnnnnnnnnnnnnnnnnnnnnnnnnnnnnnnnnnnnnnnnnnnnnnnnnnnnnnnnnnnnnnnnnnnnnnnnnnnnnnnnnnnnnnnnnnnnnnnnnnnnnnnnnnnnnnnnnnnnnnnnnnnnnnnnnnnnnnnnnnnnnnnnnnnnnnnnnnnnnnnnnnnnnnnnnnnnnnnnnnnnnnnnnnnnnnnnnnnnnnnnnnnnnnnnnnnnnnnnnnnnnnnnnnnnnnnnnnnnnnnnnnnnnnnnnnnnnnnnnnnnnnnnnnnnnnnnnnnnnnnnnnnnnnnnnnnnnnnnnnnnnnnnnnnnnnnnnnnnnnnnnnnnnnnnnnnnnnnnnnnnnnnnnnnnnnnnnnnnnnnnnnnnnnnnnnnnnnnnnnnnnnnnnnnnnnnnnnnnnnnnnnnnnnnnnnnnnnnnnnnnnnnnnnnnnnnnnnnnnnnnnnnnnnnnnnnnnnnnnnnnnnnnnnnnnnnnnnnnnnnnnnnnnnnnnnnnnnnnnnnnnnnnnnnnnnnnnnnnnnnnnnnnnnnnnnnnnnnnnnnnnnnnnnnnnnnnnnnnnnnnnnnnnnnnnnnnnnnnnnnnnnnnnnnnnnnnnnnnnnnnnnnnnnnnnnnnnnnnnnnnnnnnnnnnnnnnnnnnnnnnnnnnnnnnnnnnnnnnnnnnnnnnnnnnnnnnnnnnnnnnnnnnnnnnnnnnnnnnnnnnnnnnnnnnnnnnnnnnnnnnnnnnnnnnnnnnnnnnnnnnnnnnnnnnnnnnnnnnnnnnnnnnnnnnnnnnnnnnnnnnnnnnnnnnnnnnnnnnnnnnnnnnnnnnnnnnnnnnnnnnnnnnnnnnnnnnnnnnnnnnnnnnnnnnnnnnnnnnnnnnnnnnnnnnnnnnnnnnnnnnnnnnnnnnnnnnnnnnnnnnnnnnnnnnnnnnnnnnnnnnnnnnnnnnnnnnnnnnnnnnnnnnnnnnnnnnnnnnnnnnnnnnnnnnnnnnnnnnnnnnnnnnnnnnnnnnnnnnnnnnnnnnnnnnnnnnnnnnnnnnnnnnnnnnnnnnnnnnnnnnnnnnnnnnnnnnnnnnnnnnnnnnnnnnnnnnnnnnnnnnnnnnnnnnnnnnnnnnnnnnnnnnnnnnnnnnnnnnnnnnnnnnnnnnnnnnnnnnnnnnnnnnnnnnnnnnnnnnnnnnnnnnnnnnnnnnnnnnnnnnnnnnnnnnnnnnnnnnnnnnnnnnnnnnnnnnnnnnnnnnnnnnnnnnnnnnnnnnnnnnnnnnnnnnnnnnnnnnnnnnnnnnnnnnnnnnnnnnnnnnnnnnnnnnnnnnnnnnnnnnnnnnnnnnnnnnnnnnnnnnnnnnnnnnnnnnnnnnnnnnnnnnnnnnnnnnnnnnnnnnnnnnnnnnnnnnnnnnnnnnnnnnnnnnnnnnnnnnnnnnnnnnnnnnnnnnnnnnnnnnnnnnnnnnnnnnnnnnnnnnnnnnnnnnnnnnnnnnnnnnnnnnnnnnnnnnnnnnnnnnnnnnnnnnnnnnnnnnnnnnnnnnnnnnnnnnnnnnnnnnnnnnnnnnnnnnnnnnnnnnnnnnnnnnnnnnnnnnnnnnnnnnnnnnnnnnnnnnnnnnnnnnnnnnnnnnnnnnnnnnnnnnnnnnnnnnnnnnnnnnnnnnnnnnnnnnnnnnnnnnnnnnnnnnnnnnnnnnnnnnnnnnnnnnnnnnnnnnnnnnnnnnnnnnnnnnnnnnnnnnnnnnnnnnnnnnnnnnnnnnnnnnnnnnnnnnnnnnnnnnnnnnnnnnnnnnnnnnnnnnnnnnnnnnnnnnnnnnnnnnnnnnnnnnnnnnnnnnnnnnnnnnnnnnnnnnnnnnnnnnnnnnnnnnnnnnnnnnnnnnnnnnnnnnnnnnnnnnnnnnnnnnnnnnnnnnnnnnnnnnnnnnnnnnnnnnnnnnnnnnnnnnnnnnnnnnnnnnnnnnnnnnnnnnnnnnnnnnnnnnnnnnnnnnnnnnnnnnnnnnnnnnnnnnnnnnnnnnnnnnnnnnnnnnnnnnnnnnnnnnnnnnnnnnnnnnnnnnnnnnnnnnnnnnnnnnnnnnnnnnnnnnnnnnnnnnnnnnnnnnnnnnnnnnnnnnnnnnnnnnnnnnnnnnnnnnnnnnnnnnnnnnnnnnnnnnnnnnnnnnnnnnnnnnnnnnnnnnnnnnnnnnnnnnnnnnnnnnnnnnnnnnnnnnnnnnnnnnnnnnnnnnnnnnnnnnnnnnnnnnnnnnnnnnnnnnnnnnnnnnnnnnnnnnnnnnnnnnnnnnnnnnnnnnnnnnnnnnnnnnnnnnnnnnnnnnnnnnnnnnnnnnnnnnnnnnnnnnnnnnnnnnnnnnnnnnnnnnnnnnnnnnnnnnnnnnnnnnnnnnnnnnnnnnnnnnnnnnnnnnnnnnnnnnnnnnnnnnnnnnnnnnnnnnnnnnnnnnnnnnnnnnnnnnnnnnnnnnnnnnnnnnnnnnnnnnnnnnnnnnnnnnnnnnnnnnnnnnnnnnnnnnnnnnnnnnnnnnnnnnnnnnnnnnnnnnnnnnnnnnnnnnnnnnnnnnnnnnnnnnnnnnnnnnnnnnnnnnnnnnnnnnnnnnnnnnnnnnnnnnnnnnnnnnnnnnnnnnnnnnnnnnnnnnnnnnnnnnnnnnnnnnnnnnnnnnnnnnnnnnnnnnnnnnnnnnnnnnnnnnnnnnnnnnnnnnnnnnnnnnnnnnnnnnnnnnnnnnnnnnnnnnnnnnnnnnnnnnnnnnnnnnnnnnnnnnnnnnnnnnnnnnnnnnnnnnnnnnnnnnnnnnnnnnnnnnnnnnnnnnnnnnnnnnnnnnnnnnnnnnnnnnnnnnnnnnnnnnnnnnnnnnnnnnnnnnnnnnnnnnnnnnnnnnnnnnnnnnnnnnnnnnnnnnnnnnnnnnnnnnnnnnnnnnnnnnnnnnnnnnnnnnnnnnnnnnnnnnnnnnnnnnnnnnnnnnnnnnnnnnnnnnnnnnnnnnnnnnnnnnnnnnnnnnnnnnnnnnnnnnnnnnnnnnnnnnnnnnnnnnnnnnnnnnnnnnnnnnnnnnnnnnnnnnnnnnnnnnnnnnnnnnnnnnnnnnnnnnnnnnnnnnnnnnnnnnnnnnnnnnnnnnnnnnnnnnnnnnnnnnnnnnnnnnnnnnnnnnnnnnnnnnnnnnnnnnnnnnnnnnnnnnnnnnnnnnnnnnnnnnnnnnnnnnnnnnnnnnnnnnnnnnnnnnnnnnnnnnnnnnnnnnnnnnnnnnnnnnnnnnnnnnnnnnnnnnnnnnnnnnnnnnnnnnnnnnnnnnnnnnnnnnnnnnnnnnnnnnnnnnnnnnnnnnnnnnnnnnnnnnnnnnnnnnnnnnnnnnnnnnnnnnnnnnnnnnnnnnnnnnnnnnnnnnnnnnnnnnnnnnnnnnnnnnnnnnnnnnnnnnnnnnnnnnnnnnnnnnnnnnnnnnnnnnnnnnnnnnnnnnnnnnnnnnnnnnnnnnnnnnnnnnnnnnnnnnnnnnnnnnnnnnnnnnnnnnnnnnnnnnnnnnnnnnnnnnnnnnnnnnnnnnnnnnnnnnnnnnnnnnnnnnnnnnnnnnnnnnnnnnnnnnnnnnnnnnnnnnnnnnnnnnnnnnnnnnnnnnnnnnnnnnnnnnnnnnnnnnnnnnnnnnnnnnnnnnnnnnnnnnnnnnnnnnnnnnnnnnnnnnnnnnnnnnnnnnnnnnnnnnnnnnnnnnnnnnnnnnnnnnnnnnnnnnnnnnnnnnnnnnnnnnnnnnnnnnnnnnnnnnnnnnnnnnnnnnnnnnnnnnnnnnnnnnnnnnnnnnnnnnnnnnnnnnnnnnnnnnnnnnnnnnnnnnnnnnnnnnnnnnnnnnnnnnnnnnnnnnnnnnnnnnnnnnnnnnnnnnnnnnnnnnnnnnnnnnnnnnnnnnnnnnnnnnnnnnnnnnnnnnnnnnnnnnnnnnnnnnnnnnnnnnnnnnnnnnnnnnnnnnnnnnnnnnnnnnnnnnnnnnnnnnnnnnnnnnnnnnnnnnnnnnnnnnnnnnnnnnnnnnnnnnnnnnnnnnnnnnnnnnnnnnnnnnnnnnnnnnnnnnnnnnnnnnnnnnnnnnnnnnnnnnnnnnnnnnnnnnnnnnnnnnnnnnnnnnnnnnnnnnnnnnnnnnnnnnnnnnnnnnnnnnnnnnnnnnnnnnnnnnnnnnnnnnnnnnnnnnnnnnnnnnnnnnnnnnnnnnnnnnnnnnnnnnnnnnnnnnnnnnnnnnnnnnnnnnnnnnnnnnnnnnnnnnnnnnnnnnnnnnnnnnnnnnnnnnnnnnnnnnnnnnnnnnnnnnnnnnnnnnnnnnnnnnnnnnnnnnnnnnnnnnnnnnnnnnnnnnnnnnnnnnnnnnnnnnnnnnnnnnnnnnnnnnnnnnnnnnnnnnnnnnnnnnnnnnnnnnnnnnnnnnnnnnnnnnnnnnnnnnnnnnnnnnnnnnnnnnnnnnnnnnnnnnnnnnnnnnnnnnnnnnnnnnnnnnnnnnnnnnnnnnnnnnnnnnnnnnnnnnnnnnnnnnnnnnnnnnnnnnnnnnnnnnnnnnnnnnnnnnnnnnnnnnnnnnnnnnnnnnnnnnnnnnnnnnnnnnnnnnnnnnnnnnnnnnnnnnnnnnnnnnnnnnnnnnnnnnnnnnnnnnnnnnnnnnnnnnnnnnnnnnnnnnnnnnnnnnnnnnnnnnnnnnnnnnnnnnnnnnnnnnnnnnnnnnnnnnnnnnnnnnnnnnnnnnnnnnnnnnnnnnnnnnnnnnnnnnnnnnnnnnnnnnnnnnnnnnnnnnnnnnnnnnnnnnnnnnnnnnnnnnnnnnnnnnnnnnnnnnnnnnnnnnnnnnnnnnnnnnnnnnnnnnnnnnnnnnnnnnnnnnnnnnnnnnnnnnnnnnnnnnnnnnnnnnnnnnnnnnnnnnnnnnnnnnnnnnnnnnnnnnnnnnnnnnnnnnnnnnnnnnnnnnnnnnnnnnnnnnnnnnnnnnnnnnnnnnnnnnnnnnnnnnnnnnnnnnnnnnnnnnnnnnnnnnnnnnnnnnnnnnnnnnnnnnnnnnnnnnnnnnnnnnnnnnnnnnnnnnnnnnnnnnnnnnnnnnnnnnnnnnnnnnnnnnnnnnnnnnnnnnnnnnnnnnnnnnnnnnnnnnnnnnnnnnnnnnnnnnnnnnnnnnnnnnnnnnnnnnnnnnnnnnnnnnnnnnnnnnnnnnnnnnnnnnnnnnnnnnnnnnnnnnnnnnnnnnnnnnnnnnnnnnnnnnnnnnnnnnnnnnnnnnnnnnnnnnnnnnnnnnnnnnnnnnnnnnnnnnnnnnnnnnnnnnnnnnnnnnnnnnnnnnnnnnnnnnnnnnnnnnnnnnnnnnnnnnnnnnnnnnnnnnnnnnnnnnnnnnnnnnnnnnnnnnnnnnnnnnnnnnnnnnnnnnnnnnnnnnnnnnnnnnnnnnnnnnnnnnnnnnnnnnnnnnnnnnnnnnnnnnnnnnnnnnnnnnnnnnnnnnnnnnnnnnnnnnnnnnnnnnnnnnnnnnnnnnnnnnnnnnnnnnnnnnnnnnnnnnnnnnnnnnnnnnnnnnnnnnnnnnnnnnnnnnnnnnnnnnnnnnnnnnnnnnnnnnnnnnnnnnnnnnnnnnnnnnnnnnnnnnnnnnnnnnnnnnnnnnnnnnnnnnnnnnnnnnnnnnnnnnnnnnnnnnnnnnnnnnnnnnnnnnnnnnnnnnnnnnnnnnnnnnnnnnnnnnnnnnnnnnnnnnnnnnnnnnnnnnnnnnnnnnnnnnnnnnnnnnnnnnnnnnnnnnnnnnnnnnnnnnnnnnnnnnnnnnnnnnnnnnnnnnnnnnnnnnnnnnnnnnnnnnnnnnnnnnnnnnnnnnnnnnnnnnnnnnnnnnnnnnnnnnnnnnnnnnnnnnnnnnnnnnnnnnnnnnnnnnnnnnnnnnnnnnnnnnnnnnnnnnnnnnnnnnnnnnnnnnnnnnnnnnnnnnnnnnnnnnnnnnnnnnnnnnnnnnnnnnnnnnnnnnnnnnnnnnnnnnnnnnnnnnnnnnnnnnnnnnnnnnnnnnnnnnnnnnnnnnnnnnnnnnnnnnnnnnnnnnnnnnnnnnnnnnnnnnnnnnnnnnnnnnnnnnnnnnnnnnnnnnnnnnnnnnnnnnnnnnnnnnnnnnnnnnnnnnnnnnnnnnnnnnnnnnnnnnnnnnnnnnnnnnnnnnnnnnnnnnnnnnnnnnnnnnnnnnnnnnnnnnnnnnnnnnnnnnnnnnnnnnnnnnnnnnnnnnnnnnnnnnnnnnnnnnnnnnnnnnnnnnnnnnnnnnnnnnnnnnnnnnnnnnnnnnnnnnnnnnnnnnnnnnnnnnnnnnnnnnnnnnnnnnnnnnnnnnnnnnnnnnnnnnnnnnnnnnnnnnnnnnnnnnnnnnnnnnnnnnnnnnnnnnnnnnnnnnnnnnnnnnnnnnnnnnnnnnnnnnnnnnnnnnnnnnnnnnnnnnnnnnnnnnnnnnnnnnnnnnnnnnnnnnnnnnnnnnnnnnnnnnnnnnnnnnnnnnnnnnnnnnnnnnnnnnnnnnnnnnnnnnnnnnnnnnnnnnnnnnnnnnnnnnnnnnnnnnnnnnnnnnnnnnnnnnnnnnnnnnnnnnnnnnnnnnnnnnnnnnnnnnnnnnnnnnnnnnnnnnnnnnnnnnnnnnnnnnnnnnnnnnnnnnnnnnnnnnnnnnnnnnnnnnnnnnnnnnnnnnnnnnnnnnnnnnnnnnnnnnnnnnnnnnnnnnnnnnnnnnnnnnnnnnnnnnnnnnnnnnnnnnnnnnnnnnnnnnnnnnnnnnnnnnnnnnnnnnnnnnnnnnnnnnnnnnnnnnnnnnnnnnnnnnnnnnnnnnnnnnnnnnnnnnnnnnnnnnnnnnnnnnnnnnnnnnnnnnnnnnnnnnnnnnnnnnnnnnnnnnnnnnnnnnnnnnnnnnnnnnnnnnnnnnnnnnnnnnnnnnnnnnnnnnnnnnnnnnnnnnnnnnnnnnnnnnnnnnnnnnnnnnnnnnnnnnnnnnnnnnnnnnnnnnnnnnnnnnnnnnnnnnnnnnnnnnnnnnnnnnnnnnnnnnnnnnnnnnnnnnnnnnnnnnnnnnnnnnnnnnnnnnnnnnnnnnnnnnnnnnnnnnnnnnnnnnnnnnnnnnnnnnnnnnnnnnnnnnnnnnnnnnnnnnnnnnnnnnnnnnnnnnnnnnnnnnnnnnnnnnnnnnnnnnnnnnnnnnnnnnnnnnnnnnnnnnnnnnnnnnnnnnnnnnnnnnnnnnnnnnnnnnnnnnnnnnnnnnnnnnnnnnnnnnnnnnnnnnnnnnnnnnnnnnnnnnnnnnnnnnnnnnnnnnnnnnnnnnnnnnnnnnnnnnnnnnnnnnnnnnnnnnnnnnnnnnnnnnnnnnnnnnnnnnnnnnnnnnnnnnnnnnnnnnnnnnnnnnnnnnnnnnnnnnnnnnnnnnnnnnnnnnnnnnnnnnnnnnnnnnnnnnnnnnnnnnnnnnnnnnnnnnnnnnnnnnnnnnnnnnnnnnnnnnnnnnnnnnnnnnnnnnnnnnnnnnnnnnnnnnnnnnnnnnnnnnnnnnnnnnnnnnnnnnnnnnnnnnnnnnnnnnnnnnnnnnnnnnnnnnnnnnnnnnnnnnnnnnnnnnnnnnnnnnnnnnnnnnnnnnnnnnnnnnnnnnnnnnnnnnnnnnnnnnnnnnnnnnnnnnnnnnnnnnnnnnnnnnnnnnnnnnnnnnnnnnnnnnnnnnnnnnnnnnnnnnnnnnnnnnnnnnnnnnnnnnnnnnnnnnnnnnnnnnnnnnnnnnnnnnnnnnnnnnnnnnnnnnnnnnnnnnnnnnnnnnnnnnnnnnnnnnnnnnnnnnnnnnnnnnnnnnnnnnnnnnnnnnnnnnnnnnnnnnnnnnnnnnnnnnnnnnnnnnnnnnnnnnnnnnnnnnnnnnnnnnnnnnnnnnnnnnnnnnnnnnnnnnnnnnnnnnnnnnnnnnnnnnnnnnnnnnnnnnnnnnnnnnnnnnnnnnnnnnnnnnnnnnnnnnnnnnnnnnnnnnnnnnnnnnnnnnnnnnnnnnnnnnnnnnnnnnnnnnnnnnnnnnnnnnnnnnnnnnnnnnnnnnnnnnnnnnnnnnnnnnnnnnnnnnnnnnnnnnnnnnnnnnnnnnnnnnnnnnnnnnnnnnnnnnnnnnnnnnnnnnnnnnnnnnnnnnnnnnnnnnnnnnnnnnnnnnnnnnnnnnnnnnnnnnnnnnnnnnnnnnnnnnnnnnnnnnnnnnnnnnnnnnnnnnnnnnnnnnnnnnnnnnnnnnnnnnnnnnnnnnnnnnnnnnnnnnnnnnnnnnnnnnnnnnnnnnnnnnnnnnnnnnnnnnnnnnnnnnnnnnnnnnnnnnnnnnnnnnnnnnnnnnnnnnnnnnnnnnnnnnnnnnnnnnnnnnnnnnnnnnnnnnnnnnnnnnnnnnnnnnnnnnnnnnnnnnnnnnnnnnnnnnnnnnnnnnnnnnnnnnnnnnnnnnnnnnnnnnnnnnnnnnnnnnnnnnnnnnnnnnnnnnnnnnnnnnnnnnnnnnnnnnnnnnnnnnnnnnnnnnnnnnnnnnnnnnnnnnnnnnnnnnnnnnnnnnnnnnnnnnnnnnnnnnnnnnnnnnnnnnnnnnnnnnnnnnnnnnnnnnnnnnnnnnnnnnnnnnnnnnnnnnnnnnnnnnnnnnnnnnnnnnnnnnnnnnnnnnnnnnnnnnnnnnnnnnnnnnnnnnnnnnnnnnnnnnnnnnnnnnnnnnnnnnnnnnnnnnnnnnnnnnnnnnnnnnnnnnnnnnnnnnnnnnnnnnnnnnnnnnnnnnnnnnnnnnnnnnnnnnnnnnnnnnnnnnnnnnnnnnnnnnnnnnnnnnnnnnnnnnnnnnnnnnnnnnnnnnnnnnnnnnnnnnnnnnnnnnnnnnnnnnnnnnnnnnnnnnnnnnnnnnnnnnnnnnnnnnnnnnnnnnnnnnnnnnnnnnnnnnnnnnnnnnnnnnnnnnnnnnnnnnnnnnnnnnnnnnnnnnnnnnnnnnnnnnnnnnnnnnnnnnnnnnnnnnnnnnnnnnnnnnnnnnnnnnnnnnnnnnnnnnnnnnnnnnnnnnnnnnnnnnnnnnnnnnnnnnnnnnnnnnnnnnnnnnnnnnnnnnnnnnnnnnnnnnnnnnnnnnnnnnnnnnnnnnnnnnnnnnnnnnnnnnnnnnnnnnnnnnnnnnnnnnnnnnnnnnnnnnnnnnnnnnnnnnnnnnnnnnnnnnnnnnnnnnnnnnnnnnnnnnnnnnnnnnnnnnnnnnnnnnnnnnnnnnnnnnnnnnnnnnnnnnnnnnnnnnnnnnnnnnnnnnnnnnnnnnnnnnnnnnnnnnnnnnnnnnnnnnnnnnnnnnnnnnnnnnnnnnnnnnnnnnnnnnnnnnnnnnnnnnnnnnnnnnnnnnnnnnnnnnnnnnnnnnnnnnnnnnnnnnnnnnnnnnnnnnnnnnnnnnnnnnnnnnnnnnnnnnnnnnnnnnnnnnnnnnnnnnnnnnnnnnnnnnnnnnnnnnnnnnnnnnnnnnnnnnnnnnnnnnnnnnnnnnnnnnnnnnnnnnnnnnnnnnnnnnnnnnnnnnnnnnnnnnnnnnnnnnnnnnnnnnnnnnnnnnnnnnnnnnnnnnnnnnnnnnnnnnnnnnnnnnnnnnnnnnnnnnnnnnnnnnnnnnnnnnnnnnnnnnnnnnnnnnnnnnnnnnnnnnnnnnnnnnnnnnnnnnnnnnnnnnnnnnnnnnnnnnnnnnnnnnnnnnnnnnnnnnnnnnnnnnnnnnnnnnnnnnnnnnnnnnnnnnnnnnnnnnnnnnnnnnnnnnnnnnnnnnnnnnnnnnnnnnnnnnnnnnnnnnnnnnnnnnnnnnnnnnnnnnnnnnnnnnnnnnnnnnnnnnnnnnnnnnnnnnnnnnnnnnnnnnnnnnnnnnnnnnnnnnnnnnnnnnnnnnnnnnnnnnnnnnnnnnnnnnnnnnnnnnnnnnnnnnnnnnnnnnnnnnnnnnnnnnnnnnnnnnnnnnnnnnnnnnnnnnnnnnnnnnnnnnnnnnnnnnnnnnnnnnnnnnnnnnnnnnnnnnnnnnnnnnnnnnnnnnnnnnnnnnnnnnnnnnnnnnnnnnnnnnnnnnnnnnnnnnnnnnnnnnnnnnnnnnnnnnnnnnnnnnnnnnnnnnnnnnnnnnnnnnnnnnnnnnnnnnnnnnnnnnnnnnnnnnnnnnnnnnnnnnnnnnnnnnnnnnnnnngccgctgggacctcttcaagcttcaggtacagcaggagaaatatgcgccggtggcggggatgggcggggcgaccgagccgatggttgatgatgatgtctcgccggtctcaccggttaagaaggggcgtcagggccggcgcaggtaagctcccaagctaagacaaccgtgtcacagcaccatgctaaaatacaccgtgggtatcggaccacctcagctagcggtcacaaatagggccaggaggctaaagacgttgacctacaatctgcttgaaaaacagtggattcccgtcctctggacagatggcaatgtctcacgggtagggattagagaggcactaacacaagcaggttccattcgacagattgccgccagcaatccaatggaccgcgtggcgattttccggtttctgctggctctgctttactggtgccggggcgacccaccgactacgacagacactgcccccgaagaatccttcccaattgattggttttccaaactcgataccaatagagagtgtttcaatttgcttggcggtggtaagagattctatcaatacagggaacagggcgacagactactcacggttaactacctcattcacgagataccatcaggcactaactttaaccattttcggcactcgatagacggaactaaaggcttgtgtccggcatgttgtgctttgggactgctgcggctaccgatgttcgcgacacaggggggacagggcaagtcgcccggcatcaacgcaaagccgccaatctatgctattcccgtgggcgagacccttgcggagaccttgcggctttcgtggcggcaggtgtccaatttgggaacgccagcgtgggaaaagccggacttgccacttcccggggtgggagaggtaccgctactaactgggctgacgtggctcccacgccgagtttggttagacgagccgcagaaatctttgacacactgcatttcgtgtggccgtctggataatgtgatactgtccagcgtctttgctggcaaagggagtgccaagacagatgatggcactaagcgcgtctggcgtgacccgcacgttatctacaaaccagccaagaacggagaaacttcactgcattgggcagacgtaataggaagcgctgacgccggtgccgggcagtggtccaaaataatggctgggttactccagaatccccaaacggagcggaccagagcgtggatagttggcttttcgtcagaccagaataaatacttcgaggcatcggaattgtttctcccctggccaggctcattcgtttctatcgatgagctaagccaatggcaacagtcaaacaataatctaagccgaaagctgatgcagcttgacgaaaaacgatctcgaaaccatattgatatagcctcggtgctcgccgctattcgtccccacgttgaaagcagggtctttgcgaaagccgaagagttgctgtctggtgacaacacggcgtgggagcgcgcggccagcgaataccgacccatgatgcaaatcatttctaggtcattagcgcccggtgtaaccacggtagcagtcaaacgacgccgagaaatcggcaatgcactccctcaaacgggatcgacgtcgacgccagcaaagaaacccagcaaggggaaggcgaggaagtaaatgggtccaacagcgactgaggaatacattgagatcctgacgcagttgaagtccggtgacctcggcctgttgcgaatacatgccgggcagggtctggatgagtccgtccagggctttgacctgttcgccggtctatggtggccgttacagaacaagggcccgtttgcaccgcggcgggaagtagcctggctgattgccaagctttatgccttttcgcccatcccacattctaccggtgacacgctggcttgccaattgcgtcgttgtcaaccagacgacgagaacagccgaaggcgatttcaacagaaattcgatgaaatgttgcttatgccgttggctagtattgagccagccctgcgatgggcgctggcccaggtagccgatactggcaaaccgcttgattgggtaagactgacgaatgacctgtcaatatgggaacgtgaagcaacccgcctgaagtgggcggaggaatttcttggtaactaaggaggataatagcaatgctgattgaagtccacatgattcagaaccacagtccggccaatctgaaccgggatgacctgggtgcgcccaagacctgctacttcggcggtgtgctccgttcgcgcatctccagccagtgcctcaagcgcagcatccgcatgagcgatgagttcaaagcattactcaatggcgtccgcacacggcagttggcgaaattgatcgccaggggtactaaaggagacccgtttgatgaaaaagtacaagccgaccccaaagtcgtagagaaggccgagaagatcctttccgattgtggtttcaagccaaagaaggacgcggacaggagcaagatgctggtctacaccacgcgtgacgccataaaggagatgtccgcacttttagggaacggcggcgagaaaaacgacgccgtacttgcaaaggatttttccaggctaatcgccgaacgcgtctttgcaccggatatggcactgtcagggagaatgctggaaccttcggaggccagcgacttgtggaaagaccttgatactactgtagaggcggctttgcaggttgcacatgccttctccacgcacgaggcccgtcccgaagtagactattacgtcgccgcagatgacatccccggtactgatgcgggcgcaggctacgttgacgaagccatgtttacctccgcctgtttttacaagtacttttccatccactgggaacagttgctcaagaatctgggcggcgagatcaacctggcggcccacaccgtcggggcattccttcgcggggcggcggtggtcaccccaaccggcaagcagaacagcttcgcagcacacaattacccggatggcatactggttgagattcgcaatacgcctgttaactatgccaatgcttttgctcgaccggttgttcgagatgggcgggacattatctcccagagcatcgcccagctgggccagtacgtccatgatctggacaccggttttggcccgccacaacagcgcttctggttttctcctaacctgcggtatcccttgactgccagaacaaaggtaaaggaaggagaaagggaggtcgaaaaggacatcgacctgacagggaacaaagtcaagtctctggacgaattgataccggcggtggtcagcgccatcggctgtaactgggaagaagccaagaaagctatcataaatctatcggtgtcagcatgatggccaataccctgtttttacggttcgagggtccacttcaggcgtggggcaaccacgagtccaaatttgttgtccggcgcaccgctgaagctccaactaaatcaggggttatcggactgctctgcgcggcgctcggcataccacggtcagccgccgctgaaacatggcttccgaagctgtctgccctgaaaatgggtgtccgtatcgacagcccgggcgttcgctggtgggactatcacactgtcggcgccaggattggcatgcggaaagctgacggtggcttcaagaagcctgaatcaggaaaggagactttactcacccgccgtgaatacttgtgtgacgccagttttctcgttgcgctacagggcgatgccacactggttacggaactaggaacggcgataacgaacccaaaatggacactttacctcggccgcaaatgctgtcccccgtcacgcccgctgctggaacaccccgccggtgatttccctgacttactttcggcgctccaatcagtcccatggcgaaagcggctgaaggacgacccaccgcaagaaaccgttgattgcctgcttgactggcttccgacgccgcaacagcctgtagcaccaactgatgcgctcgtgtggtacgatgtcccgctcacgttagacccgccttcccattctccccgctttgttattcgacgaaaactacgggttggtaccgaggttagtatcgcagaaaagccggcgcaaagcgagactcccagacccctccgacttcgtgctgactatcagaacactgaatataagaaggctcgcgccacgcgtttaagagcagactatggcctttgtgttttctgcaaggcacccgccaccaccgtccagcacatcacctaccgccgcgctggcggcggggaaactcacgatgacctgcgctcgctgtgccgcctctgtcacgacgcggtcactatgattgaatacggtctggacatgggcttagatcgcattaaccccgaagaccccaaatggcgggatgaaatcattcagaaacggggtgaaatcatctgttttcgctcgttggagacccgccgccgtcgcctcagtccggaggaggtggaatagccatgtatctttcgtgccttcttgtcaatacgggggacaaccccgaccgccctcatcccggacgactgtggttacggaacgtgtaccgtgtacatcagcgcctttgcatgggcttcccctcggcggaatctaaggaacatgacccgcttttcttaaaaccatataagcccggccgctttccggaagaccgttacctgtctgacagaaagaagctggaggtgcctgacgatgtcctcaggcaaattcactcaccgcgagataaccgcagtggctttctcttccgcatagacccgctgccctcaggccgcgccatgataatcgtacaatcagcggtcaaaccggactgggactatgcctttcgtaatgctatgcacttgcttgccgcaacgcctgcaattaagccatatgacccgcattttcagaacggacagtgtctcgtttttcggctgttggctaaccctacccgcaagagggacagggaaaaccggcccgcaggcaggaataactggggcaggagagtcccagtacctcgtaatgaaattgaagcgtggctcaccagccgtgccggccggtatggatttagcgtggagtgcttcgataacgtgcaaacagggtatgttgtagcttccaaaggcaaggagatagatggtagcagtgagattgccgacgatgaagaagcaaaagggaggttgaggcactttttctatgcgcgttacgaaggcaaactccgtgtaaccgccgctgattctctccgcagtgcaattatacagggtatcggccccgccaagggcttcggcttcggattgctgtccgtagcccggtcaagggagtgagttgtgcgcaccctttatgagcttccgcattttaaggaccgctggagctatctttatctggaaatgggccgtctcgacgtcagtgacaatgggttgagtttccatcagggtgattcggtaacgccggtgccgatcgaccagctaagcgtggtgatgctcggtccggggtcaaccattacgcacgctgccgtgaaatcgctctcccagaataactgcttactcgcctggactggacaggacggcattcgtttttattcggcgggtatcggtggtacatatagctcccggagacttatttggcaggcgcggttggccagtgatgaatcaaagaggctggaagtcgcctggcgcatgtataattttcgtttcaagaagcccgtaccaaccatcgtcagccttgaggagatccgcggtatggagggaatccgggttaggcgggcctatgccgaggcttcagccaagtacggcgttgagtggaaaggacggcgctatgaccagaaagactgggccaaaggtgacccggtaaatcgggcgctttcggcggccaatgcctgcctttacgccgtctgccatgccgcgatactgtctgcaggctactccccggggctgggctttattcataccggcaggatgctgagcttcgtctatgacatcggggacctgtacaagactgagacaacgattccgattgctttcaaggttgccgcacgggccccgcaggacattgaaagggcggtacgtacggagtgccgccaggcgttttacgacttcaaactaatggaacgaatcttacctgatattgcggaggtgctcggtgttagtgatgatactggagaaagtgccgacgagcttgaggggcgcattgtcacggtggcttctggaaccgaggacgggagttttcctgggcaatccgagtgcgagagtcagggacgagctctgggcacggtcgctcaaaaataccagggaaagcgggacgatattgcaggtctggacggacaagaatccgcagggattttcctatcgtcaggcaggcaaccactggcggcaattggtcgacttcgaaggattagccctggtaagtataaggtcgcgcgacgccgggccggaggaggcaatgcattccgataaccgaccttagtgagcgtgagtcagcgaacacaggcacatgggcgttgacactggaatgcctcaaccacctttgaggtagttagggcttggctttgaacttctagggtcttccccacgcatgtgggggtgaaccgctaccacatccttaaaaatactagcacgccctgtcttccccacgcatgtgggggtgaaccgtacgagaggcggcgcaagaaggatcagctcaagtcttccccacgcatgtgggggtgaaccggatttgctggtcgatgggtataggcctgaggaagtcttccccacgcatgtgggggtgaaccggtggcgcagtggatagccgaccgggtgctggcgtcttccccacgcatgtgggggtgaaccgacatgtttgccgtgggtcgattggcgggtgacgtcttccccacgcatgtgggggtgaaccgcgcactcgcgatgggtcaccaccaatattcgcgtcttccccacgcatgtgggggtgaaccagtatcggatcccatatatttcggggaccaaccgtcttccccacgcatgtgggggtgaaccggtgtgtggtcgctggaggcgcagcggaatggagtcttccccacgcatgtgggggtgaaccgcgcactcgcgatgggtcaccaccaatattcgcgtcttccccacgcatgtgggggtgaaccgacacgcggcacgagcgatattgatgagatatcgtcttccccacgcatgtgggggtgaaccggcgacgacgccaatcaccacagtgaccagtccgtcttccccacgcatgtgggggtgaaccgtaaacgcttacttacattggtcgaaagtaaacgtcttccccacgcatgtgggggtgaaccgacacgcggcacgagcgatattgatgagatatcgtcttccccacgcatgtgggggtgaaccgcgttacttcccgcataagcgggtgctgcgggagtcttccccacgcatgtgggggtgaaccgggtaaggtgcgctcagcaactgtaattgacggcgtcttccccacgcatgtgggggtgaaccgtaccgtctcggtggaggcggcgggctgctcggtcttccccacgcatgtgggggtgaaccgatgttgatccggatgtcgtttccggatttaccgtcttccccacgcatgtgggggtgaaccggctaggccgactatatgccagctcagccagtcgtcttccccacgcatgtgggggtgaaccgttcactgggtccacaaagttcactgggtccatgtcttccccacgcatgtgggggtgaaccgccagttttcaagcgtgttaggtctgctaaaacgtcttccccacgcatgtgggggtgaaccgaccagctcaatcccttcgactacgtgcaggctgtcttccccacgcatgtgggggtgaaccgttcactgggtccacaaagttcactgggtccacgtcttccccacgcatgtgggggtgaaccgccagttttcaagcgtgttaggtctgctaaaacgtcttccccacgcatgtgggggtgaaccgtcggatgaatggtaagatagacgtcaactgaggtcgcttcccgcacgggggcgtggattgaaagtcgaccggtagtccggcaggcgccggcagggatgcaccggcagagaataccggcggcggttaatcggggcggctgagatagatgcgtctgtgaccgaaaaaggcgcctgagaaacttcaggtcctgatcttagaaacggtatccatatcaatgatacgcgtcgggttagccctgttgcccgggtcaagcgccttcttgatgccggacagcagcctgagccctaccgggtacgaaggccagacgacctttcccgggccgatgacactgagcgcgctgacggcccgctcttttacttcgcacgatgtggcttcgaagaggcacatggccgtcttcaaatcatcctcgtcgttcttctctctgggaaagtccgactcggcaagggcgaagtgcccgaggtcatagggggcaatccaggccggatggtcgctgtccagaaacggcggggtgtacctgtcgataatctcccatgccaccggaaaacttcgttcggcatcgtcaatcgaatcaaaagtgaggtttgtcagcgaataaccgccgccaaccctcatcatgcggcagccgttggtgtcacgcacccagttgttggcggcacagggcacccaccggccgtagacctcgtcggacagcggcctgccatcatattccagcgcaatctgcctgaggactttttcctcgtactcgacctgtcgggatgaagcatacccccagagacagacggcaacacagttctttacattctgctgccagtagccgctgacccaggcatcccagtattcctggcgcgatttggcccaccaccagttgtaatagtccgggggccacatgtggacaatccccccgatttccgcccgcgaaatctcatacatggcatacacggcccgtctcatgtcgggaaaaacaaacagcagccaccggaaacggtcccgcggtagttcggacctcttatcgggagcaaccccttcaaccgggaaaaccggcggaccgggccatgggtacagttttattgccagcctggttactatgcccagagcgccaacactgccgacaacgcccctcagtatcgctctggcgtcaggccccggcccctcaccccagaaatatccggcaccttcaacacttaacgagcccgtccgcagaatatcgccgctgggaagcacccactcaaccccgagtatgttcctggaagaaaacccgctcctgtaagccgtgccctgcataccaaacgccacgtggttggcgagactgcaggactgcgccccggcctccgggactccgttgaccaggccccatttcatcgcctcggccgatacctgcgcgtgggtgacgtacggctcaacgatggcgaacatattgcgccggtcaatcgtcagccggtccatccgcttggtatcgataagcacccagtacggtttgacggcggcggtggtgccgaaggccaaaccggacccgattacagagtagggatacccaagccgatttgccaggcggacaattgcctgtatatcctgcgtgctgcccggcatgacaatgaactctgcccgtccgcgcgtggccacgctcggcgcctgagactcacggctgtaggcctcaacgacatacgggtcatcacacacccactgccgaccgagtatatccgaaagactcctgtatattagattgtgtttctcgtcgcccgatggcatatcactcccttacaggcctacagcgagttattcaccagttgcaccaggtcaagcacctcaagacgggagctccggccggataaggcatcaatgaagttccgctcacaccagggacaggccgttaccagtgccccggcgccggtcgattccgcctcttctaccctctctaacgcagaaaacctgttgaagtccggataggcttcgtataccccgccgccggcaccgcaacaccaggcatactcttttatgcgctccatttcaaccagcctgacaccgggaatgctcctgatgatattccgcggctcttcatacagccccataatcggctctcccggcacatacacgggcagacgccggccgatatgacaggggtcgtgataggtaaccgtaatcggcacattccggacaggcttaagacggccatccttcagagcgccatctatgaactccacaatgtgcaggacctcaagattcaaaccgtactcggggtacagccgcttgaaagcataatagccatcggagcacgcggtcaccacggtcctgacaccggcgttcttccaggtctgaatattatgctcggcgtacttggcaagctcccccttataacccatttcgtaggcccggccgccgcagcagacctcatccccgcccataatgccgatatccagccccgcccggcgcatcacctgcaccgcggcccgtaacgaaggccagagcgccggatcaaagctcgcccggcaaccggcgtggaaaaccacctccgccctttcccgcgtcaggtcctttagcccgagcccctccgcccatctgcccctttccgatctgggcttcatcaccaggttatcttctttgcgcaggttgtcgataaccggcgtcagcgccggatggagctggccatctcccaccagcttcagcctcatctcctgaataacccgcagcggctccatgtcctgcacgcgcttgcacatggcatcacaaccgccgcagaaattgcaccgatagaagatatcgaggagcatcggggagtcctcgtacttgagccgcccgtcaatcagggccagcgatacgtccatccgcccctggcaggagaaggcatcgtacaggtagtactggcttgaaggacagattctggcaaagcgccagctcttgacctcccaggagtccacccatttgcagttggaacaccgggaacagttccaggcattcttacggaggtcccagtaatacttgcgatgccagtcatctttgggcagacatttgccgttgaccattaccatgggagtcactccttaccttattgtgaccgcattttatcgtcaagcgcacccaattgtacaccaaacccggccggtaccattagaccggactgctacgttacgccggggccggtcaactgatgcgggtgccttctgacctacgtccgcaacttcagggacgaacgggcgataaacttcgggataaagcggggcgtctgctccatgtaggccaggtaatcatgaccgaactgcgacagaagcatcttttcctcgcgcctgaccctcagggcgataatcgctaccagcccgagcatccaggtgcccccgataaaccagttggcggtcatgagaagcaccccgatatggaggagaaagaaggccgtatacatcggatgccgtatccagcggtacggtccgtttaccaccagcacatggtcctctttgattttcagtgtggccgagaggttcagtcccagtgaggggtgcacccagataaacaggagcagcgaaagcagtccgaggacagctcctgaccagcggagccataagggcagggcgatctgcgcccagctgaagccctgcggccggaagatgtaagcaaaaaaggtgaacacctcgtagcagatgaatagcgccagataaacggcataccggcggctctcggcaatcacggtgcggcggccggctttcatgctcgactgctggtagattatcctgattaccgagaaaacggtgaattcggtgattatcaggaccttaaagacgagttcctgattttctaacattgcgcagtccggttaccggacccatcaaatctaatacattactggaccgactgcaacagcagggacagcaggtcgtgtactttgagaccggaccggcgctttgaggcggcttcggtaaggttttcctcgcagtgggggcagtaggtgacgatggcaccggcgccgaccgcttccgcctcgcggcaccgttcggaagccgtccacagggccatttcggggtcgccgtttctctgccaggaaccggccccgcagcaccaggcatcgtgcttgatgcggtacatctccaccagcttcatgcccggtattgcgcccacgatttcgcgcggctccctgtaaatgccctgaaagtcgtcggtgccgctgatgccggcgccgccaagcctcaccagatggcaggggtcgtgccaggtgacggtcatgtcgagcggcctgaccggcttgagccggccctgcttgagcaggtcgaggaccagcggcaggatatggacaaccctgaaattcatcccggccacaccggcatagtcgcggacgaaggtactgtaacagaacgggcacaccgttaccagcgtctccacgcccatggcgttgaactgcctgatgttttctctggcaaaggccacaaagttgtccacgtcgccgagacgcagcgacgggttgccgcagcagcgctcccggtcgccgaggatgccgacatcgagcccggccctgagcagtaccgtagccgcgtcctgcgccatcttttcgccggcggcgtcgcggaggggaaaacagccggtatagagcagggtctttgttgcggtaccggcggcggaaaggcctcgggccagcccggggtcgatgcctttaatccaatcgttccgctggctgtcggctttccggtaggggttcatgtactgccgcattaccgtgagtaattcgccgaagccgcccggcggtcggtgcccctgccgcagggcatcggcccgcatcgcctggatgacatcgcccggctgcatttcggtgatgcggccgcagttgtaactgcaggcgccgcagaccgggtcgttgtagatgacttcaagcagcttcggcgtccactccatctcaccttcgatcagggcgcgggcgaggtcgcccatcttgccctggccggagtagcagtcgtacctgtagcgggccagcggcgggcagatgtcgtcgaaagccgcattcctgaggtgccagctgaagacgtgcttgcacatcgagtcgcggtagcagttccacgcccagcgtcggtactctttaaggtcttttatcatgtcagtcctcctccctctcccttcggggggagagggccggggtgaggatgtcctagaagcataatttcccgggattcataatcccgttcgggtcaagctccttcttgattttcttcaggtattcggtgtaggcggcattgcggcggtacatcatgtccgcccagacgccgtagggccggtcgaagaaggctcccgcctcaatcatggcctcgctggcctcaacgaatatcgtcctgacgttttcccaatcgtcggggcggccgggaaagctgtggaggtcgtaacagcaggagaacgaccgcgcccgctccaccggctgaatgtaggcgccaatatcggcggtagaatagttatgacggacacagacggtctccagcgccgactgcaccttcggaaggttatcgccggtggcatagaacttgagctcatggcaggaacctctgaagccgaacttcttctgcatgcgccagggcatgaccagctcttcggcaacgaggcggtcgaggccggcaaccccggcaatggtgctcttcacctcgaagccgagccgggccgccagcgcgcgcaggtccttctcctgataggcgaccttggcctccggctgtcgcgcccagccgaccagcgagaccaccagcgtccacggcggcagtccgtagcgccg

SEQ ID NO: 1010 - DNA, 105135 bp, Artificial Sequence; identical to SEQ ID NO: 496
  Synthetic Oligonucleotide
  misc_feature (1)..(91556): n is a, c, g, or t

SEQ ID NO: 1011 - DNA, 103484 bp, Artificial Sequence
  Synthetic Oligonucleotide
  misc_feature (1)..(90033): n is a, c, g, or t
nnnnnnnnnnnnnnnnnnnnnnnnnnnnnnnnnnnnnnnnnnnnnnnnnnnnnnnnnnnnnnnnnnnnnnnnnnnnnnnnnnnnnnnnnnnnnnnnnnnnnnnnnnnnnnnnnnnnnnnnnnnnnnnnnnnnnnnnnnnnnnnnnnnnnnnnnnnnnnnnnnnnnnnnnnnnnnnnnnnnnnnnnnnnnnnnnnnnnnnnnnnnnnnnnnnnnnnnnnnnnnnnnnnnnnnnnnnnnnnnnnnnnnnnnnnnnnnnnnnnnnnnnnnnnnnnnnnnnnnnnnnnnnnnnnnnnnnnnnnnnnnnnnnnnnnnnnnnnnnnnnnnnnnnnnnnnnnnnnnnnnnnnnnnnnnnnnnnnnnnnnnnnnnnnnnnnnnnnnnnnnnnnnnnnnnnnnnnnnnnnnnnnnnnnnnnnnnnnnnnnnnnnnnnnnnnnnnnnnnnnnnnnnnnnnnnnnnnnnnnnnnnnnnnnnnnnnnnnnnnnnnnnnnnnnnnnnnnnnnnnnnnnnnnnnnnnnnnnnnnnnnnnnnnnnnnnnnnnnnnnnnnnnnnnnnnnnnnnnnnnnnnnnnnnnnnnnnnnnnnnnnnnnnnnnnnnnnnnnnnnnnnnnnnnnnnnnnnnnnnnnnnnnnnnnnnnnnnnnnnnnnnnnnnnnnnnnnnnnnnnnnnnnnnnnnnnnnnnnnnnnnnnnnnnnnnnnnnnnnnnnnnnnnnnnnnnnnnnnnnnnnnnnnnnnnnnnnnnnnnnnnnnnnnnnnnnnnnnnnnnnnnnnnnnnnnnnnnnnnnnnnnnnnnnnnnnnnnnnnnnnnnnnnnnnnnnnnnnnnnnnnnnnnnnnnnnnnnnnnnnnnnnnnnnnnnnnnnnnnnnnnnnnnnnnnnnnnnnnnnnnnnnnnnnnnnnnnnnnnnnnnnnnnnnnnnnnnnnnnnnnnnnnnnnnnnnnnnnnnnnnnnnnnnnnnnnnnnnnnnnnnnnnnnnnnnnnnnnnnnnnnnnnnnnnnnnnnnnnnnnnnnnnnnnnnnnnnnnnnnnnnnnnnnnnnnnnnnnnnnnnnnnnnnnnnnnnnnnnnnnnnnnnnnnnnnnnnnnnnnnnnnnnnnnnnnnnnnnnnnnnnnnnnnnnnnnnnnnnnnnnnnnnnnnnnnnnnnnnnnnnnnnnnnnnnnnnnnnnnnnnnnnnnnnnnnnnnnnnnnnnnnnnnnnnnnnnnnnnnnnnnnnnnnnnnnnnnnnnnnnnnnnnnnnnnnnnnnnnnnnnnnnnnnnnnnnnnnnnnnnnnnnnnnnnnnnnnnnnnnnnnnnnnnnnnnnnnnnnnnnnnnnnnnnnnnnnnnnnnnnnnnnnnnnnnnnnnnnnnnnnnnnnnnnnnnnnnnnnnnnnnnnnnnnnnnnnnnnnnnnnnnnnnnnnnnnnnnnnnnnnnnnnnnnnnnnnnnnnnnnnnnnnnnnnnnnnnnnnnnnnnnnnnnnnnnnnnnnnnnnnnnnnnnnnnnnnnnnnnnnnnnnnnnnnnnnnnnnnnnnnnnnnnnnnnnnnnnnnnnnnnnnnnnnnnnnnnnnnnnnnnnnnnnnnnnnnnnnnnnnnnnnnnnnnnnnnnnnnnnnnnnnnnnnnnnnnnnnnnnnnnnnnnnnnnnnnnnnnnnnnnnnnnnnnnnnnnnnnnnnnnnnnnnnnnnnnnnnnnnnnnnnnnnnnnnnnnnnnnnnnnnnnnnnnnnnnnnnnnnnnnnnnnnnnnnnnnnnnnnnnnnnnnnnnnnnnnnnnnnnnnnnnnnnnnnnnnnnnnnnnnnnnnnnnnnnnnnnnnnnnnnnnnnnnnnnnnnnnnnnnnnnnnnnnnnnnnnnnnnnnnnnnnnnnnnnnnnnnnnnnnnnnnnnnnnnnnnnnnnnnnnnnnnnnnnnnnnnnnnnnnnnnnnnnnnnnnnnnnnnnnnnnnnnnnnnnnnnnnnnnnnnnnnnnnnnnnnnnnnnnnnnnnnnnnnnnnnnnnnnnnnnnnnnnnnnnnnnnnnnnnnnnnnnnnnnnnnnnnnnnnnnnnnnnnnnnnnnnnnnnnnnnnnnnnnnnnnnnnnnnnnnnnnnnnnnnnnnnnnnnnnnnnnnnnnnnnnnnnnnnnnnnnnnnnnnnnnnnnnnnnnnnnnnnnnnnnnnnnnnnnnnnnnnnnnnnnnnnnnnnnnnnnnnnnnnnnnnnnnnnnnnnnnnnnnnnnnnnnnnnnnnnnnnnnnnnnnnnnnnnnnnnnnnnnnnnnnnnnnnnnnnnnnnnnnnnnnnnnnnnnnnnnnnnnnnnnnnnnnnnnnnnnnnnnnnnnnnnnnnnnnnnnnnnnnnnnnnnnnnnnnnnnnnnnnnnnnnnnnnnnnnnnnnnnnnnnnnnnnnnnnnnnnnnnnnnnnnnnnnnnnnnnnnnnnnnnnnnnnnnnnnnnnnnnnnnnnnnnnnnnnnnnnnnnnnnnnnnnnnnnnnnnnnnnnnnnnnnnnnnnnnnnnnnnnnnnnnnnnnnnnnnnnnnnnnnnnnnnnnnnnnnnnnnnnnnnnnnnnnnnnnnnnnnnnnnnnnnnnnnnnnnnnnnnnnnnnnnnnnnnnnnnnnnnnnnnnnnnnnnnnnnnnnnnnnnnnnnnnnnnnnnnnnnnnnnnnnnnnnnnnnnnnnnnnnnnnnnnnnnnnnnnnnnnnnnnnnnnnnnnnnnnnnnnnnnnnnnnnnnnnnnnnnnnnnnnnnnnnnnnnnnnnnnnnnnnnnnnnnnnnnnnnnnnnnnnnnnnnnnnnnnnnnnnnnnnnnnnnnnnnnnnnnnnnnnnnnnnnnnnnnnnnnnnnnnnnnnnnnnnnnnnnnnnnnnnnnnnnnnnnnnnnnnnnnnnnnnnnnnnnnnnnnnnnnnnnnnnnnnnnnnnnnnnnnnnnnnnnnnnnnnnnnnnnnnnnnnnnnnnnnnnnnnnnnnnnnnnnnnnnnnnnnnnnnnnnnnnnnnnnnnnnnnnnnnnnnnnnnnnnnnnnnnnnnnnnnnnnnnnnnnnnnnnnnnnnnnnnnnnnnnnnnnnnnnnnnnnnnnnnnnnnnnnnnnnnnnnnnnnnnnnnnnnnnnnnnnnnnnnnnnnnnnnnnnnnnnnnnnnnnnnnnnnnnnnnnnnnnnnnnnnnnnnnnnnnnnnnnnnnnnnnnnnnnnnnnnnnnnnnnnnnnnnnnnnnnnnnnnnnnnnnnnnnnnnnnnnnnnnnnnnnnnnnnnnnnnnnnnnnnnnnnnnnnnnnnnnnnnnnnnnnnnnnnnnnnnnnnnnnnnnnnnnnnnnnnnnnnnnnnnnnnnnnnnnnnnnnnnnnnnnnnnnnnnnnnnnnnnnnnnnnnnnnnnnnnnnnnnnnnnnnnnnnnnnnnnnnnnnnnnnnnnnnnnnnnnnnnnnnnnnnnnnnnnnnnnnnnnnnnnnnnnnnnnnnnnnnnnnnnnnnnnnnnnnnnnnnnnnnnnnnnnnnnnnnnnnnnnnnnnnnnnnnnnnnnnnnnnnnnnnnnnnnnnnnnnnnnnnnnnnnnnnnnnnnnnnnnnnnnnnnnnnnnnnnnnnnnnnnnnnnnnnnnnnnnnnnnnnnnnnnnnnnnnnnnnnnnnnnnnnnnnnnnnnnnnnnnnnnnnnnnnnnnnnnnnnnnnnnnnnnnnnnnnnnnnnnnnnnnnnnnnnnnnnnnnnnnnnnnnnnnnnnnnnnnnnnnnnnnnnnnnnnnnnnnnnnnnnnnnnnnnnnnnnnnnnnnnnnnnnnnnnnnnnnnnnnnnnnnnnnnnnnnnnnnnnnnnnnnnnnnnnnnnnnnnnnnnnnnnnnnnnnnnnnnnnnnnnnnnnnnnnnnnnnnnnnnnnnnnnnnnnnnnnnnnnnnnnnnnnnnnnnnnnnnnnnnnnnnnnnnnnnnnnnnnnnnnnnnnnnnnnnnnnnnnnnnnnnnnnnnnnnnnnnnnnnnnnnnnnnnnnnnnnnnnnnnnnnnnnnnnnnnnnnnnnnnnnnnnnnnnnnnnnnnnnnnnnnnnnnnnnnnnnnnnnnnnnnnnnnnnnnnnnnnnnnnnnnnnnnnnnnnnnnnnnnnnnnnnnnnnnnnnnnnnnnnnnnnnnnnnnnnnnnnnnnnnnnnnnnnnnnnnnnnnnnnnnnnnnnnnnnnnnnnnnnnnnnnnnnnnnnnnnnnnnnnnnnnnnnnnnnnnnnnnnnnnnnnnnnnnnnnnnnnnnnnnnnnnnnnnnnnnnnnnnnnnnnnnnnnnnnnnnnnnnnnnnnnnnnnnnnnnnnnnnnnnnnnnnnnnnnnnnnnnnnnnnnnnnnnnnnnnnnnnnnnnnnnnnnnnnnnnnnnnnnnnnnnnnnnnnnnnnnnnnnnnnnnnnnnnnnnnnnnnnnnnnnnnnnnnnnnnnnnnnnnnnnnnnnnnnnnnnnnnnnnnnnnnnnnnnnnnnnnnnnnnnnnnnnnnnnnnnnnnnnnnnnnnnnnnnnnnnnnnnnnnnnnnnnnnnnnnnnnnnnnnnnnnnnnnnnnnnnnnnnnnnnnnnnnnnnnnnnnnnnnnnnnnnnnnnnnnnnnnnnnnnnnnnnnnnnnnnnnnnnnnnnnnnnnnnnnnnnnnnnnnnnnnnnnnnnnnnnnnnnnnnnnnnnnnnnnnnnnnnnnnnnnnnnnnnnnnnnnnnnnnnnnnnnnnnnnnnnnnnnnnnnnnnnnnnnnnnnnnnnnnnnnnnnnnnnnnnnnnnnnnnnnnnnnnnnnnnnnnnnnnnnnnnnnnnnnnnnnnnnnnnnnnnnnnnnnnnnnnnnnnnnnnnnnnnnnnnnnnnnnnnnnnnnnnnnnnnnnnnnnnnnnnnnnnnnnnnnnnnnnnnnnnnnnnnnnnnnnnnnnnnnnnnnnnnnnnnnnnnnnnnnnnnnnnnnnnnnnnnnnnnnnnnnnnnnnnnnnnnnnnnnnnnnnnnnnnnnnnnnnnnnnnnnnnnnnnnnnnnnnnnnnnnnnnnnnnnnnnnnnnnnnnnnnnnnnnnnnnnnnnnnnnnnnnnnnnnnnnnnnnnnnnnnnnnnnnnnnnnnnnnnnnnnnnnnnnnnnnnnnnnnnnnnnnnnnnnnnnnnnnnnnnnnnnnnnnnnnnnnnnnnnnnnnnnnnnnnnnnnnnnnnnnnnnnnnnnnnnnnnnnnnnnnnnnnnnnnnnnnnnnnnnnnnnnnnnnnnnnnnnnnnnnnnnnnnnnnnnnnnnnnnnnnnnnnnnnnnnnnnnnnnnnnnnnnnnnnnnnnnnnnnnnnnnnnnnnnnnnnnnnnnnnnnnnnnnnnnnnnnnnnnnnnnnnnnnnnnnnnnnnnnnnnnnnnnnnnnnnnnnnnnnnnnnnnnnnnnnnnnnnnnnnnnnnnnnnnnnnnnnnnnnnnnnnnnnnnnnnnnnnnnnnnnnnnnnnnnnnnnnnnnnnnnnnnnnnnnnnnnnnnnnnnnnnnnnnnnnnnnnnnnnnnnnnnnnnnnnnnnnnnnnnnnnnnnnnnnnnnnnnnnnnnnnnnnnnnnnnnnnnnnnnnnnnnnnnnnnnnnnnnnnnnnnnnnnnnnnnnnnnnnnnnnnnnnnnnnnnnnnnnnnnnnnnnnnnnnnnnnnnnnnnnnnnnnnnnnnnnnnnnnnnnnnnnnnnnnnnnnnnnnnnnnnnnnnnnnnnnnnnnnnnnnnnnnnnnnnnnnnnnnnnnnnnnnnnnnnnnnnnnnnnnnnnnnnnnnnnnnnnnnnnnnnnnnnnnnnnnnnnnnnnnnnnnnnnnnnnnnnnnnnnnnnnnnnnnnnnnnnnnnnnnnnnnnnnnnnnnnnnnnnnnnnnnnnnnnnnnnnnnnnnnnnnnnnnnnnnnnnnnnnnnnnnnnnnnnnnnnnnnnnnnnnnnnnnnnnnnnnnnnnnnnnnnnnnnnnnnnnnnnnnnnnnnnnnnnnnnnnnnnnnnnnnnnnnnnnnnnnnnnnnnnnnnnnnnnnnnnnnnnnnnnnnnnnnnnnnnnnnnnnnnnnnnnnnnnnnnnnnnnnnnnnnnnnnnnnnnnnnnnnnnnnnnnnnnnnnnnnnnnnnnnnnnnnnnnnnnnnnnnnnnnnnnnnnnnnnnnnnnnnnnnnnnnnnnnnnnnnnnnnnnnnnnnnnnnnnnnnnnnnnnnnnnnnnnnnnnnnnnnnnnnnnnnnnnnnnnnnnnnnnnnnnnnnnnnnnnnnnnnnnnnnnnnnnnnnnnnnnnnnnnnnnnnnnnnnnnnnnnnnnnnnnnnnnnnnnnnnnnnnnnnnnnnnnnnnnnnnnnnnnnnnnnnnnnnnnnnnnnnnnnnnnnnnnnnnnnnnnnnnnnnnnnnnnnnnnnnnnnnnnnnnnnnnnnnnnnnnnnnnnnnnnnnnnnnnnnnnnnnnnnnnnnnnnnnnnnnnnnnnnnnnnnnnnnnnnnnnnnnnnnnnnnnnnnnnnnnnnnnnnnnnnnnnnnnnnnnnnnnnnnnnnnnnnnnnnnnnnnnnnnnnnnnnnnnnnnnnnnnnnnnnnnnnnnnnnnnnnnnnnnnnnnnnnnnnnnnnnnnnnnnnnnnnnnnnnnnnnnnnnnnnnnnnnnnnnnnnnnnnnnnnnnnnnnnnnnnnnnnnnnnnnnnnnnnnnnnnnnnnnnnnnnnnnnnnnnnnnnnnnnnnnnnnnnnnnnnnnnnnnnnnnnnnnnnnnnnnnnnnnnnnnnnnnnnnnnnnnnnnnnnnnnnnnnnnnnnnnnnnnnnnnnnnnnnnnnnnnnnnnnnnnnnnnnnnnnnnnnnnnnnnnnnnnnnnnnnnnnnnnnnnnnnnnnnnnnnnnnnnnnnnnnnnnnnnnnnnnnnnnnnnnnnnnnnnnnnnnnnnnnnnnnnnnnnnnnnnnnnnnnnnnnnnnnnnnnnnnnnnnnnnnnnnnnnnnnnnnnnnnnnnnnnnnnnnnnnnnnnnnnnnnnnnnnnnnnnnnnnnnnnnnnnnnnnnnnnnnnnnnnnnnnnnnnnnnnnnnnnnnnnnnnnnnnnnnnnnnnnnnnnnnnnnnnnnnnnnnnnnnnnnnnnnnnnnnnnnnnnnnnnnnnnnnnnnnnnnnnnnnnnnnnnnnnnnnnnnnnnnnnnnnnnnnnnnnnnnnnnnnnnnnnnnnnnnnnnnnnnnnnnnnnnnnnnnnnnnnnnnnnnnnnnnnnnnnnnnnnnnnnnnnnnnnnnnnnnnnnnnnnnnnnnnnnnnnnnnnnnnnnnnnnnnnnnnnnnnnnnnnnnnnnnnnnnnnnnnnnnnnnnnnnnnnnnnnnnnnnnnnnnnnnnnnnnnnnnnnnnnnnnnnnnnnnnnnnnnnnnnnnnnnnnnnnnnnnnnnnnnnnnnnnnnnnnnnnnnnnnnnnnnnnnnnnnnnnnnnnnnnnnnnnnnnnnnnnnnnnnnnnnnnnnnnnnnnnnnnnnnnnnnnnnnnnnnnnnnnnnnnnnnnnnnnnnnnnnnnnnnnnnnnnnnnnnnnnnnnnnnnnnnnnnnnnnnnnnnnnnnnnnnnnnnnnnnnnnnnnnnnnnnnnnnnnnnnnnnnnnnnnnnnnnnnnnnnnnnnnnnnnnnnnnnnnnnnnnnnnnnnnnnnnnnnnnnnnnnnnnnnnnnnnnnnnnnnnnnnnnnnnnnnnnnnnnnnnnnnnnnnnnnnnnnnnnnnnnnnnnnnnnnnnnnnnnnnnnnnnnnnnnnnnnnnnnnnnnnnnnnnnnnnnnnnnnnnnnnnnnnnnnnnnnnnnnnnnnnnnnnnnnnnnnnnnnnnnnnnnnnnnnnnnnnnnnnnnnnnnnnnnnnnnnnnnnnnnnnnnnnnnnnnnnnnnnnnnnnnnnnnnnnnnnnnnnnnnnnnnnnnnnnnnnnnnnnnnnnnnnnnnnnnnnnnnnnnnnnnnnnnnnnnnnnnnnnnnnnnnnnnnnnnnnnnnnnnnnnnnnnnnnnnnnnnnnnnnnnnnnnnnnnnnnnnnnnnnnnnnnnnnnnnnnnnnnnnnnnnnnnnnnnnnnnnnnnnnnnnnnnnnnnnnnnnnnnnnnnnnnnnnnnnnnnnnnnnnnnnnnnnnnnnnnnnnnnnnnnnnnnnnnnnnnnnnnnnnnnnnnnnnnnnnnnnnnnnnnnnnnnnnnnnnnnnnnnnnnnnnnnnnnnnnnnnnnnnnnnnnnnnnnnnnnnnnnnnnnnnnnnnnnnnnnnnnnnnnnnnnnnnnnnnnnnnnnnnnnnnnnnnnnnnnnnnnnnnnnnnnnnnnnnnnnnnnnnnnnnnnnnnnnnnnnnnnnnnnnnnnnnnnnnnnnnnnnnnnnnnnnnnnnnnnnnnnnnnnnnnnnnnnnnnnnnnnnnnnnnnnnnnnnnnnnnnnnnnnnnnnnnnnnnnnnnnnnnnnnnnnnnnnnnnnnnnnnnnnnnnnnnnnnnnnnnnnnnnnnnnnnnnnnnnnnnnnnnnnnnnnnnnnnnnnnnnnnnnnnnnnnnnnnnnnnnnnnnnnnnnnnnnnnnnnnnnnnnnnnnnnnnnnnnnnnnnnnnnnnnnnnnnnnnnnnnnnnnnnnnnnnnnnnnnnnnnnnnnnnnnnnnnnnnnnnnnnnnnnnnnnnnnnnnnnnnnnnnnnnnnnnnnnnnnnnnnnnnnnnnnnnnnnnnnnnnnnnnnnnnnnnnnnnnnnnnnnnnnnnnnnnnnnnnnnnnnnnnnnnnnnnnnnnnnnnnnnnnnnnnnnnnnnnnnnnnnnnnnnnnnnnnnnnnnnnnnnnnnnnnnnnnnnnnnnnnnnnnnnnnnnnnnnnnnnnnnnnnnnnnnnnnnnnnnnnnnnnnnnnnnnnnnnnnnnnnnnnnnnnnnnnnnnnnnnnnnnnnnnnnnnnnnnnnnnnnnnnnnnnnnnnnnnnnnnnnnnnnnnnnnnnnnnnnnnnnnnnnnnnnnnnnnnnnnnnnnnnnnnnnnnnnnnnnnnnnnnnnnnnnnnnnnnnnnnnnnnnnnnnnnnnnnnnnnnnnnnnnnnnnnnnnnnnnnnnnnnnnnnnnnnnnnnnnnnnnnnnnnnnnnnnnnnnnnnnnnnnnnnnnnnnnnnnnnnnnnnnnnnnnnnnnnnnnnnnnnnnnnnnnnnnnnnnnnnnnnnnnnnnnnnnnnnnnnnnnnnnnnnnnnnnnnnnnnnnnnnnnnnnnnnnnnnnnnnnnnnnnnnnnnnnnnnnnnnnnnnnnnnnnnnnnnnnnnnnnnnnnnnnnnnnnnnnnnnnnnnnnnnnnnnnnnnnnnnnnnnnnnnnnnnnnnnnnnnnnnnnnnnnnnnnnnnnnnnnnnnnnnnnnnnnnnnnnnnnnnnnnnnnnnnnnnnnnnnnnnnnnnnnnnnnnnnnnnnnnnnnnnnnnnnnnnnnnnnnnnnnnnnnnnnnnnnnnnnnnnnnnnnnnnnnnnnnnnnnnnnnnnnnnnnnnnnnnnnnnnnnnnnnnnnnnnnnnnnnnnnnnnnnnnnnnnnnnnnnnnnnnnnnnnnnnnnnnnnnnnnnnnnnnnnnnnnnnnnnnnnnnnnnnnnnnnnnnnnnnnnnnnnnnnnnnnnnnnnnnnnnnnnnnnnnnnnnnnnnnnnnnnnnnnnnnnnnnnnnnnnnnnnnnnnnnnnnnnnnnnnnnnnnnnnnnnnnnnnnnnnnnnnnnnnnnnnnnnnnnnnnnnnnnnnnnnnnnnnnnnnnnnnnnnnnnnnnnnnnnnnnnnnnnnnnnnnnnnnnnnnnnnnnnnnnnnnnnnnnnnnnnnnnnnnnnnnnnnnnnnnnnnnnnnnnnnnnnnnnnnnnnnnnnnnnnnnnnnnnnnnnnnnnnnnnnnnnnnnnnnnnnnnnnnnnnnnnnnnnnnnnnnnnnnnnnnnnnnnnnnnnnnnnnnnnnnnnnnnnnnnnnnnnnnnnnnnnnnnnnnnnnnnnnnnnnnnnnnnnnnnnnnnnnnnnnnnnnnnnnnnnnnnnnnnnnnnnnnnnnnnnnnnnnnnnnnnnnnnnnnnnnnnnnnnnnnnnnnnnnnnnnnnnnnnnnnnnnnnnnnnnnnnnnnnnnnnnnnnnnnnnnnnnnnnnnnnnnnnnnnnnnnnnnnnnnnnnnnnnnnnnnnnnnnnnnnnnnnnnnnnnnnnnnnnnnnnnnnnnnnnnnnnnnnnnnnnnnnnnnnnnnnnnnnnnnnnnnnnnnnnnnnnnnnnnnnnnnnnnnnnnnnnnnnnnnnnnnnnnnnnnnnnnnnnnnnnnnnnnnnnnnnnnnnnnnnnnnnnnnnnnnnnnnnnnnnnnnnnnnnnnnnnnnnnnnnnnnnnnnnnnnnnnnnnnnnnnnnnnnnnnnnnnnnnnnnnnnnnnnnnnnnnnnnnnnnnnnnnnnnnnnnnnnnnnnnnnnnnnnnnnnnnnnnnnnnnnnnnnnnnnnnnnnnnnnnnnnnnnnnnnnnnnnnnnnnnnnnnnnnnnnnnnnnnnnnnnnnnnnnnnnnnnnnnnnnnnnnnnnnnnnnnnnnnnnnnnnnnnnnnnnnnnnnnnnnnnnnnnnnnnnnnnnnnnnnnnnnnnnnnnnnnnnnnnnnnnnnnnnnnnnnnnnnnnnnnnnnnnnnnnnnnnnnnnnnnnnnnnnnnnnnnnnnnnnnnnnnnnnnnnnnnnnnnnnnnnnnnnnnnnnnnnnnnnnnnnnnnnnnnnnnnnnnnnnnnnnnnnnnnnnnnnnnnnnnnnnnnnnnnnnnnnnnnnnnnnnnnnnnnnnnnnnnnnnnnnnnnnnnnnnnnnnnnnnnnnnnnnnnnnnnnnnnnnnnnnnnnnnnnnnnnnnnnnnnnnnnnnnnnnnnnnnnnnnnnnnnnnnnnnnnnnnnnnnnnnnnnnnnnnnnnnnnnnnnnnnnnnnnnnnnnnnnnnnnnnnnnnnnnnnnnnnnnnnnnnnnnnnnnnnnnnnnnnnnnnnnnnnnnnnnnnnnnnnnnnnnnnnnnnnnnnnnnnnnnnnnnnnnnnnnnnnnnnnnnnnnnnnnnnnnnnnnnnnnnnnnnnnnnnnnnnnnnnnnnnnnnnnnnnnnnnnnnnnnnnnnnnnnnnnnnnnnnnnnnnnnnnnnnnnnnnnnnnnnnnnnnnnnnnnnnnnnnnnnnnnnnnnnnnnnnnnnnnnnnnnnnnnnnnnnnnnnnnnnnnnnnnnnnnnnnnnnnnnnnnnnnnnnnnnnnnnnnnnnnnnnnnnnnnnnnnnnnnnnnnnnnnnnnnnnnnnnnnnnnnnnnnnnnnnnnnnnnnnnnnnnnnnnnnnnnnnnnnnnnnnnnnnnnnnnnnnnnnnnnnnnnnnnnnnnnnnnnnnnnnnnnnnnnnnnnnnnnnnnnnnnnnnnnnnnnnnnnnnnnnnnnnnnnnnnnnnnnnnnnnnnnnnnnnnnnnnnnnnnnnnnnnnnnnnnnnnnnnnnnnnnnnnnnnnnnnnnnnnnnnnnnnnnnnnnnnnnnnnnnnnnnnnnnnnnnnnnnnnnnnnnnnnnnnnnnnnnnnnnnnnnnnnnnnnnnnnnnnnnnnnnnnnnnnnnnnnnnnnnnnnnnnnnnnnnnnnnnnnnnnnnnnnnnnnnnnnnnnnnnnnnnnnnnnnnnnnnnnnnnnnnnnnnnnnnnnnnnnnnnnnnnnnnnnnnnnnnnnnnnnnnnnnnnnnnnnnnnnnnnnnnnnnnnnnnnnnnnnnnnnnnnnnnnnnnnnnnnnnnnnnnnnnnnnnnnnnnnnnnnnnnnnnnnnnnnnnnnnnnnnnnnnnnnnnnnnnnnnnnnnnnnnnnnnnnnnnnnnnnnnnnnnnnnnnnnnnnnnnnnnnnnnnnnnnnnnnnnnnnnnnnnnnnnnnnnnnnnnnnnnnnnnnnnnnnnnnnnnnnnnnnnnnnnnnnnnnnnnnnnnnnnnnnnnnnnnnnnnnnnnnnnnnnnnnnnnnnnnnnnnnnnnnnnnnnnnnnnnnnnnnnnnnnnnnnnnnnnnnnnnnnnnnnnnnnnnnnnnnnnnnnnnnnnnnnnnnnnnnnnnnnnnnnnnnnnnnnnnnnnnnnnnnnnnnnnnnnnnnnnnnnnnnnnnnnnnnnnnnnnnnnnnnnnnnnnnnnnnnnnnnnnnnnnnnnnnnnnnnnnnnnnnnnnnnnnnnnnnnnnnnnnnnnnnnnnnnnnnnnnnnnnnnnnnnnnnnnnnnnnnnnnnnnnnnnnnnnnnnnnnnnnnnnnnnnnnnnnnnnnnnnnnnnnnnnnnnnnnnnnnnnnnnnnnnnnnnnnnnnnnnnnnnnnnnnnnnnnnnnnnnnnnnnnnnnnnnnnnnnnnnnnnnnnnnnnnnnnnnnnnnnnnnnnnnnnnnnnnnnnnnnnnnnnnnnnnnnnnnnnnnnnnnnnnnnnnnnnnnnnnnnnnnnnnnnnnnnnnnnnnnnnnnnnnnnnnnnnnnnnnnnnnnnnnnnnnnnnnnnnnnnnnnnnnnnnnnnnnnnnnnnnnnnnnnnnnnnnnnnnnnnnnnnnnnnnnnnnnnnnnnnnnnnnnnnnnnnnnnnnnnnnnnnnnnnnnnnnnnnnnnnnnnnnnnnnnnnnnnnnnnnnnnnnnnnnnnnnnnnnnnnnnnnnnnnnnnnnnnnnnnnnnnnnnnnnnnnnnnnnnnnnnnnnnnnnnnnnnnnnnnnnnnnnnnnnnnnnnnnnnnnnnnnnnnnnnnnnnnnnnnnnnnnnnnnnnnnnnnnnnnnnnnnnnnnnnnnnnnnnnnnnnnnnnnnnnnnnnnnnnnnnnnnnnnnnnnnnnnnnnnnnnnnnnnnnnnnnnnnnnnnnnnnnnnnnnnnnnnnnnnnnnnnnnnnnnnnnnnnnnnnnnnnnnnnnnnnnnnnnnnnnnnnnnnnnnnnnnnnnnnnnnnnnnnnnnnnnnnnnnnnnnnnnnnnnnnnnnnnnnnnnnnnnnnnnnnnnnnnnnnnnnnnnnnnnnnnnnnnnnnnnnnnnnnnnnnnnnnnnnnnnnnnnnnnnnnnnnnnnnnnnnnnnnnnnnnnnnnnnnnnnnnnnnnnnnnnnnnnnnnnnnnnnnnnnnnnnnnnnnnnnnnnnnnnnnnnnnnnnnnnnnnnnnnnnnnnnnnnnnnnnnnnnnnnnnnnnnnnnnnnnnnnnnnnnnnnnnnnnnnnnnnnnnnnnnnnnnnnnnnnnnnnnnnnnnnnnnnnnnnnnnnnnnnnnnnnnnnnnnnnnnnnnnnnnnnnnnnnnnnnnnnnnnnnnnnnnnnnnnnnnnnnnnnnnnnnnnnnnnnnnnnnnnnnnnnnnnnnnnnnnnnnnnnnnnnnnnnnnnnnnnnnnnnnnnnnnnnnnnnnnnnnnnnnnnnnnnnnnnnnnnnnnnnnnnnnnnnnnnnnnnnnnnnnnnnnnnnnnnnnnnnnnnnnnnnnnnnnnnnnnnnnnnnnnnnnnnnnnnnnnnnnnnnnnnnnnnnnnnnnnnnnnnnnnnnnnnnnnnnnnnnnnnnnnnnnnnnnnnnnnnnnnnnnnnnnnnnnnnnnnnnnnnnnnnnnnnnnnnnnnnnnnnnnnnnnnnnnnnnnnnnnnnnnnnnnnnnnnnnnnnnnnnnnnnnnnnnnnnnnnnnnnnnnnnnnnnnnnnnnnnnnnnnnnnnnnnnnnnnnnnnnnnnnnnnnnnnnnnnnnnnnnnnnnnnnnnnnnnnnnnnnnnnnnnnnnnnnnnnnnnnnnnnnnnnnnnnnnnnnnnnnnnnnnnnnnnnnnnnnnnnnnnnnnnnnnnnnnnnnnnnnnnnnnnnnnnnnnnnnnnnnnnnnnnnnnnnnnnnnnnnnnnnnnnnnnnnnnnnnnnnnnnnnnnnnnnnnnnnnnnnnnnnnnnnnnnnnnnnnnnnnnnnnnnnnnnnnnnnnnnnnnnnnnnnnnnnnnnnnnnnnnnnnnnnnnnnnnnnnnnnnnnnnnnnnnnnnnnnnnnnnnnnnnnnnnnnnnnnnnnnnnnnnnnnnnnnnnnnnnnnnnnnnnnnnnnnnnnnnnnnnnnnnnnnnnnnnnnnnnnnnnnnnnnnnnnnnnnnnnnnnnnnnnnnnnnnnnnnnnnnnnnnnnnnnnnnnnnnnnnnnnnnnnnnnnnnnnnnnnnnnnnnnnnnnnnnnnnnnnnnnnnnnnnnnnnnnnnnnnnnnnnnnnnnnnnnnnnnnnnnnnnnnnnnnnnnnnnnnnnnnnnnnnnnnnnnnnnnnnnnnnnnnnnnnnnnnnnnnnnnnnnnnnnnnnnnnnnnnnnnnnnnnnnnnnnnnnnnnnnnnnnnnnnnnnnnnnnnnnnnnnnnnnnnnnnnnnnnnnnnnnnnnnnnnnnnnnnnnnnnnnnnnnnnnnnnnnnnnnnnnnnnnnnnnnnnnnnnnnnnnnnnnnnnnnnnnnnnnnnnnnnnnnnnnnnnnnnnnnnnnnnnnnnnnnnnnnnnnnnnnnnnnnnnnnnnnnnnnnnnnnnnnnnnnnnnnnnnnnnnnnnnnnnnnnnnnnnnnnnnnnnnnnnnnnnnnnnnnnnnnnnnnnnnnnnnnnnnnnnnnnnnnnnnnnnnnnnnnnnnnnnnnnnnnnnnnnnnnnnnnnnnnnnnnnnnnnnnnnnnnnnnnnnnnnnnnnnnnnnnnnnnnnnnnnnnnnnnnnnnnnnnnnnnnnnnnnnnnnnnnnnnnnnnnnnnnnnnnnnnnnnnnnnnnnnnnnnnnnnnnnnnnnnnnnnnnnnnnnnnnnnnnnnnnnnnnnnnnnnnnnnnnnnnnnnnnnnnnnnnnnnnnnnnnnnnnnnnnnnnnnnnnnnnnnnnnnnnnnnnnnnnnnnnnnnnnnnnnnnnnnnnnnnnnnnnnnnnnnnnnnnnnnnnnnnnnnnnnnnnnnnnnnnnnnnnnnnnnnnnnnnnnnnnnnnnnnnnnnnnnnnnnnnnnnnnnnnnnnnnnnnnnnnnnnnnnnnnnnnnnnnnnnnnnnnnnnnnnnnnnnnnnnnnnnnnnnnnnnnnnnnnnnnnnnnnnnnnnnnnnnnnnnnnnnnnnnnnnnnnnnnnnnnnnnnnnnnnnnnnnnnnnnnnnnnnnnnnnnnnnnnnnnnnnnnnnnnnnnnnnnnnnnnnnnnnnnnnnnnnnnnnnnnnnnnnnnnnnnnnnnnnnnnnnnnnnnnnnnnnnnnnnnnnnnnnnnnnnnnnnnnnnnnnnnnnnnnnnnnnnnnnnnnnnnnnnnnnnnnnnnnnnnnnnnnnnnnnnnnnnnnnnnnnnnnnnnnnnnnnnnnnnnnnnnnnnnnnnnnnnnnnnnnnnnnnnnnnnnnnnnnnnnnnnnnnnnnnnnnnnnnnnnnnnnnnnnnnnnnnnnnnnnnnnnnnnnnnnnnnnnnnnnnnnnnnnnnnnnnnnnnnnnnnnnnnnnnnnnnnnnnnnnnnnnnnnnnnnnnnnnnnnnnnnnnnnnnnnnnnnnnnnnnnnnnnnnnnnnnnnnnnnnnnnnnnnnnnnnnnnnnnnnnnnnnnnnnnnnnnnnnnnnnnnnnnnnnnnnnnnnnnnnnnnnnnnnnnnnnnnnnnnnnnnnnnnnnnnnnnnnnnnnnnnnnnnnnnnnnnnnnnnnnnnnnnnnnnnnnnnnnnnnnnnnnnnnnnnnnnnnnnnnnnnnnnnnnnnnnnnnnnnnnnnnnnnnnnnnnnnnnnnnnnnnnnnnnnnnnnnnnnnnnnnnnnnnnnnnnnnnnnnnnnnnnnnnnnnnnnnnnnnnnnnnnnnnnnnnnnnnnnnnnnnnnnnnnnnnnnnnnnnnnnnnnnnnnnnnnnnnnnnnnnnnnnnnnnnnnnnnnnnnnnnnnnnnnnnnnnnnnnnnnnnnnnnnnnnnnnnnnnnnnnnnnnnnnnnnnnnnnnnnnnnnnnnnnnnnnnnnnnnnnnnnnnnnnnnnnnnnnnnnnnnnnnnnnnnnnnnnnnnnnnnnnnnnnnnnnnnnnnnnnnnnnnnnnnnnnnnnnnnnnnnnnnnnnnnnnnnnnnnnnnnnnnnnnnnnnnnnnnnnnnnnnnnnnnnnnnnnnnnnnnnnnnnnnnnnnnnnnnnnnnnnnnnnnnnnnnnnnnnnnnnnnnnnnnnnnnnnnnnnnnnnnnnnnnnnnnnnnnnnnnnnnnnnnnnnnnnnnnnnnnnnnnnnnnnnnnnnnnnnnnnnnnnnnnnnnnnnnnnnnnnnnnnnnnnnnnnnnnnnnnnnnnnnnnnnnnnnnnnnnnnnnnnnnnnnnnnnnnnnnnnnnnnnnnnnnnnnnnnnnnnnnnnnnnnnnnnnnnnnnnnnnnnnnnnnnnnnnnnnnnnnnnnnnnnnnnnnnnnnnnnnnnnnnnnnnnnnnnnnnnnnnnnnnnnnnnnnnnnnnnnnnnnnnnnnnnnnnnnnnnnnnnnnnnnnnnnnnnnnnnnnnnnnnnnnnnnnnnnnnnnnnnnnnnnnnnnnnnnnnnnnnnnnnnnnnnnnnnnnnnnnnnnnnnnnnnnnnnnnnnnnnnnnnnnnnnnnnnnnnnnnnnnnnnnnnnnnnnnnnnnnnnnnnnnnnnnnnnnnnnnnnnnnnnnnnnnnnnnnnnnnnnnnnnnnnnnnnnnnnnnnnnnnnnnnnnnnnnnnnnnnnnnnnnnnnnnnnnnnnnnnnnnnnnnnnnnnnnnnnnnnnnnnnnnnnnnnnnnnnnnnnnnnnnnnnnnnnnnnnnnnnnnnnnnnnnnnnnnnnnnnnnnnnnnnnnnnnnnnnnnnnnnnnnnnnnnnnnnnnnnnnnnnnnnnnnnnnnnnnnnnnnnnnnnnnnnnnnnnnnnnnnnnnnnnnnnnnnnnnnnnnnnnnnnnnnnnnnnnnnnnnnnnnnnnnnnnnnnnnnnnnnnnnnnnnnnnnnnnnnnnnnnnnnnnnnnnnnnnnnnnnnnnnnnnnnnnnnnnnnnnnnnnnnnnnnnnnnnnnnnnnnnnnnnnnnnnnnnnnnnnnnnnnnnnnnnnnnnnnnnnnnnnnnnnnnnnnnnnnnnnnnnnnnnnnnnnnnnnnnnnnnnnnnnnnnnnnnnnnnnnnnnnnnnnnnnnnnnnnnnnnnnnnnnnnnnnnnnnnnnnnnnnnnnnnnnnnnnnnnnnnnnnnnnnnnnnnnnnnnnnnnnnnnnnnnnnnnnnnnnnnnnnnnnnnnnnnnnnnnnnnnnnnnnnnnnnnnnnnnnnnnnnnnnnnnnnnnnnnnnnnnnnnnnnnnnnnnnnnnnnnnnnnnnnnnnnnnnnnnnnnnnnnnnnnnnnnnnnnnnnnnnnnnnnnnnnnnnnnnnnnnnnnnnnnnnnnnnnnnnnnnnnnnnnnnnnnnnnnnnnnnnnnnnnnnnnnnnnnnnnnnnnnnnnnnnnnnnnnnnnnnnnnnnnnnnnnnnnnnnnnnnnnnnnnnnnnnnnnnnnnnnnnnnnnnnnnnnnnnnnnnnnnnnnnnnnnnnnnnnnnnnnnnnnnnnnnnnnnnnnnnnnnnnnnnnnnnnnnnnnnnnnnnnnnnnnnnnnnnnnnnnnnnnnnnnnnnnnnnnnnnnnnnnnnnnnnnnnnnnnnnnnnnnnnnnnnnnnnnnnnnnnnnnnnnnnnnnnnnnnnnnnnnnnnnnnnnnnnnnnnnnnnnnnnnnnnnnnnnnnnnnnnnnnnnnnnnnnnnnnnnnnnnnnnnnnnnnnnnnnnnnnnnnnnnnnnnnnnnnnnnnnnnnnnnnnnnnnnnnnnnnnnnnnnnnnnnnnnnnnnnnnnnnnnnnnnnnnnnnnnnnnnnnnnnnnnnnnnnnnnnnnnnnnnnnnnnnnnnnnnnnnnnnnnnnnnnnnnnnnnnnnnnnnnnnnnnnnnnnnnnnnnnnnnnnnnnnnnnnnnnnnnnnnnnnnnnnnnnnnnnnnnnnnnnnnnnnnnnnnnnnnnnnnnnnnnnnnnnnnnnnnnnnnnnnnnnnnnnnnnnnnnnnnnnnnnnnnnnnnnnnnnnnnnnnnnnnnnnnnnnnnnnnnnnnnnnnnnnnnnnnnnnnnnnnnnnnnnnnnnnnnnnnnnnnnnnnnnnnnnnnnnnnnnnnnnnnnnnnnnnnnnnnnnnnnnnnnnnnnnnnnnnnnnnnnnnnnnnnnnnnnnnnnnnnnnnnnnnnnnnnnnnnnnnnnnnnnnnnnnnnnnnnnnnnnnnnnnnnnnnnnnnnnnnnnnnnnnnnnnnnnnnnnnnnnnnnnnnnnnnnnnnnnnnnnnnnnnnnnnnnnnnnnnnnnnnnnnnnnnnnnnnnnnnnnnnnnnnnnnnnnnnnnnnnnnnnnnnnnnnnnnnnnnnnnnnnnnnnnnnnnnnnnnnnnnnnnnnnnnnnnnnnnnnnnnnnnnnnnnnnnnnnnnnnnnnnnnnnnnnnnnnnnnnnnnnnnnnnnnnnnnnnnnnnnnnnnnnnnnnnnnnnnnnnnnnnnnnnnnnnnnnnnnnnnnnnnnnnnnnnnnnnnnnnnnnnnnnnnnnnnnnnnnnnnnnnnnnnnnnnnnnnnnnnnnnnnnnnnnnnnnnnnnnnnnnnnnnnnnnnnnnnnnnnnnnnnnnnnnnnnnnnnnnnnnnnnnnnnnnnnnnnnnnnnnnnnnnnnnnnnnnnnnnnnnnnnnnnnnnnnnnnnnnnnnnnnnnnnnnnnnnnnnnnnnnnnnnnnnnnnnnnnnnnnnnnnnnnnnnnnnnnnnnnnnnnnnnnnnnnnnnnnnnnnnnnnnnnnnnnnnnnnnnnnnnnnnnnnnnnnnnnnnnnnnnnnnnnnnnnnnnnnnnnnnnnnnnnnnnnnnnnnnnnnnnnnnnnnnnnnnnnnnnnnnnnnnnnnnnnnnnnnnnnnnnnnnnnnnnnnnnnnnnnnnnnnnnnnnnnnnnnnnnnnnnnnnnnnnnnnnnnnnnnnnnnnnnnnnnnnnnnnnnnnnnnnnnnnnnnnnnnnnnnnnnnnnnnnnnnnnnnnnnnnnnnnnnnnnnnnnnnnnnnnnnnnnnnnnnnnnnnnnnnnnnnnnnnnnnnnnnnnnnnnnnnnnnnnnnnnnnnnnnnnnnnnnnnnnnnnnnnnnnnnnnnnnnnnnnnnnnnnnnnnnnnnnnnnnnnnnnnnnnnnnnnnnnnnnnnnnnnnnnnnnnnnnnnnnnnnnnnnnnnnnnnnnnnnnnnnnnnnnnnnnnnnnnnnnnnnnnnnnnnnnnnnnnnnnnnnnnnnnnnnnnnnnnnnnnnnnnnnnnnnnnnnnnnnnnnnnnnnnnnnnnnnnnnnnnnnnnnnnnnnnnnnnnnnnnnnnnnnnnnnnnnnnnnnnnnnnnnnnnnnnnnnnnnnnnnnnnnnnnnnnnnnnnnnnnnnnnnnnnnnnnnnnnnnnnnnnnnnnnnnnnnnnnnnnnnnnnnnnnnnnnnnnnnnnnnnnnnnnnnnnnnnnnnnnnnnnnnnnnnnnnnnnnnnnnnnnnnnnnnnnnnnnnnnnnnnnnnnnnnnnnnnnnnnnnnnnnnnnnnnnnnnnnnnnnnnnnnnnnnnnnnnnnnnnnnnnnnnnnnnnnnnnnnnnnnnnnnnnnnnnnnnnnnnnnnnnnnnnnnnnnnnnnnnnnnnnnnnnnnnnnnnnnnnnnnnnnnnnnnnnnnnnnnnnnnnnnnnnnnnnnnnnnnnnnnnnnnnnnnnnnnnnnnnnnnnnnnnnnnnnnnnnnnnnnnnnnnnnnnnnnnnnnnnnnnnnnnnnnnnnnnnnnnnnnnnnnnnnnnnnnnnnnnnnnnnnnnnnnnnnnnnnnnnnnnnnnnnnnnnnnnnnnnnnnnnnnnnnnnnnnnnnnnnnnnnnnnnnnnnnnnnnnnnnnnnnnnnnnnnnnnnnnnnnnnnnnnnnnnnnnnnnnnnnnnnnnnnnnnnnnnnnnnnnnnnnnnnnnnnnnnnnnnnnnnnnnnnnnnnnnnnnnnnnnnnnnnnnnnnnnnnnnnnnnnnnnnnnnnnnnnnnnnnnnnnnnnnnnnnnnnnnnnnnnnnnnnnnnnnnnnnnnnnnnnnnnnnnnnnnnnnnnnnnnnnnnnnnnnnnnnnnnnnnnnnnnnnnnnnnnnnnnnnnnnnnnnnnnnnnnnnnnnnnnnnnnnnnnnnnnnnnnnnnnnnnnnnnnnnnnnnnnnnnnnnnnnnnnnnnnnnnnnnnnnnnnnnnnnnnnnnnnnnnnnnnnnnnnnnnnnnnnnnnnnnnnnnnnnnnnnnnnnnnnnnnnnnnnnnnnnnnnnnnnnnnnnnnnnnnnnnnnnnnnnnnnnnnnnnnnnnnnnnnnnnnnnnnnnnnnnnnnnnnnnnnnnnnnnnnnnnnnnnnnnnnnnnnnnnnnnnnnnnnnnnnnnnnnnnnnnnnnnnnnnnnnnnnnnnnnnnnnnnnnnnnnnnnnnnnnnnnnnnnnnnnnnnnnnnnnnnnnnnnnnnnnnnnnnnnnnnnnnnnnnnnnnnnnnnnnnnnnnnnnnnnnnnnnnnnnnnnnnnnnnnnnnnnnnnnnnnnnnnnnnnnnnnnnnnnnnnnnnnnnnnnnnnnnnnnnnnnnnnnnnnnnnnnnnnnnnnnnnnnnnnnnnnnnnnnnnnnnnnnnnnnnnnnnnnnnnnnnnnnnnnnnnnnnnnnnnnnnnnnnnnnnnnnnnnnnnnnnnnnnnnnnnnnnnnnnnnnnnnnnnnnnnnnnnnnnnnnnnnnnnnnnnnnnnnnnnnnnnnnnnnnnnnnnnnnnnnnnnnnnnnnnnnnnnnnnnnnnnnnnnnnnnnnnnnnnnnnnnnnnnnnnnnnnnnnnnnnnnnnnnnnnnnnnnnnnnnnnnnnnnnnnnnnnnnnnnnnnnnnnnnnnnnnnnnnnnnnnnnnnnnnnnnnnnnnnnnnnnnnnnnnnnnnnnnnnnnnnnnnnnnnnnnnnnnnnnnnnnnnnnnnnnnnnnnnnnnnnnnnnnnnnnnnnnnnnnnnnnnnnnnnnnnnnnnnnnnnnnnnnnnnnnnnnnnnnnnnnnnnnnnnnnnnnnnnnnnnnnnnnnnnnnnnnnnnnnnnnnnnnnnnnnnnnnnnnnnnnnnnnnnnnnnnnnnnnnnnnnnnnnnnnnnnnnnnnnnnnnnnnnnnnnnnnnnnnnnnnnnnnnnnnnnnnnnnnnnnnnnnnnnnnnnnnnnnnnnnnnnnnnnnnnnnnnnnnnnnnnnnnnnnnnnnnnnnnnnnnnnnnnnnnnnnnnnnnnnnnnnnnnnnnnnnnnnnnnnnnnnnnnnnnnnnnnnnnnnnnnnnnnnnnnnnnnnnnnnnnnnnnnnnnnnnnnnnnnnnnnnnnnnnnnnnnnnnnnnnnnnnnnnnnnnnnnnnnnnnnnnnnnnnnnnnnnnnnnnnnnnnnnnnnnnnnnnnnnnnnnnnnnnnnnnnnnnnnnnnnnnnnnnnnnnnnnnnnnnnnnnnnnnnnnnnnnnnnnnnnnnnnnnnnnnnnnnnnnnnnnnnnnnnnnnnnnnnnnnnnnnnnnnnnnnnnnnnnnnnnnnnnnnnnnnnnnnnnnnnnnnnnnnnnnnnnnnnnnnnnnnnnnnnnnnnnnnnnnnnnnnnnnnnnnnnnnnnnnnnnnnnnnnnnnnnnnnnnnnnnnnnnnnnnnnnnnnnnnnnnnnnnnnnnnnnnnnnnnnnnnnnnnnnnnnnnnnnnnnnnnnnnnnnnnnnnnnnnnnnnnnnnnnnnnnnnnnnnnnnnnnnnnnnnnnnnnnnnnnnnnnnnnnnnnnnnnnnnnnnnnnnnnnnnnnnnnnnnnnnnnnnnnnnnnnnnnnnnnnnnnnnnnnnnnnnnnnnnnnnnnnnnnnnnnnnnnnnnnnnnnnnnnnnnnnnnnnnnnnnnnnnnnnnnnnnnnnnnnnnnnnnnnnnnnnnnnnnnnnnnnnnnnnnnnnnnnnnnnnnnnnnnnnnnnnnnnnnnnnnnnnnnnnnnnnnnnnnnnnnnnnnnnnnnnnnnnnnnnnnnnnnnnnnnnnnnnnnnnnnnnnnnnnnnnnnnnnnnnnnnnnnnnnnnnnnnnnnnnnnnnnnnnnnnnnnnnnnnnnnnnnnnnnnnnnnnnnnnnnnnnnnnnnnnnnnnnnnnnnnnnnnnnnnnnnnnnnnnnnnnnnnnnnnnnnnnnnnnnnnnnnnnnnnnnnnnnnnnnnnnnnnnnnnnnnnnnnnnnnnnnnnnnnnnnnnnnnnnnnnnnnnnnnnnnnnnnnnnnnnnnnnnnnnnnnnnnnnnnnnnnnnnnnnnnnnnnnnnnnnnnnnnnnnnnnnnnnnnnnnnnnnnnnnnnnnnnnnnnnnnnnnnnnnnnnnnnnnnnnnnnnnnnnnnnnnnnnnnnnnnnnnnnnnnnnnnnnnnnnnnnnnnnnnnnnnnnnnnnnnnnnnnnnnnnnnnnnnnnnnnnnnnnnnnnnnnnnnnnnnnnnnnnnnnnnnnnnnnnnnnnnnnnnnnnnnnnnnnnnnnnnnnnnnnnnnnnnnnnnnnnnnnnnnnnnnnnnnnnnnnnnnnnnnnnnnnnnnnnnnnnnnnnnnnnnnnnnnnnnnnnnnnnnnnnnnnnnnnnnnnnnnnnnnnnnnnnnnnnnnnnnnnnnnnnnnnnnnnnnnnnnnnnnnnnnnnnnnnnnnnnnnnnnnnnnnnnnnnnnnnnnnnnnnnnnnnnnnnnnnnnnnnnnnnnnnnnnnnnnnnnnnnnnnnnnnnnnnnnnnnnnnnnnnnnnnnnnnnnnnnnnnnnnnnnnnnnnnnnnnnnnnnnnnnnnnnnnnnnnnnnnnnnnnnnnnnnnnnnnnnnnnnnnnnnnnnnnnnnnnnnnnnnnnnnnnnnnnnnnnnnnnnnnnnnnnnnnnnnnnnnnnnnnnnnnnnnnnnnnnnnnnnnnnnnnnnnnnnnnnnnnnnnnnnnnnnnnnnnnnnnnnnnnnnnnnnnnnnnnnnnnnnnnnnnnnnnnnnnnnnnnnnnnnnnnnnnnnnnnnnnnnnnnnnnnnnnnnnnnnnnnnnnnnnnnnnnnnnnnnnnnnnnnnnnnnnnnnnnnnnnnnnnnnnnnnnnnnnnnnnnnnnnnnnnnnnnnnnnnnnnnnnnnnnnnnnnnnnnnnnnnnnnnnnnnnnnnnnnnnnnnnnnnnnnnnnnnnnnnnnnnnnnnnnnnnnnnnnnnnnnnnnnnnnnnnnnnnnnnnnnnnnnnnnnnnnnnnnnnnnnnnnnnnnnnnnnnnnnnnnnnnnnnnnnnnnnnnnnnnnnnnnnnnnnnnnnnnnnnnnnnnnnnnnnnnnnnnnnnnnnnnnnnnnnnnnnnnnnnnnnnnnnnnnnnnnnnnnnnnnnnnnnnnnnnnnnnnnnnnnnnnnnnnnnnnnnnnnnnnnnnnnnnnnnnnnnnnnnnnnnnnnnnnnnnnnnnnnnnnnnnnnnnnnnnnnnnnnnnnnnnnnnnnnnnnnnnnnnnnnnnnnnnnnnnnnnnnnnnnnnnnnnnnnnnnnnnnnnnnnnnnnnnnnnnnnnnnnnnnnnnnnnnnnnnnnnnnnnnnnnnnnnnnnnnnnnnnnnnnnnnnnnnnnnnnnnnnnnnnnnnnnnnnnnnnnnnnnnnnnnnnnnnnnnnnnnnnnnnnnnnnnnnnnnnnnnnnnnnnnnnnnnnnnnnnnnnnnnnnnnnnnnnnnnnnnnnnnnnnnnnnnnnnnnnnnnnnnnnnnnnnnnnnnnnnnnnnnnnnnnnnnnnnnnnnnnnnnnnnnnnnnnnnnnnnnnnnnnnnnnnnnnnnnnnnnnnnnnnnnnnnnnnnnnnnnnnnnnnnnnnnnnnnnnnnnnnnnnnnnnnnnnnnnnnnnnnnnnnnnnnnnnnnnnnnnnnnnnnnnnnnnnnnnnnnnnnnnnnnnnnnnnnnnnnnnnnnnnnnnnnnnnnnnnnnnnnnnnnnnnnnnnnnnnnnnnnnnnnnnnnnnnnnnnnnnnnnnnnnnnnnnnnnnnnnnnnnnnnnnnnnnnnnnnnnnnnnnnnnnnnnnnnnnnnnnnnnnnnnnnnnnnnnnnnnnnnnnnnnnnnnnnnnnnnnnnnnnnnnnnnnnnnnnnnnnnnnnnnnnnnnnnnnnnnnnnnnnnnnnnnnnnnnnnnnnnnnnnnnnnnnnnnnnnnnnnnnnnnnnnnnnnnnnnnnnnnnnnnnnnnnnnnnnnnnnnnnnnnnnnnnnnnnnnnnnnnnnnnnnnnnnnnnnnnnnnnnnnnnnnnnnnnnnnnnnnnnnnnnnnnnnnnnnnnnnnnnnnnnnnnnnnnnnnnnnnnnnnnnnnnnnnnnnnnnnnnnnnnnnnnnnnnnnnnnnnnnnnnnnnnnnnnnnnnnnnnnnnnnnnnnnnnnnnnnnnnnnnnnnnnnnnnnnnnnnnnnnnnnnnnnnnnnnnnnnnnnnnnnnnnnnnnnnnnnnnnnnnnnnnnnnnnnnnnnnnnnnnnnnnnnnnnnnnnnnnnnnnnnnnnnnnnnnnnnnnnnnnnnnnnnnnnnnnnnnnnnnnnnnnnnnnnnnnnnnnnnnnnnnnnnnnnnnnnnnnnnnnnnnnnnnnnnnnnnnnnnnnnnnnnnnnnnnnnnnnnnnnnnnnnnnnnnnnnnnnnnnnnnnnnnnnnnnnnnnnnnnnnnnnnnnnnnnnnnnnnnnnnnnnnnnnnnnnnnnnnnnnnnnnnnnnnnnnnnnnnnnnnnnnnnnnnnnnnnnnnnnnnnnnnnnnnnnnnnnnnnnnnnnnnnnnnnnnnnnnnnnnnnnnnnnnnnnnnnnnnnnnnnnnnnnnnnnnnnnnnnnnnnnnnnnnnnnnnnnnnnnnnnnnnnnnnnnnnnnnnnnnnnnnnnnnnnnnnnnnnnnnnnnnnnnnnnnnnnnnnnnnnnnnnnnnnnnnnnnnnnnnnnnnnnnnnnnnnnnnnnnnnnnnnnnnnnnnnnnnnnnnnnnnnnnnnnnnnnnnnnnnnnnnnnnnnnnnnnnnnnnnnnnnnnnnnnnnnnnnnnnnnnnnnnnnnnnnnnnnnnnnnnnnnnnnnnnnnnnnnnnnnnnnnnnnnnnnnnnnnnnnnnnnnnnnnnnnnnnnnnnnnnnnnnnnnnnnnnnnnnnnnnnnnnnnnnnnnnnnnnnnnnnnnnnnnnnnnnnnnnnnnnnnnnnnnnnnnnnnnnnnnnnnnnnnnnnnnnnnnnnnnnnnnnnnnnnnnnnnnnnnnnnnnnnnnnnnnnnnnnnnnnnnnnnnnnnnnnnnnnnnnnnnnnnnnnnnnnnnnnnnnnnnnnnnnnnnnnnnnnnnnnnnnnnnnnnnnnnnnnnnnnnnnnnnnnnnnnnnnnnnnnnnnnnnnnnnnnnnnnnnnnnnnnnnnnnnnnnnnnnnnnnnnnnnnnnnnnnnnnnnnnnnnnnnnnnnnnnnnnnnnnnnnnnnnnnnnnnnnnnnnnnnnnnnnnnnnnnnnnnnnnnnnnnnnnnnnnnnnnnnnnnnnnnnnnnnnnnnnnnnnnnnnnnnnnnnnnnnnnnnnnnnnnnnnnnnnnnnnnnnnnnnnnnnnnnnnnnnnnnnnnnnnnnnnnnnnnnnnnnnnnnnnnnnnnnnnnnnnnnnnnnnnnnnnnnnnnnnnnnnnnnnnnnnnnnnnnnnnnnnnnnnnnnnnnnnnnnnnnnnnnnnnnnnnnnnnnnnnnnnnnnnnnnnnnnnnnnnnnnnnnnnnnnnnnnnnnnnnnnnnnnnnnnnnnnnnnnnnnnnnnnnnnnnnnnnnnnnnnnnnnnnnnnnnnnnnnnnnnnnnnnnnnnnnnnnnnnnnnnnnnnnnnnnnnnnnnnnnnnnnnnnnnnnnnnnnnnnnnnnnnnnnnnnnnnnnnnnnnnnnnnnnnnnnnnnnnnnnnnnnnnnnnnnnnnnnnnnnnnnnnnnnnnnnnnnnnnnnnnnnnnnnnnnnnnnnnnnnnnnnnnnnnnnnnnnnnnnnnnnnnnnnnnnnnnnnnnnnnnnnnnnnnnnnnnnnnnnnnnnnnnnnnnnnnnnnnnnnnnnnnnnnnnnnnnnnnnnnnnnnnnnnnnnnnnnnnnnnnnnnnnnnnnnnnnnnnnnnnnnnnnnnnnnnnnnnnnnnnnnnnnnnnnnnnnnnnnnnnnnnnnnnnnnnnnnnnnnnnnnnnnnnnnnnnnnnnnnnnnnnnnnnnnnnnnnnnnnnnnnnnnnnnnnnnnnnnnnnnnnnnnnnnnnnnnnnnnnnnnnnnnnnnnnnnnnnnnnnnnnnnnnnnnnnnnnnnnnnnnnnnnnnnnnnnnnnnnnnnnnnnnnnnnnnnnnnnnnnnnnnnnnnnnnnnnnnnnnnnnnnnnnnnnnnnnnnnnnnnnnnnnnnnnnnnnnnnnnnnnnnnnnnnnnnnnnnnnnnnnnnnnnnnnnnnnnnnnnnnnnnnnnnnnnnnnnnnnnnnnnnnnnnnnnnnnnnnnnnnnnnnnnnnnnnnnnnnnnnnnnnnnnnnnnnnnnnnnnnnnnnnnnnnnnnnnnnnnnnnnnnnnnnnnnnnnnnnnnnnnnnnnnnnnnnnnnnnnnnnnnnnnnnnnnnnnnnnnnnnnnnnnnnnnnnnnnnnnnnnnnnnnnnnnnnnnnnnnnnnnnnnnnnnnnnnnnnnnnnnnnnnnnnnnnnnnnnnnnnnnnnnnnnnnnnnnnnnnnnnnnnnnnnnnnnnnnnnnnnnnnnnnnnnnnnnnnnnnnnnnnnnnnnnnnnnnnnnnnnnnnnnnnnnnnnnnnnnnnnnnnnnnnnnnnnnnnnnnnnnnnnnnnnnnnnnnnnnnnnnnnnnnnnnnnnnnnnnnnnnnnnnnnnnnnnnnnnnnnnnnnnnnnnnnnnnnnnnnnnnnnnnnnnnnnnnnnnnnnnnnnnnnnnnnnnnnnnnnnnnnnnnnnnnnnnnnnnnnnnnnnnnnnnnnnnnnnnnnnnnnnnnnnnnnnnnnnnnnnnnnnnnnnnnnnnnnnnnnnnnnnnnnnnnnnnnnnnnnnnnnnnnnnnnnnnnnnnnnnnnnnnnnnnnnnnnnnnnnnnnnnnnnnnnnnnnnnnnnnnnnnnnnnnnnnnnnnnnnnnnnnnnnnnnnnnnnnnnnnnnnnnnnnnnnnnnnnnnnnnnnnnnnnnnnnnnnnnnnnnnnnnnnnnnnnnnnnnnnnnnnnnnnnnnnnnnnnnnnnnnnnnnnnnnnnnnnnnnnnnnnnnnnnnnnnnnnnnnnnnnnnnnnnnnnnnnnnnnnnnnnnnnnnnnnnnnnnnnnnnnnnnnnnnnnnnnnnnnnnnnnnnnnnnnnnnnnnnnnnnnnnnnnnnnnnnnnnnnnnnnnnnnnnnnnnnnnnnnnnnnnnnnnnnnnnnnnnnnnnnnnnnnnnnnnnnnnnnnnnnnnnnnnnnnnnnnnnnnnnnnnnnnnnnnnnnnnnnnnnnnnnnnnnnnnnnnnnnnnnnnnnnnnnnnnnnnnnnnnnnnnnnnnnnnnnnnnnnnnnnnnnnnnnnnnnnnnnnnnnnnnnnnnnnnnnnnnnnnnnnnnnnnnnnnnnnnnnnnnnnnnnnnnnnnnnnnnnnnnnnnnnnnnnnnnnnnnnnnnnnnnnnnnnnnnnnnnnnnnnnnnnnnnnnnnnnnnnnnnnnnnnnnnnnnnnnnnnnnnnnnnnnnnnnnnnnnnnnnnnnnnnnnnnnnnnnnnnnnnnnnnnnnnnnnnnnnnnnnnnnnnnnnnnnnnnnnnnnnnnnnnnnnnnnnnnnnnnnnnnnnnnnnnnnnnnnnnnnnnnnnnnnnnnnnnnnnnnnnnnnnnnnnnnnnnnnnnnnnnnnnnnnnnnnnnnnnnnnnnnnnnnnnnnnnnnnnnnnnnnnnnnnnnnnnnnnnnnnnnnnnnnnnnnnnnnnnnnnnnnnnnnnnnnnnnnnnnnnnnnnnnnnnnnnnnnnnnnnnnnnnnnnnnnnnnnnnnnnnnnnnnnnnnnnnnnnnnnnnnnnnnnnnnnnnnnnnnnnnnnnnnnnnnnnnnnnnnnnnnnnnnnnnnnnnnnnnnnnnnnnnnnnnnnnnnnnnnnnnnnnnnnnnnnnnnnnnnnnnnnnnnnnnnnnnnnnnnnnnnnnnnnnnnnnnnnnnnnnnnnnnnnnnnnnnnnnnnnnnnnnnnnnnnnnnnnnnnnnnnnnnnnnnnnnnnnnnnnnnnnnnnnnnnnnnnnnnnnnnnnnnnnnnnnnnnnnnnnnnnnnnnnnnnnnnnnnnnnnnnnnnnnnnnnnnnnnnnnnnnnnnnnnnnnnnnnnnnnnnnnnnnnnnnnnnnnnnnnnnnnnnnnnnnnnnnnnnnnnnnnnnnnnnnnnnnnnnnnnnnnnnnnnnnnnnnnnnnnnnnnnnnnnnnnnnnnnnnnnnnnnnnnnnnnnnnnnnnnnnnnnnnnnnnnnnnnnnnnnnnnnnnnnnnnnnnnnnnnnnnnnnnnnnnnnnnnnnnnnnnnnnnnnnnnnnnnnnnnnnnnnnnnnnnnnnnnnnnnnnnnnnnnnnnnnnnnnnnnnnnnnnnnnnnnnnnnnnnnnnnnnnnnnnnnnnnnnnnnnnnnnnnnnnnnnnnnnnnnnnnnnnnnnnnnnnnnnnnnnnnnnnnnnnnnnnnnnnnnnnnnnnnnnnnnnnnnnnnnnnnnnnnnnnnnnnnnnnnnnnnnnnnnnnnnnnnnnnnnnnnnnnnnnnnnnnnnnnnnnnnnnnnnnnnnnnnnnnnnnnnnnnnnnnnnnnnnnnnnnnnnnnnnnnnnnnnnnnnnnnnnnnnnnnnnnnnnnnnnnnnnnnnnnnnnnnnnnnnnnnnnnnnnnnnnnnnnnnnnnnnnnnnnnnnnnnnnnnnnnnnnnnnnnnnnnnnnnnnnnnnnnnnnnnnnnnnnnnnnnnnnnnnnnnnnnnnnnnnnnnnnnnnnnnnnnnnnnnnnnnnnnnnnnnnnnnnnnnnnnnnnnnnnnnnnnnnnnnnnnnnnnnnnnnnnnnnnnnnnnnnnnnnnnnnnnnnnnnnnnnnnnnnnnnnnnnnnnnnnnnnnnnnnnnnnnnnnnnnnnnnnnnnnnnnnnnnnnnnnnnnnnnnnnnnnnnnnnnnnnnnnnnnnnnnnnnnnnnnnnnnnnnnnnnnnnnnnnnnnnnnnnnnnnnnnnnnnnnnnnnnnnnnnnnnnnnnnnnnnnnnnnnnnnnnnnnnnnnnnnnnnnnnnnnnnnnnnnnnnnnnnnnnnnnnnnnnnnnnnnnnnnnnnnnnnnnnnnnnnnnnnnnnnnnnnnnnnnnnnnnnnnnnnnnnnnnnnnnnnnnnnnnnnnnnnnnnnnnnnnnnnnnnnnnnnnnnnnnnnnnnnnnnnnnnnnnnnnnnnnnnnnnnnnnnnnnnnnnnnnnnnnnnnnnnnnnnnnnnnnnnnnnnnnnnnnnnnnnnnnnnnnnnnnnnnnnnnnnnnnnnnnnnnnnnnnnnnnnnnnnnnnnnnnnnnnnnnnnnnnnnnnnnnnnnnnnnnnnnnnnnnnnnnnnnnnnnnnnnnnnnnnnnnnnnnnnnnnnnnnnnnnnnnnnnnnnnnnnnnnnnnnnnnnnnnnnnnnnnnnnnnnnnnnnnnnnnnnnnnnnnnnnnnnnnnnnnnnnnnnnnnnnnnnnnnnnnnnnnnnnnnnnnnnnnnnnnnnnnnnnnnnnnnnnnnnnnnnnnnnnnnnnnnnnnnnnnnnnnnnnnnnnnnnnnnnnnnnnnnnnnnnnnnnnnnnnnnnnnnnnnnnnnnnnnnnnnnnnnnnnnnnnnnnnnnnnnnnnnnnnnnnnnnnnnnnnnnnnnnnnnnnnnnnnnnnnnnnnnnnnnnnnnnnnnnnnnnnnnnnnnnnnnnnnnnnnnnnnnnnnnnnnnnnnnnnnnnnnnnnnnnnnnnnnnnnnnnnnnnnnnnnnnnnnnnnnnnnnnnnnnnnnnnnnnnnnnnnnnnnnnnnnnnnnnnnnnnnnnnnnnnnnnnnnnnnnnnnnnnnnnnnnnnnnnnnnnnnnnnnnnnnnnnnnnnnnnnnnnnnnnnnnnnnnnnnnnnnnnnnnnnnnnnnnnnnnnnnnnnnnnnnnnnnnnnnnnnnnnnnnnnnnnnnnnnnnnnnnnnnnnnnnnnnnnnnnnnnnnnnnnnnnnnnnnnnnnnnnnnnnnnnnnnnnnnnnnnnnnnnnnnnnnnnnnnnnnnnnnnnnnnnnnnnnnnnnnnnnnnnnnnnnnnnnnnnnnnnnnnnnnnnnnnnnnnnnnnnnnnnnnnnnnnnnnnnnnnnnnnnnnnnnnnnnnnnnnnnnnnnnnnnnnnnnnnnnnnnnnnnnnnnnnnnnnnnnnnnnnnnnnnnnnnnnnnnnnnnnnnnnnnnnnnnnnnnnnnnnnnnnnnnnnnnnnnnnnnnnnnnnnnnnnnnnnnnnnnnnnnnnnnnnnnnnnnnnnnnnnnnnnnnnnnnnnnnnnnnnnnnnnnnnnnnnnnnnnnnnnnnnnnnnnnnnnnnnnnnnnnnnnnnnnnnnnnnnnnnnnnnnnnnnnnnnnnnnnnnnnnnnnnnnnnnnnnnnnnnnnnnnnnnnnnnnnnnnnnnnnnnnnnnnnnnnnnnnnnnnnnnnnnnnnnnnnnnnnnnnnnnnnnnnnnnnnnnnnnnnnnnnnnnnnnnnnnnnnnnnnnnnnnnnnnnnnnnnnnnnnnnnnnnnnnnnnnnnnnnnnnnnnnnnnnnnnnnnnnnnnnnnnnnnnnnnnnnnnnnnnnnnnnnnnnnnnnnnnnnnnnnnnnnnnnnnnnnnnnnnnnnnnnnnnnnnnnnnnnnnnnnnnnnnnnnnnnnnnnnnnnnnnnnnnnnnnnnnnnnnnnnnnnnnnnnnnnnnnnnnnnnnnnnnnnnnnnnnnnnnnnnnnnnnnnnnnnnnnnnnnnnnnnnnnnnnnnnnnnnnnnnnnnnnnnnnnnnnnnnnnnnnnnnnnnnnnnnnnnnnnnnnnnnnnnnnnnnnnnnnnnnnnnnnnnnnnnnnnnnnnnnnnnnnnnnnnnnnnnnnnnnnnnnnnnnnnnnnnnnnnnnnnnnnnnnnnnnnnnnnnnnnnnnnnnnnnnnnnnnnnnnnnnnnnnnnnnnnnnnnnnnnnnnnnnnnnnnnnnnnnnnnnnnnnnnnnnnnnnnnnnnnnnnnnnnnnnnnnnnnnnnnnnnnnnnnnnnnnnnnnnnnnnnnnnnnnnnnnnnnnnnnnnnnnnnnnnnnnnnnnnnnnnnnnnnnnnnnnnnnnnnnnnnnnnnnnnnnnnnnnnnnnnnnnnnnnnnnnnnnnnnnnnnnnnnnnnnnnnnnnnnnnnnnnnnnnnnnnnnnnnnnnnnnnnnnnnnnnnnnnnnnnnnnnnnnnnnnnnnnnnnnnnnnnnnnnnnnnnnnnnnnnnnnnnnnnnnnnnnnnnnnnnnnnnnnnnnnnnnnnnnnnnnnnnnnnnnnnnnnnnnnnnnnnnnnnnnnnnnnnnnnnnnnnnnnnnnnnnnnnnnnnnnnnnnnnnnnnnnnnnnnnnnnnnnnnnnnnnnnnnnnnnnnnnnnnnnnnnnnnnnnnnnnnnnnnnnnnnnnnnnnnnnnnnnnnnnnnnnnnnnnnnnnnnnnnnnnnnnnnnnnnnnnnnnnnnnnnnnnnnnnnnnnnnnnnnnnnnnnnnnnnnnnnnnnnnnnnnnnnnnnnnnnnnnnnnnnnnnnnnnnnnnnnnnnnnnnnnnnnnnnnnnnnnnnnnnnnnnnnnnnnnnnnnnnnnnnnnnnnnnnnnnnnnnnnnnnnnnnnnnnnnnnnnnnnnnnnnnnnnnnnnnnnnnnnnnnnnnnnnnnnnnnnnnnnnnnnnnnnnnnnnnnnnnnnnnnnnnnnnnnnnnnnnnnnnnnnnnnnnnnnnnnnnnnnnnnnnnnnnnnnnnnnnnnnnnnnnnnnnnnnnnnnnnnnnnnnnnnnnnnnnnnnnnnnnnnnnnnnnnnnnnnnnnnnnnnnnnnnnnnnnnnnnnnnnnnnnnnnnnnnnnnnnnnnnnnnnnnnnnnnnnnnnnnnnnnnnnnnnnnnnnnnnnnnnnnnnnnnnnnnnnnnnnnnnnnnnnnnnnnnnnnnnnnnnnnnnnnnnnnnnnnnnnnnnnnnnnnnnnnnnnnnnnnnnnnnnnnnnnnnnnnnnnnnnnnnnnnnnnnnnnnnnnnnnnnnnnnnnnnnnnnnnnnnnnnnnnnnnnnnnnnnnnnnnnnnnnnnnnnnnnnnnnnnnnnnnnnnnnnnnnnnnnnnnnnnnnnnnnnnnnnnnnnnnnnnnnnnnnnnnnnnnnnnnnnnnnnnnnnnnnnnnnnnnnnnnnnnnnnnnnnnnnnnnnnnnnnnnnnnnnnnnnnnnnnnnnnnnnnnnnnnnnnnnnnnnnnnnnnnnnnnnnnnnnnnnnnnnnnnnnnnnnnnnnnnnnnnnnnnnnnnnnnnnnnnnnnnnnnnnnnnnnnnnnnnnnnnnnnnnnnnnnnnnnnnnnnnnnnnnnnnnnnnnnnnnnnnnnnnnnnnnnnnnnnnnnnnnnnnnnnnnnnnnnnnnnnnnnnnnnnnnnnnnnnnnnnnnnnnnnnnnnnnnnnnnnnnnnnnnnnnnnnnnnnnnnnnnnnnnnnnnnnnnnnnnnnnnnnnnnnnnnnnnnnnnnnnnnnnnnnnnnnnnnnnnnnnnnnnnnnnnnnnnnnnnnnnnnnnnnnnnnnnnnnnnnnnnnnnnnnnnnnnnnnnnnnnnnnnnnnnnnnnnnnnnnnnnnnnnnnnnnnnnnnnnnnnnnnnnnnnnnnnnnnnnnnnnnnnnnnnnnnnnnnnnnnnnnnnnnnnnnnnnnnnnnnnnnnnnnnnnnnnnnnnnnnnnnnnnnnnnnnnnnnnnnnnnnnnnnnnnnnnnnnnnnnnnnnnnnnnnnnnnnnnnnnnnnnnnnnnnnnnnnnnnnnnnnnnnnnnnnnnnnnnnnnnnnnnnnnnnnnnnnnnnnnnnnnnnnnnnnnnnnnnnnnnnnnnnnnnnnnnnnnnnnnnnnnnnnnnnnnnnnnnnnnnnnnnnnnnnnnnnnnnnnnnnnnnnnnnnnnnnnnnnnnnnnnnnnnnnnnnnnnnnnnnnnnnnnnnnnnnnnnnnnnnnnnnnnnnnnnnnnnnnnnnnnnnnnnnnnnnnnnnnnnnnnnnnnnnnnnnnnnnnnnnnnnnnnnnnnnnnnnnnnnnnnnnnnnnnnnnnnnnnnnnnnnnnnnnnnnnnnnnnnnnnnnnnnnnnnnnnnnnnnnnnnnnnnnnnnnnnnnnnnnnnnnnnnnnnnnnnnnnnnnnnnnnnnnnnnnnnnnnnnnnnnnnnnnnnnnnnnnnnnnnnnnnnnnnnnnnnnnnnnnnnnnnnnnnnnnnnnnnnnnnnnnnnnnnnnnnnnnnnnnnnnnnnnnnnnnnnnnnnnnnnnnnnnnnnnnnnnnnnnnnnnnnnnnnnnnnnnnnnnnnnnnnnnnnnnnnnnnnnnnnnnnnnnnnnnnnnnnnnnnnnnnnnnnnnnnnnnnnnnnnnnnnnnnnnnnnnnnnnnnnnnnnnnnnnnnnnnnnnnnnnnnnnnnnnnnnnnnnnnnnnnnnnnnnnnnnnnnnnnnnnnnnnnnnnnnnnnnnnnnnnnnnnnnnnnnnnnnnnnnnnnnnnnnnnnnnnnnnnnnnnnnnnnnnnnnnnnnnnnnnnnnnnnnnnnnnnnnnnnnnnnnnnnnnnnnnnnnnnnnnnnnnnnnnnnnnnnnnnnnnnnnnnnnnnnnnnnnnnnnnnnnnnnnnnnnnnnnnnnnnnnnnnnnnnnnnnnnnnnnnnnnnnnnnnnnnnnnnnnnnnnnnnnnnnnnnnnnnnnnnnnnnnnnnnnnnnnnnnnnnnnnnnnnnnnnnnnnnnnnnnnnnnnnnnnnnnnnnnnnnnnnnnnnnnnnnnnnnnnnnnnnnnnnnnnnnnnnnnnnnnnnnnnnnnnnnnnnnnnnnnnnnnnnnnnnnnnnnnnnnnnnnnnnnnnnnnnnnnnnnnnnnnnnnnnnnnnnnnnnnnnnnnnnnnnnnnnnnnnnnnnnnnnnnnnnnnnnnnnnnnnnnnnnnnnnnnnnnnnnnnnnnnnnnnnnnnnnnnnnnnnnnnnnnnnnnnnnnnnnnnnnnnnnnnnnnnnnnnnnnnnnnnnnnnnnnnnnnnnnnnnnnnnnnnnnnnnnnnnnnnnnnnnnnnnnnnnnnnnnnnnnnnnnnnnnnnnnnnnnnnnnnnnnnnnnnnnnnnnnnnnnnnnnnnnnnnnnnnnnnnnnnnnnnnnnnnnnnnnnnnnnnnnnnnnnnnnnnnnnnnnnnnnnnnnnnnnnnnnnnnnnnnnnnnnnnnnnnnnnnnnnnnnnnnnnnnnnnnnnnnnnnnnnnnnnnnnnnnnnnnnnnnnnnnnnnnnnnnnnnnnnnnnnnnnnnnnnnnnnnnnnnnnnnnnnnnnnnnnnnnnnnnnnnnnnnnnnnnnnnnnnnnnnnnnnnnnnnnnnnnnnnnnnnnnnnnnnnnnnnnnnnnnnnnnnnnnnnnnnnnnnnnnnnnnnnnnnnnnnnnnnnnnnnnnnnnnnnnnnnnnnnnnnnnnnnnnnnnnnnnnnnnnnnnnnnnnnnnnnnnnnnnnnnnnnnnnnnnnnnnnnnnnnnnnnnnnnnnnnnnnnnnnnnnnnnnnnnnnnnnnnnnnnnnnnnnnnnnnnnnnnnnnnnnnnnnnnnnnnnnnnnnnnnnnnnnnnnnnnnnnnnnnnnnnnnnnnnnnnnnnnnnnnnnnnnnnnnnnnnnnnnnnnnnnnnnnnnnnnnnnnnnnnnnnnnnnnnnnnnnnnnnnnnnnnnnnnnnnnnnnnnnnnnnnnnnnnnnnnnnnnnnnnnnnnnnnnnnnnnnnnnnnnnnnnnnnnnnnnnnnnnnnnnnnnnnnnnnnnnnnnnnnnnnnnnnnnnnnnnnnnnnnnnnnnnnnnnnnnnnnnnnnnnnnnnnnnnnnnnnnnnnnnnnnnnnnnnnnnnnnnnnnnnnnnnnnnnnnnnnnnnnnnnnnnnnnnnnnnnnnnnnnnnnnnnnnnnnnnnnnnnnnnnnnnnnnnnnnnnnnnnnnnnnnnnnnnnnnnnnnnnnnnnnnnnnnnnnnnnnnnnnnnnnnnnnnnnnnnnnnnnnnnnnnnnnnnnnnnnnnnnnnnnnnnnnnnnnnnnnnnnnnnnnnnnnnnnnnnnnnnnnnnnnnnnnnnnnnnnnnnnnnnnnnnnnnnnnnnnnnnnnnnnnnnnnnnnnnnnnnnnnnnnnnnnnnnnnnnnnnnnnnnnnnnnnnnnnnnnnnnnnnnnnnnnnnnnnnnnnnnnnnnnnnnnnnnnnnnnnnnnnnnnnnnnnnnnnnnnnnnnnnnnnnnnnnnnnnnnnnnnnnnnnnnnnnnnnnnnnnnnnnnnnnnnnnnnnnnnnnnnnnnnnnnnnnnnnnnnnnnnnnnnnnnnnnnnnnnnnnnnnnnnnnnnnnnnnnnnnnnnnnnnnnnnnnnnnnnnnnnnnnnnnnnnnnnnnnnnnnnnnnnnnnnnnnnnnnnnnnnnnnnnnnnnnnnnnnnnnnnnnnnnnnnnnnnnnnnnnnnnnnnnnnnnnnnnnnnnnnnnnnnnnnnnnnnnnnnnnnnnnnnnnnnnnnnnnnnnnnnnnnnnnnnnnnnnnnnnnnnnnnnnnnnnnnnnnnnnnnnnnnnnnnnnnnnnnnnnnnnnnnnnnnnnnnnnnnnnnnnnnnnnnnnnnnnnnnnnnnnnnnnnnnnnnnnnnnnnnnnnnnnnnnnnnnnnnnnnnnnnnnnnnnnnnnnnnnnnnnnnnnnnnnnnnnnnnnnnnnnnnnnnnnnnnnnnnnnnnnnnnnnnnnnnnnnnnnnnnnnnnnnnnnnnnnnnnnnnnnnnnnnnnnnnnnnnnnnnnnnnnnnnnnnnnnnnnnnnnnnnnnnnnnnnnnnnnnnnnnnnnnnnnnnnnnnnnnnnnnnnnnnnnnnnnnnnnnnnnnnnnnnnnnnnnnnnnnnnnnnnnnnnnnnnnnnnnnnnnnnnnnnnnnnnnnnnnnnnnnnnnnnnnnnnnnnnnnnnnnnnnnnnnnnnnnnnnnnnnnnnnnnnnnnnnnnnnnnnnnnnnnnnnnnnnnnnnnnnnnnnnnnnnnnnnnnnnnnnnnnnnnnnnnnnnnnnnnnnnnnnnnnnnnnnnnnnnnnnnnnnnnnnnnnnnnnnnnnnnnnnnnnnnnnnnnnnnnnnnnnnnnnnnnnnnnnnnnnnnnnnnnnnnnnnnnnnnnnnnnnnnnnnnnnnnnnnnnnnnnnnnnnnnnnnnnnnnnnnnnnnnnnnnnnnnnnnnnnnnnnnnnnnnnnnnnnnnnnnnnnnnnnnnnnnnnnnnnnnnnnnnnnnnnnnnnnnnnnnnnnnnnnnnnnnnnnnnnnnnnnnnnnnnnnnnnnnnnnnnnnnnnnnnnnnnnnnnnnnnnnnnnnnnnnnnnnnnnnnnnnnnnnnnnnnnnnnnnnnnnnnnnnnnnnnnnnnnnnnnnnnnnnnnnnnnnnnnnnnnnnnnnnnnnnnnnnnnnnnnnnnnnnnnnnnnnnnnnnnnnnnnnnnnnnnnnnnnnnnnnnnnnnnnnnnnnnnnnnnnnnnnnnnnnnnnnnnnnnnnnnnnnnnnnnnnnnnnnnnnnnnnnnnnnnnnnnnnnnnnnnnnnnnnnnnnnnnnnnnnnnnnnnnnnnnnnnnnnnnnnnnnnnnnnnnnnnnnnnnnnnnnnnnnnnnnnnnnnnnnnnnnnnnnnnnnnnnnnnnnnnnnnnnnnnnnnnnnnnnnnnnnnnnnnnnnnnnnnnnnnnnnnnnnnnnnnnnnnnnnnnnnnnnnnnnnnnnnnnnnnnnnnnnnnnnnnnnnnnnnnnnnnnnnnnnnnnnnnnnnnnnnnnnnnnnnnnnnnnnnnnnnnnnnnnnnnnnnnnnnnnnnnnnnnnnnnnnnnnnnnnnnnnnnnnnnnnnnnnnnnnnnnnnnnnnnnnnnnnnnnnnnnnnnnnnnnnnnnnnnnnnnnnnnnnnnnnnnnnnnnnnnnnnnnnnnnnnnnnnnnnnnnnnnnnnnnnnnnnnnnnnnnnnnnnnnnnnnnnnnnnnnnnnnnnnnnnnnnnnnnnnnnnnnnnnnnnnnnnnnnnnnnnnnnnnnnnnnnnnnnnnnnnnnnnnnnnnnnnnnnnnnnnnnnnnnnnnnnnnnnnnnnnnnnnnnnnnnnnnnnnnnnnnnnnnnnnnnnnnnnnnnnnnnnnnnnnnnnnnnnnnnnnnnnnnnnnnnnnnnnnnnnnnnnnnnnnnnnnnnnnnnnnnnnnnnnnnnnnnnnnnnnnnnnnnnnnnnnnnnnnnnnnnnnnnnnnnnnnnnnnnnnnnnnnnnnnnnnnnnnnnnnnnnnnnnnnnnnnnnnnnnnnnnnnnnnnnnnnnnnnnnnnnnnnnnnnnnnnnnnnnnnnnnnnnnnnnnnnnnnnnnnnnnnnnnnnnnnnnnnnnnnnnnnnnnnnnnnnnnnnnnnnnnnnnnnnnnnnnnnnnnnnnnnnnnnnnnnnnnnnnnnnnnnnnnnnnnnnnnnnnnnnnnnnnnnnnnnnnnnnnnnnnnnnnnnnnnnnnnnnnnnnnnnnnnnnnnnnnnnnnnnnnnnnnnnnnnnnnnnnnnnnnnnnnnnnnnnnnnnnnnnnnnnnnnnnnnnnnnnnnnnnnnnnnnnnnnnnnnnnnnnnnnnnnnnnnnnnnnnnnnnnnnnnnnnnnnnnnnnnnnnnnnnnnnnnnnnnnnnnnnnnnnnnnnnnnnnnnnnnnnnnnnnnnnnnnnnnnnnnnnnnnnnnnnnnnnnnnnnnnnnnnnnnnnnnnnnnnnnnnnnnnnnnnnnnnnnnnnnnnnnnnnnnnnnnnnnnnnnnnnnnnnnnnnnnnnnnnnnnnnnnnnnnnnnnnnnnnnnnnnnnnnnnnnnnnnnnnnnnnnnnnnnnnnnnnnnnnnnnnnnnnnnnnnnnnnnnnnnnnnnnnnnnnnnnnnnnnnnnnnnnnnnnnnnnnnnnnnnnnnnnnnnnnnnnnnnnnnnnnnnnnnnnnnnnnnnnnnnnnnnnnnnnnnnnnnnnnnnnnnnnnnnnnnnnnnnnnnnnnnnnnnnnnnnnnnnnnnnnnnnnnnnnnnnnnnnnnnnnnnnnnnnnnnnnnnnnnnnnnnnnnnnnnnnnnnnnnnnnnnnnnnnnnnnnnnnnnnnnnnnnnnnnnnnnnnnnnnnnnnnnnnnnnnnnnnnnnnnnnnnnnnnnnnnnnnnnnnnnnnnnnnnnnnnnnnnnnnnnnnnnnnnnnnnnnnnnnnnnnnnnnnnnnnnnnnnnnnnnnnnnnnnnnnnnnnnnnnnnnnnnnnnnnnnnnnnnnnnnnnnnnnnnnnnnnnnnnnnnnnnnnnnnnnnnnnnnnnnnnnnnnnnnnnnnnnnnnnnnnnnnnnnnnnnnnnnnnnnnnnnnnnnnnnnnnnnnnnnnnnnnnnnnnnnnnnnnnnnnnnnnnnnnnnnnnnnnnnnnnnnnnnnnnnnnnnnnnnnnnnnnnnnnnnnnnnnnnnnnnnnnnnnnnnnnnnnnnnnnnnnnnnnnnnnnnnnnnnnnnnnnnnnnnnnnnnnnnnnnnnnnnnnnnnnnnnnnnnnnnnnnnnnnnnnnnnnnnnnnnnnnnnnnnnnnnnnnnnnnnnnnnnnnnnnnnnnnnnnnnnnnnnnnnnnnnnnnnnnnnnnnnnnnnnnnnnnnnnnnnnnnnnnnnnnnnnnnnnnnnnnnnnnnnnnnnnnnnnnnnnnnnnnnnnnnnnnnnnnnnnnnnnnnnnnnnnnnnnnnnnnnnnnnnnnnnnnnnnnnnnnnnnnnnnnnnnnnnnnnnnnnnnnnnnnnnnnnnnnnnnnnnnnnnnnnnnnnnnnnnnnnnnnnnnnnnnnnnnnnnnnnnnnnnnnnnnnnnnnnnnnnnnnnnnnnnnnnnnnnnnnnnnnnnnnnnnnnnnnnnnnnnnnnnnnnnnnnnnnnnnnnnnnnnnnnnnnnnnnnnnnnnnnnnnnnnnnnnnnnnnnnnnnnnnnnnnnnnnnnnnnnnnnnnnnnnnnnnnnnnnnnnnnnnnnnnnnnnnnnnnnnnnnnnnnnnnnnnnnnnnnnnnnnnnnnnnnnnnnnnnnnnnnnnnnnnnnnnnnnnnnnnnnnnnnnnnnnnnnnnnnnnnnnnnnnnnnnnnnnnnnnnnnnnnnnnnnnnnnnnnnnnnnnnnnnnnnnnnnnnnnnnnnnnnnnnnnnnnnnnnnnnnnnnnnnnnnnnnnnnnnnnnnnnnnnnnnnnnnnnnnnnnnnnnnnnnnnnnnnnnnnnnnnnnnnnnnnnnnnnnnnnnnnnnnnnnnnnnnnnnnnnnnnnnnnnnnnnnnnnnnnnnnnnnnnnnnnnnnnnnnnnnnnnnnnnnnnnnnnnnnnnnnnnnnnnnnnnnnnnnnnnnnnnnnnnnnnnnnnnnnnnnnnnnnnnnnnnnnnnnnnnnnnnnnnnnnnnnnnnnnnnnnnnnnnnnnnnnnnnnnnnnnnnnnnnnnnnnnnnnnnnnnnnnnnnnnnnnnnnnnnnnnnnnnnnnnnnnnnnnnnnnnnnnnnnnnnnnnnnnnnnnnnnnnnnnnnnnnnnnnnnnnnnnnnnnnnnnnnnnnnnnnnnnnnnnnnnnnnnnnnnnnnnnnnnnnnnnnnnnnnnnnnnnnnnnnnnnnnnnnnnnnnnnnnnnnnnnnnnnnnnnnnnnnnnnnnnnnnnnnnnnnnnnnnnnnnnnnnnnnnnnnnnnnnnnnnnnnnnnnnnnnnnnnnnnnnnnnnnnnnnnnnnnnnnnnnnnnnnnnnnnnnnnnnnnnnnnnnnnnnnnnnnnnnnnnnnnnnnnnnnnnnnnnnnnnnnnnnnnnnnnnnnnnnnnnnnnnnnnnnnnnnnnnnnnnnnnnnnnnnnnnnnnnnnnnnnnnnnnnnnnnnnnnnnnnnnnnnnnnnnnnnnnnnnnnnnnnnnnnnnnnnnnnnnnnnnnnnnnnnnnnnnnnnnnnnnnnnnnnnnnnnnnnnnnnnnnnnnnnnnnnnnnnnnnnnnnnnnnnnnnnnnnnnnnnnnnnnnnnnnnnnnnnnnnnnnnnnnnnnnnnnnnnnnnnnnnnnnnnnnnnnnnnnnnnnnnnnnnnnnnnnnnnnnnnnnnnnnnnnnnnnnnnnnnnnnnnnnnnnnnnnnnnnnnnnnnnnnnnnnnnnnnnnnnnnnnnnnnnnnnnnnnnnnnnnnnnnnnnnnnnnnnnnnnnnnnnnnnnnnnnnnnnnnnnnnnnnnnnnnnnnnnnnnnnnnnnnnnnnnnnnnnnnnnnnnnnnnnnnnnnnnnnnnnnnnnnnnnnnnnnnnnnnnnnnnnnnnnnnnnnnnnnnnnnnnnnnnnnnnnnnnnnnnnnnnnnnnnnnnnnnnnnnnnnnnnnnnnnnnnnnnnnnnnnnnnnnnnnnnnnnnnnnnnnnnnnnnnnnnnnnnnnnnnnnnnnnnnnnnnnnnnnnnnnnnnnnnnnnnnnnnnnnnnnnnnnnnnnnnnnnnnnnnnnnnnnnnnnnnnnnnnnnnnnnnnnnnnnnnnnnnnnnnnnnnnnnnnnnnnnnnnnnnnnnnnnnnnnnnnnnnnnnnnnnnnnnnnnnnnnnnnnnnnnnnnnnnnnnnnnnnnnnnnnnnnnnnnnnnnnnnnnnnnnnnnnnnnnnnnnnnnnnnnnnnnnnnnnnnnnnnnnnnnnnnnnnnnnnnnnnnnnnnnnnnnnnnnnnnnnnnnnnnnnnnnnnnnnnnnnnnnnnnnnnnnnnnnnnnnnnnnnnnnnnnnnnnnnnnnnnnnnnnnnnnnnnnnnnnnnnnnnnnnnnnnnnnnnnnnnnnnnnnnnnnnnnnnnnnnnnnnnnnnnnnnnnnnnnnnnnnnnnnnnnnnnnnnnnnnnnnnnnnnnnnnnnnnnnnnnnnnnnnnnnnnnnnnnnnnnnnnnnnnnnnnnnnnnnnnnnnnnnnnnnnnnnnnnnnnnnnnnnnnnnnnnnnnnnnnnnnnnnnnnnnnnnnnnnnnnnnnnnnnnnnnnnnnnnnnnnnnnnnnnnnnnnnnnnnnnnnnnnnnnnnnnnnnnnnnnnnnnnnnnnnnnnnnnnnnnnnnnnnnnnnnnnnnnnnnnnnnnnnnnnnnnnnnnnnnnnnnnnnnnnnnnnnnnnnnnnnnnnnnnnnnnnnnnnnnnnnnnnnnnnnnnnnnnnnnnnnnnnnnnnnnnnnnnnnnnnnnnnnnnnnnnnnnnnnnnnnnnnnnnnnnnnnnnnnnnnnnnnnnnnnnnnnnnnnnnnnnnnnnnnnnnnnnnnnnnnnnnnnnnnnnnnnnnnnnnnnnnnnnnnnnnnnnnnnnnnnnnnnnnnnnnnnnnnnnnnnnnnnnnnnnnnnnnnnnnnnnnnnnnnnnnnnnnnnnnnnnnnnnnnnnnnnnnnnnnnnnnnnnnnnnnnnnnnnnnnnnnnnnnnnnnnnnnnnnnnnnnnnnnnnnnnnnnnnnnnnnnnnnnnnnnnnnnnnnnnnnnnnnnnnnnnnnnnnnnnnnnnnnnnnnnnnnnnnnnnnnnnnnnnnnnnnnnnnnnnnnnnnnnnnnnnnnnnnnnnnnnnnnnnnnnnnnnnnnnnnnnnnnnnnnnnnnnnnnnnnnnnnnnnnnnnnnnnnnnnnnnnnnnnnnnnnnnnnnnnnnnnnnnnnnnnnnnnnnnnnnnnnnnnnnnnnnnnnnnnnnnnnnnnnnnnnnnnnnnnnnnnnnnnnnnnnnnnnnnnnnnnnnnnnnnnnnnnnnnnnnnnnnnnnnnnnnnnnnnnnnnnnnnnnnnnnnnnnnnnnnnnnnnnnnnnnnnnnnnnnnnnnnnnnnnnnnnnnnnnnnnnnnnnnnnnnnnnnnnnnnnnnnnnnnnnnnnnnnnnnnnnnnnnnnnnnnnnnnnnnnnnnnnnnnnnnnnnnnnnnnnnnnnnnnnnnnnnnnnnnnnnnnnnnnnnnnnnnnnnnnnnnnnnnnnnnnnnnnnnnnnnnnnnnnnnnnnnnnnnnnnnnnnnnnnnnnnnnnnnnnnnnnnnnnnnnnnnnnnnnnnnnnnnnnnnnnnnnnnnnnnnnnnnnnnnnnnnnnnnnnnnnnnnnnnnnnnnnnnnnnnnnnnnnnnnnnnnnnnnnnnnnnnnnnnnnnnnnnnnnnnnnnnnnnnnnnnnnnnnnnnnnnnnnnnnnnnnnnnnnnnnnnnnnnnnnnnnnnnnnnnnnnnnnnnnnnnnnnnnnnnnnnnnnnnnnnnnnnnnnnnnnnnnnnnnnnnnnnnnnnnnnnnnnnnnnnnnnnnnnnnnnnnnnnnnnnnnnnnnnnnnnnnnnnnnnnnnnnnnnnnnnnnnnnnnnnnnnnnnnnnnnnnnnnnnnnnnnnnnnnnnnnnnnnnnnnnnnnnnnnnnnnnnnnnnnnnnnnnnnnnnnnnnnnnnnnnnnnnnnnnnnnnnnnnnnnnnnnnnnnnnnnnnnnnnnnnnnnnnnnnnnnnnnnnnnnnnnnnnnnnnnnnnnnnnnnnnnnnnnnnnnnnnnnnnnnnnnnnnnnnnnnnnnnnnnnnnnnnnnnnnnnnnnnnnnnnnnnnnnnnnnnnnnnnnnnnnnnnnnnnnnnnnnnnnnnnnnnnnnnnnnnnnnnnnnnnnnnnnnnnnnnnnnnnnnnnnnnnnnnnnnnnnnnnnnnnnnnnnnnnnnnnnnnnnnnnnnnnnnnnnnnnnnnnnnnnnnnnnnnnnnnnnnnnnnnnnnnnnnnnnnnnnnnnnnnnnnnnnnnnnnnnnnnnnnnnnnnnnnnnnnnnnnnnnnnnnnnnnnnnnnnnnnnnnnnnnnnnnnnnnnnnnnnnnnnnnnnnnnnnnnnnnnnnnnnnnnnnnnnnnnnnnnnnnnnnnnnnnnnnnnnnnnnnnnnnnnnnnnnnnnnnnnnnnnnnnnnnnnnnnnnnnnnnnnnnnnnnnnnnnnnnnnnnnnnnnnnnnnnnnnnnnnnnnnnnnnnnnnnnnnnnnnnnnnnnnnnnnnnnnnnnnnnnnnnnnnnnnnnnnnnnnnnnnnnnnnnnnnnnnnnnnnnnnnnnnnnnnnnnnnnnnnnnnnnnnnnnnnnnnnnnnnnnnnnnnnnnnnnnnnnnnnnnnnnnnnnnnnnnnnnnnnnnnnnnnnnnnnnnnnnnnnnnnnnnnnnnnnnnnnnnnnnnnnnnnnnnnnnnnnnnnnnnnnnnnnnnnnnnnnnnnnnnnnnnnnnnnnnnnnnnnnnnnnnnnnnnnnnnnnnnnnnnnnnnnnnnnnnnnnnnnnnnnnnnnnnnnnnnnnnnnnnnnnnnnnnnnnnnnnnnnnnnnnnnnnnnnnnnnnnnnnnnnnnnnnnnnnnnnnnnnnnnnnnnnnnnnnnnnnnnnnnnnnnnnnnnnnnnnnnnnnnnnnnnnnnnnnnnnnnnnnnnnnnnnnnnnnnnnnnnnnnnnnnnnnnnnnnnnnnnnnnnnnnnnnnnnnnnnnnnnnnnnnnnnnnnnnnnnnnnnnnnnnnnnnnnnnnnnnnnnnnnnnnnnnnnnnnnnnnnnnnnnnnnnnnnnnnnnnnnnnnnnnnnnnnnnnnnnnnnnnnnnnnnnnnnnnnnnnnnnnnnnnnnnnnnnnnnnnnnnnnnnnnnnnnnnnnnnnnnnnnnnnnnnnnnnnnnnnnnnnnnnnnnnnnnnnnnnnnnnnnnnnnnnnnnnnnnnnnnnnnnnnnnnnnnnnnnnnnnnnnnnnnnnnnnnnnnnnnnnnnnnnnnnnnnnnnnnnnnnnnnnnnnnnnnnnnnnnnnnnnnnnnnnnnnnnnnnnnnnnnnnnnnnnnnnnnnnnnnnnnnnnnnnnnnnnnnnnnnnnnnnnnnnnnnnnnnnnnnnnnnnnnnnnnnnnnnnnnnnnnnnnnnnnnnnnnnnnnnnnnnnnnnnnnnnnnnnnnnnnnnnnnnnnnnnnnnnnnnnnnnnnnnnnnnnnnnnnnnnnnnnnnnnnnnnnnnnnnnnnnnnnnnnnnnnnnnnnnnnnnnnnnnnnnnnnnnnnnnnnnnnnnnnnnnnnnnnnnnnnnnnnnnnnnnnnnnnnnnnnnnnnnnnnnnnnnnnnnnnnnnnnnnnnnnnnnnnnnnnnnnnnnnnnnnnnnnnnnnnnnnnnnnnnnnnnnnnnnnnnnnnnnnnnnnnnnnnnnnnnnnnnnnnnnnnnnnnnnnnnnnnnnnnnnnnnnnnnnnnnnnnnnnnnnnnnnnnnnnnnnnnnnnnnnnnnnnnnnnnnnnnnnnnnnnnnnnnnnnnnnnnnnnnnnnnnnnnnnnnnnnnnnnnnnnnnnnnnnnnnnnnnnnnnnnnnnnnnnnnnnnnnnnnnnnnnnnnnnnnnnnnnnnnnnnnnnnnnnnnnnnnnnnnnnnnnnnnnnnnnnnnnnnnnnnnnnnnnnnnnnnnnnnnnnnnnnnnnnnnnnnnnnnnnnnnnnnnnnnnnnnnnnnnnnnnnnnnnnnnnnnnnnnnnnnnnnnnnnnnnnnnnnnnnnnnnnnnnnnnnnnnnnnnnnnnnnnnnnnnnnnnnnnnnnnnnnnnnnnnnnnnnnnnnnnnnnnnnnnnnnnnnnnnnnnnnnnnnnnnnnnnnnnnnnnnnnnnnnnnnnnnnnnnnnnnnnnnnnnnnnnnnnnnnnnnnnnnnnnnnnnnnnnnnnnnnnnnnnnnnnnnnnnnnnnnnnnnnnnnnnnnnnnnnnnnnnnnnnnnnnnnnnnnnnnnnnnnnnnnnnnnnnnnnnnnnnnnnnnnnnnnnnnnnnnnnnnnnnnnnnnnnnnnnnnnnnnnnnnnnnnnnnnnnnnnnnnnnnnnnnnnnnnnnnnnnnnnnnnnnnnnnnnnnnnnnnnnnnnnnnnnnnnnnnnnnnnnnnnnnnnnnnnnnnnnnnnnnnnnnnnnnnnnnnnnnnnnnnnnnnnnnnnnnnnnnnnnnnnnnnnnnnnnnnnnnnnnnnnnnnnnnnnnnnnnnnnnnnnnnnnnnnnnnnnnnnnnnnnnnnnnnnnnnnnnnnnnnnnnnnnnnnnnnnnnnnnnnnnnnnnnnnnnnnnnnnnnnnnnnnnnnnnnnnnnnnnnnnnnnnnnnnnnnnnnnnnnnnnnnnnnnnnnnnnnnnnnnnnnnnnnnnnnnnnnnnnnnnnnnnnnnnnnnnnnnnnnnnnnnnnnnnnnnnnnnnnnnnnnnnnnnnnnnnnnnnnnnnnnnnnnnnnnnnnnnnnnnnnnnnnnnnnnnnnnnnnnnnnnnnnnnnnnnnnnnnnnnnnnnnnnnnnnnnnnnnnnnnnnnnnnnnnnnnnnnnnnnnnnnnnnnnnnnnnnnnnnnnnnnnnnnnnnnnnnnnnnnnnnnnnnnnnnnnnnnnnnnnnnnnnnnnnnnnnnnnnnnnnnnnnnnnnnnnnnnnnnnnnnnnnnnnnnnnnnnnnnnnnnnnnnnnnnnnnnnnnnnnnnnnnnnnnnnnnnnnnnnnnnnnnnnnnnnnnnnnnnnnnnnnnnnnnnnnnnnnnnnnnnnnnnnnnnnnnnnnnnnnnnnnnnnnnnnnnnnnnnnnnnnnnnnnnnnnnnnnnnnnnnnnnnnnnnnnnnnnnnnnnnnnnnnnnnnnnnnnnnnnnnnnnnnnnnnnnnnnnnnnnnnnnnnnnnnnnnnnnnnnnnnnnnnnnnnnnnnnnnnnnnnnnnnnnnnnnnnnnnnnnnnnnnnnnnnnnnnnnnnnnnnnnnnnnnnnnnnnnnnnnnnnnnnnnnnnnnnnnnnnnnnnnnnnnnnnnnnnnnnnnnnnnnnnnnnnnnnnnnnnnnnnnnnnnnnnnnnnnnnnnnnnnnnnnnnnnnnnnnnnnnnnnnnnnnnnnnnnnnnnnnnnnnnnnnnnnnnnnnnnnnnnnnnnnnnnnnnnnnnnnnnnnnnnnnnnnnnnnnnnnnnnnnnnnnnnnnnnnnnnnnnnnnnnnnnnnnnnnnnnnnnnnnnnnnnnnnnnnnnnnnnnnnnnnnnnnnnnnnnnnnnnnnnnnnnnnnnnnnnnnnnnnnnnnnnnnnnnnnnnnnnnnnnnnnnnnnnnnnnnnnnnnnnnnnnnnnnnnnnnnnnnnnnnnnnnnnnnnnnnnnnnnnnnnnnnnnnnnnnnnnnnnnnnnnnnnnnnnnnnnnnnnnnnnnnnnnnnnnnnnnnnnnnnnnnnnnnnnnnnnnnnnnnnnnnnnnnnnnnnnnnnnnnnnnnnnnnnnnnnnnnnnnnnnnnnnnnnnnnnnnnnnnnnnnnnnnnnnnnnnnnnnnnnnnnnnnnnnnnnnnnnnnnnnnnnnnnnnnnnnnnnnnnnnnnnnnnnnnnnnnnnnnnnnnnnnnnnnnnnnnnnnnnnnnnnnnnnnnnnnnnnnnnnnnnnnnnnnnnnnnnnnnnnnnnnnnnnnnnnnnnnnnnnnnnnnnnnnnnnnnnnnnnnnnnnnnnnnnnnnnnnnnnnnnnnnnnnnnnnnnnnnnnnnnnnnnnnnnnnnnnnnnnnnnnnnnnnnnnnnnnnnnnnnnnnnnnnnnnnnnnnnnnnnnnnnnnnnnnnnnnnnnnnnnnnnnnnnnnnnnnnnnnnnnnnnnnnnnnnnnnnnnnnnnnnnnnnnnnnnnnnnnnnnnnnnnnnnnnnnnnnnnnnnnnnnnnnnnnnnnnnnnnnnnnnnnnnnnnnnnnnnnnnnnnnnnnnnnnnnnnnnnnnnnnnnnnnnnnnnnnnnnnnnnnnnnnnnnnnnnnnnnnnnnnnnnnnnnnnnnnnnnnnnnnnnnnnnnnnnnnnnnnnnnnnnnnnnnnnnnnnnnnnnnnnnnnnnnnnnnnnnnnnnnnnnnnnnnnnnnnnnnnnnnnnnnnnnnnnnnnnnnnnnnnnnnnnnnnnnnnnnnnnnnnnnnnnnnnnnnnnnnnnnnnnnnnnnnnnnnnnnnnnnnnnnnnnnnnnnnnnnnnnnnnnnnnnnnnnnnnnnnnnnnnnnnnnnnnnnnnnnnnnnnnnnnnnnnnnnnnnnnnnnnnnnnnnnnnnnnnnnnnnnnnnnnnnnnnnnnnnnnnnnnnnnnnnnnnnnnnnnnnnnnnnnnnnnnnnnnnnnnnnnnnnnnnnnnnnnnnnnnnnnnnnnnnnnnnnnnnnnnnnnnnnnnnnnnnnnnnnnnnnnnnnnnnnnnnnnnnnnnnnnnnnnnnnnnnnnnnnnnnnnnnnnnnnnnnnnnnnnnnnnnnnnnnnnnnnnnnnnnnnnnnnnnnnnnnnnnnnnnnnnnnnnnnnnnnnnnnnnnnnnnnnnnnnnnnnnnnnnnnnnnnnnnnnnnnnnnnnnnnnnnnnnnnnnnnnnnnnnnnnnnnnnnnnnnnnnnnnnnnnnnnnnnnnnnnnnnnnnnnnnnnnnnnnnnnnnnnnnnnnnnnnnnnnnnnnnnnnnnnnnnnnnnnnnnnnnnnnnnnnnnnnnnnnnnnnnnnnnnnnnnnnnnnnnnnnnnnnnnnnnnnnnnnnnnnnnnnnnnnnnnnnnnnnnnnnnnnnnnnnnnnnnnnnnnnnnnnnnnnnnnnnnnnnnnnnnnnnnnnnnnnnnnnnnnnnnnnnnnnnnnnnnnnnnnnnnnnnnnnnnnnnnnnnnnnnnnnnnnnnnnnnnnnnnnnnnnnnnnnnnnnnnnnnnnnnnnnnnnnnnnnnnnnnnnnnnnnnnnnnnnnnnnnnnnnnnnnnnnnnnnnnnnnnnnnnnnnnnnnnnnnnnnnnnnnnnnnnnnnnnnnnnnnnnnnnnnnnnnnnnnnnnnnnnnnnnnnnnnnnnnnnnnnnnnnnnnnnnnnnnnnnnnnnnnnnnnnnnnnnnnnnnnnnnnnnnnnnnnnnnnnnnnnnnnnnnnnnnnnnnnnnnnnnnnnnnnnnnnnnnnnnnnnnnnnnnnnnnnnnnnnnnnnnnnnnnnnnnnnnnnnnnnnnnnnnnnnnnnnnnnnnnnnnnnnnnnnnnnnnnnnnnnnnnnnnnnnnnnnnnnnnnnnnnnnnnnnnnnnnnnnnnnnnnnnnnnnnnnnnnnnnnnnnnnnnnnnnnnnnnnnnnnnnnnnnnnnnnnnnnnnnnnnnnnnnnnnnnnnnnnnnnnnnnnnnnnnnnnnnnnnnnnnnnnnnnnnnnnnnnnnnnnnnnnnnnnnnnnnnnnnnnnnnnnnnnnnnnnnnnnnnnnnnnnnnnnnnnnnnnnnnnnnnnnnnnnnnnnnnnnnnnnnnnnnnnnnnnnnnnnnnnnnnnnnnnnnnnnnnnnnnnnnnnnnnnnnnnnnnnnnnnnnnnnnnnnnnnnnnnnnnnnnnnnnnnnnnnnnnnnnnnnnnnnnnnnnnnnnnnnnnnnnnnnnnnnnnnnnnnnnnnnnnnnnnnnnnnnnnnnnnnnnnnnnnnnnnnnnnnnnnnnnnnnnnnnnnnnnnnnnnnnnnnnnnnnnnnnnnnnnnnnnnnnnnnnnnnnnnnnnnnnnnnnnnnnnnnnnnnnnnnnnnnnnnnnnnnnnnnnnnnnnnnnnnnnnnnnnnnnnnnnnnnnnnnnnnnnnnnnnnnnnnnnnnnnnnnnnnnnnnnnnnnnnnnnnnnnnnnnnnnnnnnnnnnnnnnnnnnnnnnnnnnnnnnnnnnnnnnnnnnnnnnnnnnnnnnnnnnnnnnnnnnnnnnnnnnnnnnnnnnnnnnnnnnnnnnnnnnnnnnnnnnnnnnnnnnnnnnnnnnnnnnnnnnnnnnnnnnnnnnnnnnnnnnnnnnnnnnnnnnnnnnnnnnnnnnnnnnnnnnnnnnnnnnnnnnnnnnnnnnnnnnnnnnnnnnnnnnnnnnnnnnnnnnnnnnnnnnnnnnnnnnnnnnnnnnnnnnnnnnnnnnnnnnnnnnnnnnnnnnnnnnnnnnnnnnnnnnnnnnnnnnnnnnnnnnnnnnnnnnnnnnnnnnnnnnnnnnnnnnnnnnnnnnnnnnnnnnnnnnnnnnnnnnnnnnnnnnnnnnnnnnnnnnnnnnnnnnnnnnnnnnnnnnnnnnnnnnnnnnnnnnnnnnnnnnnnnnnnnnnnnnnnnnnnnnnnnnnnnnnnnnnnnnnnnnnnnnnnnnnnnnnnnnnnnnnnnnnnnnnnnnnnnnnnnnnnnnnnnnnnnnnnnnnnnnnnnnnnnnnnnnnnnnnnnnnnnnnnnnnnnnnnnnnnnnnnnnnnnnnnnnnnnnnnnnnnnnnnnnnnnnnnnnnnnnnnnnnnnnnnnnnnnnnnnnnnnnnnnnnnnnnnnnnnnnnnnnnnnnnnnnnnnnnnnnnnnnnnnnnnnnnnnnnnnnnnnnnnnnnnnnnnnnnnnnnnnnnnnnnnnnnnnnnnnnnnnnnnnnnnnnnnnnnnnnnnnnnnnnnnnnnnnnnnnnnnnnnnnnnnnnnnnnnnnnnnnnnnnnnnnnnnnnnnnnnnnnnnnnnnnnnnnnnnnnnnnnnnnnnnnnnnnnnnnnnnnnnnnnnnnnnnnnnnnnnnnnnnnnnnnnnnnnnnnnnnnnnnnnnnnnnnnnnnnnnnnnnnnnnnnnnnnnnnnnnnnnnnnnnnnnnnnnnnnnnnnnnnnnnnnnnnnnnnnnnnnnnnnnnnnnnnnnnnnnnnnnnnnnnnnnnnnnnnnnnnnnnnnnnnnnnnnnnnnnnnnnnnnnnnnnnnnnnnnnnnnnnnnnnnnnnnnnnnnnnnnnnnnnnnnnnnnnnnnnnnnnnnnnnnnnnnnnnnnnnnnnnnnnnnnnnnnnnnnnnnnnnnnnnnnnnnnnnnnnnnnnnnnnnnnnnnnnnnnnnnnnnnnnnnnnnnnnnnnnnnnnnnnnnnnnnnnnnnnnnnnnnnnnnnnnnnnnnnnnnnnnnnnnnnnnnnnnnnnnnnnnnnnnnnnnnnnnnnnnnnnnnnnnnnnnnnnnnnnnnnnnnnnnnnnnnnnnnnnnnnnnnnnnnnnnnnnnnnnnnnnnnnnnnnnnnnnnnnnnnnnnnnnnnnnnnnnnnnnnnnnnnnnnnnnnnnnnnnnnnnnnnnnnnnnnnnnnnnnnnnnnnnnnnnnnnnnnnnnnnnnnnnnnnnnnnnnnnnnnnnnnnnnnnnnnnnnnnnnnnnnnnnnnnnnnnnnnnnnnnnnnnnnnnnnnnnnnnnnnnnnnnnnnnnnnnnnnnnnnnnnnnnnnnnnnnnnnnnnnnnnnnnnnnnnnnnnnnnnnnnnnnnnnnnnnnnnnnnnnnnnnnnnnnnnnnnnnnnnnnnnnnnnnnnnnnnnnnnnnnnnnnnnnnnnnnnnnnnnnnnnnnnnnnnnnnnnnnnnnnnnnnnnnnnnnnnnnnnnnnnnnnnnnnnnnnnnnnnnnnnnnnnnnnnnnnnnnnnnnnnnnnnnnnnnnnnnnnnnnnnnnnnnnnnnnnnnnnnnnnnnnnnnnnnnnnnnnnnnnnnnnnnnnnnnnnnnnnnnnnnnnnnnnnnnnnnnnnnnnnnnnnnnnnnnnnnnnnnnnnnnnnnnnnnnnnnnnnnnnnnnnnnnnnnnnnnnnnnnnnnnnnnnnnnnnnnnnnnnnnnnnnnnnnnnnnnnnnnnnnnnnnnnnnnnnnnnnnnnnnnnnnnnnnnnnnnnnnnnnnnnnnnnnnnnnnnnnnnnnnnnnnnnnnnnnnnnnnnnnnnnnnnnnnnnnnnnnnnnnnnnnnnnnnnnnnnnnnnnnnnnnnnnnnnnnnnnnnnnnnnnnnnnnnnnnnnnnnnnnnnnnnnnnnnnnnnnnnnnnnnnnnnnnnnnnnnnnnnnnnnnnnnnnnnnnnnnnnnnnnnnnnnnnnnnnnnnnnnnnnnnnnnnnnnnnnnnnnnnnnnnnnnnnnnnnnnnnnnnnnnnnnnnnnnnnnnnnnnnnnnnnnnnnnnnnnnnnnnnnnnnnnnnnnnnnnnnnnnnnnnnnnnnnnnnnnnnnnnnnnnnnnnnnnnnnnnnnnnnnnnnnnnnnnnnnnnnnnnnnnnnnnnnnnnnnnnnnnnnnnnnnnnnnnnnnnnnnnnnnnnnnnnnnnnnnnnnnnnnnnnnnnnnnnnnnnnnnnnnnnnnnnnnnnnnnnnnnnnnnnnnnnnnnnnnnnnnnnnnnnnnnnnnnnnnnnnnnnnnnnnnnnnnnnnnnnnnnnnnnnnnnnnnnnnnnnnnnnnnnnnnnnnnnnnnnnnnnnnnnnnnnnnnnnnnnnnnnnnnnnnnnnnnnnnnnnnnnnnnnnnnnnnnnnnnnnnnnnnnnnnnnnnnnnnnnnnnnnnnnnnnnnnnnnnnnnnnnnnnnnnnnnnnnnnnnnnnnnnnnnnnnnnnnnnnnnnnnnnnnnnnnnnnnnnnnnnnnnnnnnnnnnnnnnnnnnnnnnnnnnnnnnnnnnnnnnnnnnnnnnnnnnnnnnnnnnnnnnnnnnnnnnnnnnnnnnnnnnnnnnnnnnnnnnnnnnnnnnnnnnnnnnnnnnnnnnnnnnnnnnnnnnnnnnnnnnnnnnnnnnnnnnnnnnnnnnnnnnnnnnnnnnnnnnnnnnnnnnnnnnnnnnnnnnnnnnnnnnnnnnnnnnnnnnnnnnnnnnnnnnnnnnnnnnnnnnnnnnnnnnnnnnnnnnnnnnnnnnnnnnnnnnnnnnnnnnnnnnnnnnnnnnnnnnnnnnnnnnnnnnnnnnnnnnnnnnnnnnnnnnnnnnnnnnnnnnnnnnnnnnnnnnnnnnnnnnnnnnnnnnnnnnnnnnnnnnnnnnnnnnnnnnnnnnnnnnnnnnnnnnnnnnnnnnnnnnnnnnnnnnnnnnnnnnnnnnnnnnnnnnnnnnnnnnnnnnnnnnnnnnnnnnnnnnnnnnnnnnnnnnnnnnnnnnnnnnnnnnnnnnnnnnnnnnnnnnnnnnnnnnnnnnnnnnnnnnnnnnnnnnnnnnnnnnnnnnnnnnnnnnnnnnnnnnnnnnnnnnnnnnnnnnnnnnnnnnnnnnnnnnnnnnnnnnnnnnnnnnnnnnnnnnnnnnnnnnnnnnnnnnnnnnnnnnnnnnnnnnnnnnnnnnnnnnnnnnnnnnnnnnnnnnnnnnnnnnnnnnnnnnnnnnnnnnnnnnnnnnnnnnnnnnnnnnnnnnnnnnnnnnnnnnnnnnnnnnnnnnnnnnnnnnnnnnnnnnnnnnnnnnnnnnnnnnnnnnnnnnnnnnnnnnnnnnnnnnnnnnnnnnnnnnnnnnnnnnnnnnnnnnnnnnnnnnnnnnnnnnnnnnnnnnnnnnnnnnnnnnnnnnnnnnnnnnnnnnnnnnnnnnnnnnnnnnnnnnnnnnnnnnnnnnnnnnnnnnnnnnnnnnnnnnnnnnnnnnnnnnnnnnnnnnnnnnnnnnnnnnnnnnnnnnnnnnnnnnnnnnnnnnnnnnnnnnnnnnnnnnnnnnnnnnnnnnnnnnnnnnnnnnnnnnnnnnnnnnnnnnnnnnnnnnnnnnnnnnnnnnnnnnnnnnnnnnnnnnnnnnnnnnnnnnnnnnnnnnnnnnnnnnnnnnnnnnnnnnnnnnnnnnnnnnnnnnnnnnnnnnnnnnnnnnnnnnnnnnnnnnnnnnnnnnnnnnnnnnnnnnnnnnnnnnnnnnnnnnnnnnnnnnnnnnnnnnnnnnnnnnnnnnnnnnnnnnnnnnnnnnnnnnnnnnnnnnnnnnnnnnnnnnnnnnnnnnnnnnnnnnnnnnnnnnnnnnnnnnnnnnnnnnnnnnnnnnnnnnnnnnnnnnnnnnnnnnnnnnnnnnnnnnnnnnnnnnnnnnnnnnnnnnnnnnnnnnnnnnnnnnnnnnnnnnnnnnnnnnnnnnnnnnnnnnnnnnnnnnnnnnnnnnnnnnnnnnnnnnnnnnnnnnnnnnnnnnnnnnnnnnnnnnnnnnnnnnnnnnnnnnnnnnnnnnnnnnnnnnnnnnnnnnnnnnnnnnnnnnnnnnnnnnnnnnnnnnnnnnnnnnnnnnnnnnnnnnnnnnnnnnnnnnnnnnnnnnnnnnnnnnnnnnnnnnnnnnnnnnnnnnnnnnnnnnnnnnnnnnnnnnnnnnnnnnnnnnnnnnnnnnnnnnnnnnnnnnnnnnnnnnnnnnnnnnnnnnnnnnnnnnnnnnnnnnnnnnnnnnnnnnnnnnnnnnnnnnnnnnnnnnnnnnnnnnnnnnnnnnnnnnnnnnnnnnnnnnnnnnnnnnnnnnnnnnnnnnnnnnnnnnnnnnnnnnnnnnnnnnnnnnnnnnnnnnnnnnnnnnnnnnnnnnnnnnnnnnnnnnnnnnnnnnnnnnnnnnnnnnnnnnnnnnnnnnnnnnnnnnnnnnnnnnnnnnnnnnnnnnnnnnnnnnnnnnnnnnnnnnnnnnnnnnnnnnnnnnnnnnnnnnnnnnnnnnnnnnnnnnnnnnnnnnnnnnnnnnnnnnnnnnnnnnnnnnnnnnnnnnnnnnnnnnnnnnnnnnnnnnnnnnnnnnnnnnnnnnnnnnnnnnnnnnnnnnnnnnnnnnnnnnnnnnnnnnnnnnnnnnnnnnnnnnnnnnnnnnnnnnnnnnnnnnnnnnnnnnnnnnnnnnnnnnnnnnnnnnnnnnnnnnnnnnnnnnnnnnnnnnnnnnnnnnnnnnnnnnnnnnnnnnnnnnnnnnnnnnnnnnnnnnnnnnnnnnnnnnnnnnnnnnnnnnnnnnnnnnnnnnnnnnnnnnnnnnnnnnnnnnnnnnnnnnnnnnnnnnnnnnnnnnnnnnnnnnnnnnnnnnnnnnnnnnnnnnnnnnnnnnnnnnnnnnnnnnnnnnnnnnnnnnnnnnnnnnnnnnnnnnnnnnnnnnnnnnnnnnnnnnnnnnnnnnnnnnnnnnnnnnnnnnnnnnnnnnnnnnnnnnnnnnnnnnnnnnnnnnnnnnnnnnnnnnnnnnnnnnnnnnnnnnnnnnnnnnnnnnnnnnnnnnnnnnnnnnnnnnnnnnnnnnnnnnnnnnnnnnnnnnnnnnnnnnnnnnnnnnnnnnnnnnnnnnnnnnnnnnnnnnnnnnnnnnnnnnnnnnnnnnnnnnnnnnnnnnnnnnnnnnnnnnnnnnnnnnnnnnnnnnnnnnnnnnnnnnnnnnnnnnnnnnnnnnnnnnnnnnnnnnnnnnnnnnnnnnnnnnnnnnnnnnnnnnnnnnnnnnnnnnnnnnnnnnnnnnnnnnnnnnnnnnnnnnnnnnnnnnnnnnnnnnnnnnnnnnnnnnnnnnnnnnnnnnnnnnnnnnnnnnnnnnnnnnnnnnnnnnnnnnnnnnnnnnnnnnnnnnnnnnnnnnnnnnnnnnnnnnnnnnnnnnnnnnnnnnnnnnnnnnnnnnnnnnnnnnnnnnnnnnnnnnnnnnnnnnnnnnnnnnnnnnnnnnnnnnnnnnnnnnnnnnnnnnnnnnnnnnnnnnnnnnnnnnnnnnnnnnnnnnnnnnnnnnnnnnnnnnnnnnnnnnnnnnnnnnnnnnnnnnnnnnnnnnnnnnnnnnnnnnnnnnnnnnnnnnnnnnnnnnnnnnnnnnnnnnnnnnnnnnnnnnnnnnnnnnnnnnnnnnnnnnnnnnnnnnnnnnnnnnnnnnnnnnnnnnnnnnnnnnnnnnnnnnnnnnnnnnnnnnnnnnnnnnnnnnnnnnnnnnnnnnnnnnnnnnnnnnnnnnnnnnnnnnnnnnnnnnnnnnnnnnnnnnnnnnnnnnnnnnnnnnnnnnnnnnnnnnnnnnnnnnnnnnnnnnnnnnnnnnnnnnnnnnnnnnnnnnnnnnnnnnnnnnnnnnnnnnnnnnnnnnnnnnnnnnnnnnnnnnnnnnnnnnnnnnnnnnnnnnnnnnnnnnnnnnnnnnnnnnnnnnnnnnnnnnnnnnnnnnnnnnnnnnnnnnnnnnnnnnnnnnnnnnnnnnnnnnnnnnnnnnnnnnnnnnnnnnnnnnnnnnnnnnnnnnnnnnnnnnnnnnnnnnnnnnnnnnnnnnnnnnnnnnnnnnnnnnnnnnnnnnnnnnnnnnnnnnnnnnnnnnnnnnnnnnnnnnnnnnnnnnnnnnnnnnnnnnnnnnnnnnnnnnnnnnnnnnnnnnnnnnnnnnnnnnnnnnnnnnnnnnnnnnnnnnnnnnnnnnnnnnnnnnnnnnnnnnnnnnnnnnnnnnnnnnnnnnnnnnnnnnnnnnnnnnnnnnnnnnnnnnnnnnnnnnnnnnnnnnnnnnnnnnnnnnnnnnnnnnnnnnnnnnnnnnnnnnnnnnnnnnnnnnnnnnnnnnnnnnnnnnnnnnnnnnnnnnnnnnnnnnnnnnnnnnnnnnnnnnnnnnnnnnnnnnnnnnnnnnnnnnnnnnnnnnnnnnnnnnnnnnnnnnnnnnnnnnnnnnnnnnnnnnnnnnnnnnnnnnnnnnnnnnnnnnnnnnnnnnnnnnnnnnnnnnnnnnnnnnnnnnnnnnnnnnnnnnnnnnnnnnnnnnnnnnnnnnnnnnnnnnnnnnnnnnnnnnnnnnnnnnnnnnnnnnnnnnnnnnnnnnnnnnnnnnnnnnnnnnnnnnnnnnnnnnnnnnnnnnnnnnnnnnnnnnnnnnnnnnnnnnnnnnnnnnnnnnnnnnnnnnnnnnnnnnnnnnnnnnnnnnnnnnnnnnnnnnnnnnnnnnnnnnnnnnnnnnnnnnnnnnnnnnnnnnnnnnnnnnnnnnnnnnnnnnnnnnnnnnnnnnnnnnnnnnnnnnnnnnnnnnnnnnnnnnnnnnnnnnnnnnnnnnnnnnnnnnnnnnnnnnnnnnnnnnnnnnnnnnnnnnnnnnnnnnnnnnnnnnnnnnnnnnnnnnnnnnnnnnnnnnnnnnnnnnnnnnnnnnnnnnnnnnnnnnnnnnnnnnnnnnnnnnnnnnnnnnnnnnnnnnnnnnnnnnnnnnnnnnnnnnnnnnnnnnnnnnnnnnnnnnnnnnnnnnnnnnnnnnnnnnnnnnnnnnnnnnnnnnnnnnnnnnnnnnnnnnnnnnnnnnnnnnnnnnnnnnnnnnnnnnnnnnnnnnnnnnnnnnnnnnnnnnnnnnnnnnnnnnnnnnnnnnnnnnnnnnnnnnnnnnnnnnnnnnnnnnnnnnnnnnnnnnnnnnnnnnnnnnnnnnnnnnnnnnnnnnnnnnnnnnnnnnnnnnnnnnnnnnnnnnnnnnnnnnnnnnnnnnnnnnnnnnnnnnnnnnnnnnnnnnnnnnnnnnnnnnnnnnnnnnnnnnnnnnnnnnnnnnnnnnnnnnnnnnnnnnnnnnnnnnnnnnnnnnnnnnnnnnnnnnnnnnnnnnnnnnnnnnnnnnnnnnnnnnnnnnnnnnnnnnnnnnnnnnnnnnnnnnnnnnnnnnnnnnnnnnnnnnnnnnnnnnnnnnnnnnnnnnnnnnnnnnnnnnnnnnnnnnnnnnnnnnnnnnnnnnnnnnnnnnnnnnnnnnnnnnnnnnnnnnnnnnnnnnnnnnnnnnnnnnnnnnnnnnnnnnnnnnnnnnnnnnnnnnnnnnnnnnnnnnnnnnnnnnnnnnnnnnnnnnnnnnnnnnnnnnnnnnnnnnnnnnnnnnnnnnnnnnnnnnnnnnnnnnnnnnnnnnnnnnnnnnnnnnnnnnnnnnnnnnnnnnnnnnnnnnnnnnnnnnnnnnnnnnnnnnnnnnnnnnnnnnnnnnnnnnnnnnnnnnnnnnnnnnnnnnnnnnnnnnnnnnnnnnnnnnnnnnnnnnnnnnnnnnnnnnnnnnnnnnnnnnnnnnnnnnnnnnnnnnnnnnnnnnnnnnnnnnnnnnnnnnnnnnnnnnnnnnnnnnnnnnnnnnnnnnnnnnnnnnnnnnnnnnnnnnnnnnnnnnnnnnnnnnnnnnnnnnnnnnnnnnnnnnnnnnnnnnnnnnnnnnnnnnnnnnnnnnnnnnnnnnnnnnnnnnnnnnnnnnnnnnnnnnnnnnnnnnnnnnnnnnnnnnnnnnnnnnnnnnnnnnnnnnnnnnnnnnnnnnnnnnnnnnnnnnnnnnnnnnnnnnnnnnnnnnnnnnnnnnnnnnnnnnnnnnnnnnnnnnnnnnnnnnnnnnnnnnnnnnnnnnnnnnnnnnnnnnnnnnnnnnnnnnnnnnnnnnnnnnnnnnnnnnnnnnnnnnnnnnnnnnnnnnnnnnnnnnnnnnnnnnnnnnnnnnnnnnnnnnnnnnnnnnnnnnnnnnnnnnnnnnnnnnnnnnnnnnnnnnnnnnnnnnnnnnnnnnnnnnnnnnnnnnnnnnnnnnnnnnnnnnnnnnnnnnnnnnnnnnnnnnnnnnnnnnnnnnnnnnnnnnnnnnnnnnnnnnnnnnnnnnnnnnnnnnnnnnnnnnnnnnnnnnnnnnnnnnnnnnnnnnnnnnnnnnnnnnnnnnnnnnnnnnnnnnnnnnnnnnnnnnnnnnnnnnnnnnnnnnnnnnnnnnnnnnnnnnnnnnnnnnnnnnnnnnnnnnnnnnnnnnnnnnnnnnnnnnnnnnnnnnnnnnnnnnnnnnnnnnnnnnnnnnnnnnnnnnnnnnnnnnnnnnnnnnnnnnnnnnnnnnnnnnnnnnnnnnnnnnnnnnnnnnnnnnnnnnnnnnnnnnnnnnnnnnnnnnnnnnnnnnnnnnnnnnnnnnnnnnnnnnnnnnnnnnnnnnnnnnnnnnnnnnnnnnnnnnnnnnnnnnnnnnnnnnnnnnnnnnnnnnnnnnnnnnnnnnnnnnnnnnnnnnnnnnnnnnnnnnnnnnnnnnnnnnnnnnnnnnnnnnnnnnnnnnnnnnnnnnnnnnnnnnnnnnnnnnnnnnnnnnnnnnnnnnnnnnnnnnnnnnnnnnnnnnnnnnnnnnnnnnnnnnnnnnnnnnnnnnnnnnnnnnnnnnnnnnnnnnnnnnnnnnnnnnnnnnnnnnnnnnnnnnnnnnnnnnnnnnnnnnnnnnnnnnnnnnnnnnnnnnnnnnnnnnnnnnnnnnnnnnnnnnnnnnnnnnnnnnnnnnnnnnnnnnnnnnnnnnnnnnnnnnnnnnnnnnnnnnnnnnnnnnnnnnnnnnnnnnnnnnnnnnnnnnnnnnnnnnnnnnnnnnnnnnnnnnnnnnnnnnnnnnnnnnnnnnnnnnnnnnnnnnnnnnnnnnnnnnnnnnnnnnnnnnnnnnnnnnnnnnnnnnnnnnnnnnnnnnnnnnnnnnnnnnnnnnnnnnnnnnnnnnnnnnnnnnnnnnnnnnnnnnnnnnnnnnnnnnnnnnnnnnnnnnnnnnnnnnnnnnnnnnnnnnnnnnnnnnnnnnnnnnnnnnnnnnnnnnnnnnnnnnnnnnnnnnnnnnnnnnnnnnnnnnnnnnnnnnnnnnnnnnnnnnnnnnnnnnnnnnnnnnnnnnnnnnnnnnnnnnnnnnnnnnnnnnnnnnnnnnnnnnnnnnnnnnnnnnnnnnnnnnnnnnnnnnnnnnnnnnnnnnnnnnnnnnnnnnnnnnnnnnnnnnnnnnnnnnnnnnnnnnnnnnnnnnnnnnnnnnnnnnnnnnnnnnnnnnnnnnnnnnnnnnnnnnnnnnnnnnnnnnnnnnnnnnnnnnnnnnnnnnnnnnnnnnnnnnnnnnnnnnnnnnnnnnnnnnnnnnnnnnnnnnnnnnnnnnnnnnnnnnnnnnnnnnnnnnnnnnnnnnnnnnnnnnnnnnnnnnnnnnnnnnnnnnnnnnnnnnnnnnnnnnnnnnnnnnnnnnnnnnnnnnnnnnnnnnnnnnnnnnnnnnnnnnnnnnnnnnnnnnnnnnnnnnnnnnnnnnnnnnnnnnnnnnnnnnnnnnnnnnnnnnnnnnnnnnnnnnnnnnnnnnnnnnnnnnnnnnnnnnnnnnnnnnnnnnnnnnnnnnnnnnnnnnnnnnnnnnnnnnnnnnnnnnnnnnnnnnnnnnnnnnnnnnnnnnnnnnnnnnnnnnnnnnnnnnnnnnnnnnnnnnnnnnnnnnnnnnnnnnnnnnnnnnnnnnnnnnnnnnnnnnnnnnnnnnnnnnnnnnnnnnnnnnnnnnnnnnnnnnnnnnnnnnnnnnnnnnnnnnnnnnnnnnnnnnnnnnnnnnnnnnnnnnnnnnnnnnnnnnnnnnnnnnnnnnnnnnnnnnnnnnnnnnnnnnnnnnnnnnnnnnnnnnnnnnnnnnnnnnnnnnnnnnnnnnnnnnnnnnnnnnnnnnnnnnnnnnnnnnnnnnnnnnnnnnnnnnnnnnnnnnnnnnnnnnnnnnnnnnnnnnnnnnnnnnnnnnnnnnnnnnnnnnnnnnnnnnnnnnnnnnnnnnnnnnnnnnnnnnnnnnnnnnnnnnnnnnnnnnnnnnnnnnnnnnnnnnnnnnnnnnnnnnnnnnnnnnnnnnnnnnnnnnnnnnnnnnnnnnnnnnnnnnnnnnnnnnnnnnnnnnnnnnnnnnnnnnnnnnnnnnnnnnnnnnnnnnnnnnnnnnnnnnnnnnnnnnnnnnnnnnnnnnnnnnnnnnnnnnnnnnnnnnnnnnnnnnnnnnnnnnnnnnnnnnnnnnnnnnnnnnnnnnnnnnnnnnnnnnnnnnnnnnnnnnnnnnnnnnnnnnnnnnnnnnnnnnnnnnnnnnnnnnnnnnnnnnnnnnnnnnnnnnnnnnnnnnnnnnnnnnnnnnnnnnnnnnnnnnnnnnnnnnnnnnnnnnnnnnnnnnnnnnnnnnnnnnnnnnnnnnnnnnnnnnnnnnnnnnnnnnnnnnnnnnnnnnnnnnnnnnnnnnnnnnnnnnnnnnnnnnnnnnnnnnnnnnnnnnnnnnnnnnnnnnnnnnnnnnnnnnnnnnnnnnnnnnnnnnnnnnnnnnnnnnnnnnnnnnnnnnnnnnnnnnnnnnnnnnnnnnnnnnnnnnnnnnnnnnnnnnnnnnnnnnnnnnnnnnnnnnnnnnnnnnnnnnnnnnnnnnnnnnnnnnnnnnnnnnnnnnnnnnnnnnnnnnnnnnnnnnnnnnnnnnnnnnnnnnnnnnnnnnnnnnnnnnnnnnnnnnnnnnnnnnnnnnnnnnnnnnnnnnnnnnnnnnnnnnnnnnnnnnnnnnnnnnnnnnnnnnnnnnnnnnnnnnnnnnnnnnnnnnnnnnnnnnnnnnnnnnnnnnnnnnnnnnnnnnnnnnnnnnnnnnnnnnnnnnnnnnnnnnnnnnnnnnnnnnnnnnnnnnnnnnnnnnnnnnnnnnnnnnnnnnnnnnnnnnnnnnnnnnnnnnnnnnnnnnnnnnnnnnnnnnnnnnnnnnnnnnnnnnnnnnnnnnnnnnnnnnnnnnnnnnnnnnnnnnnnnnnnnnnnnnnnnnnnnnnnnnnnnnnnnnnnnnnnnnnnnnnnnnnnnnnnnnnnnnnnnnnnnnnnnnnnnnnnnnnnnnnnnnnnnnnnnnnnnnnnnnnnnnnnnnnnnnnnnnnnnnnnnnnnnnnnnnnnnnnnnnnnnnnnnnnnnnnnnnnnnnnnnnnnnnnnnnnnnnnnnnnnnnnnnnnnnnnnnnnnnnnnnnnnnnnnnnnnnnnnnnnnnnnnnnnnnnnnnnnnnnnnnnnnnnnnnnnnnnnnnnnnnnnnnnnnnnnnnnnnnnnnnnnnnnnnnnnnnnnnnnnnnnnnnnnnnnnnnnnnnnnnnnnnnnnnnnnnnnnnnnnnnnnnnnnnnnnnnnnnnnnnnnnnnnnnnnnnnnnnnnnnnnnnnnnnnnnnnnnnnnnnnnnnnnnnnnnnnnnnnnnnnnnnnnnnnnnnnnnnnnnnnnnnnnnnnnnnnnnnnnnnnnnnnnnnnnnnnnnnnnnnnnnnnnnnnnnnnnnnnnnnnnnnnnnnnnnnnnnnnnnnnnnnnnnnnnnnnnnnnnnnnnnnnnnnnnnnnnnnnnnnnnnnnnnnnnnnnnnnnnnnnnnnnnnnnnnnnnnnnnnnnnnnnnnnnnnnnnnnnnnnnnnnnnnnnnnnnnnnnnnnnnnnnnnnnnnnnnnnnnnnnnnnnnnnnnnnnnnnnnnnnnnnnnnnnnnnnnnnnnnnnnnnnnnnnnnnnnnnnnnnnnnnnnnnnnnnnnnnnnnnnnnnnnnnnnnnnnnnnnnnnnnnnnnnnnnnnnnnnnnnnnnnnnnnnnnnnnnnnnnnnnnnnnnnnnnnnnnnnnnnnnnnnnnnnnnnnnnnnnnnnnnnnnnnnnnnnnnnnnnnnnnnnnnnnnnnnnnnnnnnnnnnnnnnnnnnnnnnnnnnnnnnnnnnnnnnnnnnnnnnnnnnnnnnnnnnnnnnnnnnnnnnnnnnnnnnnnnnnnnnnnnnnnnnnnnnnnnnnnnnnnnnnnnnnnnnnnnnnnnnnnnnnnnnnnnnnnnnnnnnnnnnnnnnnnnnnnnnnnnnnnnnnnnnnnnnnnnnnnnnnnnnnnnnnnnnnnnnnnnnnnnnnnnnnnnnnnnnnnnnnnnnnnnnnnnnnnnnnnnnnnnnnnnnnnnnnnnnnnnnnnnnnnnnnnnnnnnnnnnnnnnnnnnnnnnnnnnnnnnnnnnnnnnnnnnnnnnnnnnnnnnnnnnnnnnnnnnnnnnnnnnnnnnnnnnnnnnnnnnnnnnnnnnnnnnnnnnnnnnnnnnnnnnnnnnnnnnnnnnnnnnnnnnnnnnnnnnnnnnnnnnnnnnnnnnnnnnnnnnnnnnnnnnnnnnnnnnnnnnnnnnnnnnnnnnnnnnnnnnnnnnnnnnnnnnnnnnnnnnnnnnnnnnnnnnnnnnnnnnnnnnnnnnnnnnnnnnnnnnnnnnnnnnnnnnnnnnnnnnnnnnnnnnnnnnnnnnnnnnnnnnnnnnnnnnnnnnnnnnnnnnnnnnnnnnnnnnnnnnnnnnnnnnnnnnnnnnnnnnnnnnnnnnnnnnnnnnnnnnnnnnnnnnnnnnnnnnnnnnnnnnnnnnnnnnnnnnnnnnnnnnnnnnnnnnnnnnnnnnnnnnnnnnnnnnnnnnnnnnnnnnnnnnnnnnnnnnnnnnnnnnnnnnnnnnnnnnnnnnnnnnnnnnnnnnnnnnnnnnnnnnnnnnnnnnnnnnnnnnnnnnnnnnnnnnnnnnnnnnnnnnnnnnnnnnnnnnnnnnnnnnnnnnnnnnnnnnnnnnnnnnnnnnnnnnnnnnnnnnnnnnnnnnnnnnnnnnnnnnnnnnnnnnnnnnnnnnnnnnnnnnnnnnnnnnnnnnnnnnnnnnnnnnnnnnnnnnnnnnnnnnnnnnnnnnnnnnnnnnnnnnnnnnnnnnnnnnnnnnnnnnnnnnnnnnnnnnnnnnnnnnnnnnnnnnnnnnnnnnnnnnnnnnnnnnnnnnnnnnnnnnnnnnnnnnnnnnnnnnnnnnnnnnnnnnnnnnnnnnnnnnnnnnnnnnnnnnnnnnnnnnnnnnnnnnnnnnnnnnnnnnnnnnnnnnnnnnnnnnnnnnnnnnnnnnnnnnnnnnnnnnnnnnnnnnnnnnnnnnnnnnnnnnnnnnnnnnnnnnnnnnnnnnnnnnnnnnnnnnnnnnnnnnnnnnnnnnnnnnnnnnnnnnnnnnnnnnnnnnnnnnnnnnnnnnnnnnnnnnnnnnnnnnnnnnnnnnnnnnnnnnnnnnnnnnnnnnnnnnnnnnnnnnnnnnnnnnnnnnnnnnnnnnnnnnnnnnnnnnnnnnnnnnnnnnnnnnnnnnnnnnnnnnnnnnnnnnnnnnnnnnnnnnnnnnnnnnnnnnnnnnnnnnnnnnnnnnnnnnnnnnnnnnnnnnnnnnnnnnnnnnnnnnnnnnnnnnnnnnnnnnnnnnnnnnnnnnnnnnnnnnnnnnnnnnnnnnnnnnnnnnnnnnnnnnnnnnnnnnnnnnnnnnnnnnnnnnnnnnnnnnnnnnnnnnnnnnnnnnnnnnnnnnnnnnnnnnnnnnnnnnnnnnnnnnnnnnnnnnnnnnnnnnnnnnnnnnnnnnnnnnnnnnnnnnnnnnnnnnnnnnnnnnnnnnnnnnnnnnnnnnnnnnnnnnnnnnnnnnnnnnnnnnnnnnnnnnnnnnnnnnnnnnnnnnnnnnnnnnnnnnnnnnnnnnnnnnnnnnnnnnnnnnnnnnnnnnnnnnnnnnnnnnnnnnnnnnnnnnnnnnnnnnnnnnnnnnnnnnnnnnnnnnnnnnnnnnnnnnnnnnnnnnnnnnnnnnnnnnnnnnnnnnnnnnnnnnnnnnnnnnnnnnnnnnnnnnnnnnnnnnnnnnnnnnnnnnnnnnnnnnnnnnnnnnnnnnnnnnnnnnnnnnnnnnnnnnnnnnnnnnnnnnnnnnnnnnnnnnnnnnnnnnnnnnnnnnnnnnnnnnnnnnnnnnnnnnnnnnnnnnnnnnnnnnnnnnnnnnnnnnnnnnnnnnnnnnnnnnnnnnnnnnnnnnnnnnnnnnnnnnnnnnnnnnnnnnnnnnnnnnnnnnnnnnnnnnnnnnnnnnnnnnnnnnnnnnnnnnnnnnnnnnnnnnnnnnnnnnnnnnnnnnnnnnnnnnnnnnnnnnnnnnnnnnnnnnnnnnnnnnnnnnnnnnnnnnnnnnnnnnnnnnnnnnnnnnnnnnnnnnnnnnnnnnnnnnnnnnnnnnnnnnnnnnnnnnnnnnnnnnnnnnnnnnnnnnnnnnnnnnnnnnnnnnnnnnnnnnnnnnnnnnnnnnnnnnnnnnnnnnnnnnnnnnnnnnnnnnnnnnnnnnnnnnnnnnnnnnnnnnnnnnnnnnnnnnnnnnnnnnnnnnnnnnnnnnnnnnnnnnnnnnnnnnnnnnnnnnnnnnnnnnnnnnnnnnnnnnnnnnnnnnnnnnnnnnnnnnnnnnnnnnnnnnnnnnnnnnnnnnnnnnnnnnnnnnnnnnnnnnnnnnnnnnnnnnnnnnnnnnnnnnnnnnnnnnnnnnnnnnnnnnnnnnnnnnnnnnnnnnnnnnnnnnnnnnnnnnnnnnnnnnnnnnnnnnnnnnnnnnnnnnnnnnnnnnnnnnnnnnnnnnnnnnnnnnnnnnnnnnnnnnnnnnnnnnnnnnnnnnnnnnnnnnnnnnnnnnnnnnnnnnnnnnnnnnnnnnnnnnnnnnnnnnnnnnnnnnnnnnnnnnnnnnnnnnnnnnnnnnnnnnnnnnnnnnnnnnnnnnnnnnnnnnnnnnnnnnnnnnnnnnnnnnnnnnnnnnnnnnnnnnnnnnnnnnnnnnnnnnnnnnnnnnnnnnnnnnnnnnnnnnnnnnnnnnnnnnnnnnnnnnnnnnnnnnnnnnnnnnnnnnnnnnnnnnnnnnnnnnnnnnnnnnnnnnnnnnnnnnnnnnnnnnnnnnnnnnnnnnnnnnnnnnnnnnnnnnnnnnnnnnnnnnnnnnnnnnnnnnnnnnnnnnnnnnnnnnnnnnnnnnnnnnnnnnnnnnnnnnnnnnnnnnnnnnnnnnnnnnnnnnnnnnnnnnnnnnnnnnnnnnnnnnnnnnnnnnnnnnnnnnnnnnnnnnnnnnnnnnnnnnnnnnnnnnnnnnnnnnnnnnnnnnnnnnnnnnnnnnnnnnnnnnnnnnnnnnnnnnnnnnnnnnnnnnnnnnnnnnnnnnnnnnnnnnnnnnnnnnnnnnnnnnnnnnnnnnnnnnnnnnnnnnnnnnnnnnnnnnnnnnnnnnnnnnnnnnnnnnnnnnnnnnnnnnnnnnnnnnnnnnnnnnnnnnnnnnnnnnnnnnnnnnnnnnnnnnnnnnnnnnnnnnnnnnnnnnnnnnnnnnnnnnnnnnnnnnnnnnnnnnnnnnnnnnnnnnnnnnnnnnnnnnnnnnnnnnnnnnnnnnnnnnnnnnnnnnnnnnnnnnnnnnnnnnnnnnnnnnnnnnnnnnnnnnnnnnnnnnnnnnnnnnnnnnnnnnnnnnnnnnnnnnnnnnnnnnnnnnnnnnnnnnnnnnnnnnnnnnnnnnnnnnnnnnnnnnnnnnnnnnnnnnnnnnnnnnnnnnnnnnnnnnnnnnnnnnnnnnnnnnnnnnnnnnnnnnnnnnnnnnnnnnnnnnnnnnnnnnnnnnnnnnnnnnnnnnnnnnnnnnnnnnnnnnnnnnnnnnnnnnnnnnnnnnnnnnnnnnnnnnnnnnnnnnnnnnnnnnnnnnnnnnnnnnnnnnnnnnnnnnnnnnnnnnnnnnnnnnnnnnnnnnnnnnnnnnnnnnnnnnnnnnnnnnnnnnnnnnnnnnnnnnnnnnnnnnnnnnnnnnnnnnnnnnnnnnnnnnnnnnnnnnnnnnnnnnnnnnnnnnnnnnnnnnnnnnnnnnnnnnnnnnnnnnnnnnnnnnnnnnnnnnnnnnnnnnnnnnnnnnnnnnnnnnnnnnnnnnnnnnnnnnnnnnnnnnnnnnnnnnnnnnnnnnnnnnnnnnnnnnnnnnnnnnnnnnnnnnnnnnnnnnnnnnnnnnnnnnnnnnnnnnnnnnnnnnnnnnnnnnnnnnnnnnnnnnnnnnnnnnnnnnnnnnnnnnnnnnnnnnnnnnnnnnnnnnnnnnnnnnnnnnnnnnnnnnnnnnnnnnnnnnnnnnnnnnnnnnnnnnnnnnnnnnnnnnnnnnnnnnnnnnnnnnnnnnnnnnnnnnnnnnnnnnnnnnnnnnnnnnnnnnnnnnnnnnnnnnnnnnnnnnnnnnnnnnnnnnnnnnnnnnnnnnnnnnnnnnnnnnnnnnnnnnnnnnnnnnnnnnnnnnnnnnnnnnnnnnnnnnnnnnnnnnnnnnnnnnnnnnnnnnnnnnnnnnnnnnnnnnnnnnnnnnnnnnnnnnnnnnnnnnnnnnnnnnnnnnnnnnnnnnnnnnnnnnnnnnnnnnnnnnnnnnnnnnnnnnnnnnnnnnnnnnnnnnnnnnnnnnnnnnnnnnnnnnnnnnnnnnnnnnnnnnnnnnnnnnnnnnnnnnnnnnnnnnnnnnnnnnnnnnnnnnnnnnnnnnnnnnnnnnnnnnnnnnnnnnnnnnnnnnnnnnnnnnnnnnnnnnnnnnnnnnnnnnnnnnnnnnnnnnnnnnnnnnnnnnnnnnnnnnnnnnnnnnnnnnnnnnnnnnnnnnnnnnnnnnnnnnnnnnnnnnnnnnnnnnnnnnnnnnnnnnnnnnnnnnnnnnnnnnnnnnnnnnnnnnnnnnnnnnnnnnnnnnnnnnnnnnnnnnnnnnnnnnnnnnnnnnnnnnnnnnnnnnnnnnnnnnnnnnnnnnnnnnnnnnnnnnnnnnnnnnnnnnnnnnnnnnnnnnnnnnnnnnnnnnnnnnnnnnnnnnnnnnnnnnnnnnnnnnnnnnnnnnnnnnnnnnnnnnnnnnnnnnnnnnnnnnnnnnnnnnnnnnnnnnnnnnnnnnnnnnnnnnnnnnnnnnnnnnnnnnnnnnnnnnnnnnnnnnnnnnnnnnnnnnnnnnnnnnnnnnnnnnnnnnnnnnnnnnnnnnnnnnnnnnnnnnnnnnnnnnnnnnnnnnnnnnnnnnnnnnnnnnnnnnnnnnnnnnnnnnnnnnnnnnnnnnnnnnnnnnnnnnnnnnnnnnnnnnnnnnnnnnnnnnnnnnnnnnnnnnnnnnnnnnnnnnnnnnnnnnnnnnnnnnnnnnnnnnnnnnnnnnnnnnnnnnnnnnnnnnnnnnnnnnnnnnnnnnnnnnnnnnnnnnnnnnnnnnnnnnnnnnnnnnnnnnnnnnnnnnnnnnnnnnnnnnnnnnnnnnnnnnnnnnnnnnnnnnnnnnnnnnnnnnnnnnnnnnnnnnnnnnnnnnnnnnnnnnnnnnnnnnnnnnnnnnnnnnnnnnnnnnnnnnnnnnnnnnnnnnnnnnnnnnnnnnnnnnnnnnnnnnnnnnnnnnnnnnnnnnnnnnnnnnnnnnnnnnnnnnnnnnnnnnnnnnnnnnnnnnnnnnnnnnnnnnnnnnnnnnnnnnnnnnnnnnnnnnnnnnnnnnnnnnnnnnnnnnnnnnnnnnnnnnnnnnnnnnnnnnnnnnnnnnnnnnnnnnnnnnnnnnnnnnnnnnnnnnnnnnnnnnnnnnnnnnnnnnnnnnnnnnnnnnnnnnnnnnnnnnnnnnnnnnnnnnnnnnnnnnnnnnnnnnnnnnnnnnnnnnnnnnnnnnnnnnnnnnnnnnnnnnnnnnnnnnnnnnnnnnnnnnnnnnnnnnnnnnnnnnnnnnnnnnnnnnnnnnnnnnnnnnnnnnnnnnnnnnnnnnnnnnnnnnnnnnnnnnnnnnnnnnnnnnnnnnnnnnnnnnnnnnnnnnnnnnnnnnnnnnnnnnnnnnnnnnnnnnnnnnnnnnnnnnnnnnnnnnnnnnnnnnnnnnnnnnnnnnnnnnnnnnnnnnnnnnnnnnnnnnnnnnnnnnnnnnnnnnnnnnnnnnnnnnnnnnnnnnnnnnnnnnnnnnnnnnnnnnnnnnnnnnnnnnnnnnnnnnnnnnnnnnnnnnnnnnnnnnnnnnnnnnnnnnnnnnnnnnnnnnnnnnnnnnnnnnnnnnnnnnnnnnnnnnnnnnnnnnnnnnnnnnnnnnnnnnnnnnnnnnnnnnnnnnnnnnnnnnnnnnnnnnnnnnnnnnnnnnnnnnnnnnnnnnnnnnnnnnnnnnnnnnnnnnnnnnnnnnnnnnnnnnnnnnnnnnnnnnnnnnnnnnnnnnnnnnnnnnnnnnnnnnnnnnnnnnnnnnnnnnnnnnnnnnnnnnnnnnnnnnnnnnnnnnnnnnnnnnnnnnnnnnnnnnnnnnnnnnnnnnnnnnnnnnnnnnnnnnnnnnnnnnnnnnnnnnnnnnnnnnnnnnnnnnnnnnnnnnnnnnnnnnnnnnnnnnnnnnnnnnnnnnnnnnnnnnnnnnnnnnnnnnnnnnnnnnnnnnnnnnnnnnnnnnnnnnnnnnnnnnnnnnnnnnnnnnnnnnnnnnnnnnnnnnnnnnnnnnnnnnnnnnnnnnnnnnnnnnnnnnnnnnnnnnnnnnnnnnnnnnnnnnnnnnnnnnnnnnnnnnnnnnnnnnnnnnnnnnnnnnnnnnnnnnnnnnnnnnnnnnnnnnnnnnnnnnnnnnnnnnnnnnnnnnnnnnnnnnnnnnnnnnnnnnnnnnnnnnnnnnnnnnnnnnnnnnnnnnnnnnnnnnnnnnnnnnnnnnnnnnnnnnnnnnnnnnnnnnnnnnnnnnnnnnnnnnnnnnnnnnnnnnnnnnnnnnnnnnnnnnnnnnnnnnnnnnnnnnnnnnnnnnnnnnnnnnnnnnnnnnnnnnnnnnnnnnnnnnnnnnnnnnnnnnnnnnnnnnnnnnnnnnnnnnnnnnnnnnnnnnnnnnnnnnnnnnnnnnnnnnnnnnnnnnnnnnnnnnnnnnnnnnnnnnnnnnnnnnnnnnnnnnnnnnnnnnnnnnnnnnnnnnnnnnnnnnnnnnnnnnnnnnnnnnnnnnnnnnnnnnnnnnnnnnnnnnnnnnnnnnnnnnnnnnnnnnnnnnnnnnnnnnnnnnnnnnnnnnnnnnnnnnnnnnnnnnnnnnnnnnnnnnnnnnnnnnnnnnnnnnnnnnnnnnnnnnnnnnnnnnnnnnnnnnnnnnnnnnnnnnnnnnnnnnnnnnnnnnnnnnnnnnnnnnnnnnnnnnnnnnnnnnnnnnnnnnnnnnnnnnnnnnnnnnnnnnnnnnnnnnnnnnnnnnnnnnnnnnnnnnnnnnnnnnnnnnnnnnnnnnnnnnnnnnnnnnnnnnnnnnnnnnnnnnnnnnnnnnnnnnnnnnnnnnnnnnnnnnnnnnnnnnnnnnnnnnnnnnnnnnnnnnnnnnnnnnnnnnnnnnnnnnnnnnnnnnnnnnnnnnnnnnnnnnnnnnnnnnnnnnnnnnnnnnnnnnnnnnnnnnnnnnnnnnnnnnnnnnnnnnnnnnnnnnnnnnnnnnnnnnnnnnnnnnnnnnnnnnnnnnnnnnnnnnnnnnnnnnnnnnnnnnnnnnnnnnnnnnnnnnnnnnnnnnnnnnnnnnnnnnnnnnnnnnnnnnnnnnnnnnnnnnnnnnnnnnnnnnnnnnnnnnnnnnnnnnnnnnnnnnnnnnnnnnnnnnnnnnnnnnnnnnnnnnnnnnnnnnnnnnnnnnnnnnnnnnnnnnnnnnnnnnnnnnnnnnnnnnnnnnnnnnnnnnnnnnnnnnnnnnnnnnnnnnnnnnnnnnnnnnnnnnnnnnnnnnnnnnnnnnnnnnnnnnnnnnnnnnnnnnnnnnnnnnnnnnnnnnnnnnnnnnnnnnnnnnnnnnnnnnnnnnnnnnnnnnnnnnnnnnnnnnnnnnnnnnnnnnnnnnnnnnnnnnnnnnnnnnnnnnnnnnnnnnnnnnnnnnnnnnnnnnnnnnnnnnnnnnnnnnnnnnnnnnnnnnnnnnnnnnnnnnnnnnnnnnnnnnnnnnnnnnnnnnnnnnnnnnnnnnnnnnnnnnnnnnnnnnnnnnnnnnnnnnnnnnnnnnnnnnnnnnnnnnnnnnnnnnnnnnnnnnnnnnnnnnnnnnnnnnnnnnnnnnnnnnnnnnnnnnnnnnnnnnnnnnnnnnnnnnnnnnnnnnnnnnnnnnnnnnnnnnnnnnnnnnnnnnnnnnnnnnnnnnnnnnnnnnnnnnnnnnnnnnnnnnnnnnnnnnnnnnnnnnnnnnnnnnnnnnnnnnnnnnnnnnnnnnnnnnnnnnnnnnnnnnnnnnnnnnnnnnnnnnnnnnnnnnnnnnnnnnnnnnnnnnnnnnnnnnnnnnnnnnnnnnnnnnnnnnnnnnnnnnnnnnnnnnnnnnnnnnnnnnnnnnnnnnnnnnnnnnnnnnnnnnnnnnnnnnnnnnnnnnnnnnnnnnnnnnnnnnnnnnnnnnnnnnnnnnnnnnnnnnnnnnnnnnnnnnnnnnnnnnnnnnnnnnnnnnnnnnnnnnnnnnnnnnnnnnnnnnnnnnnnnnnnnnnnnnnnnnnnnnnnnnnnnnnnnnnnnnnnnnnnnnnnnnnnnnnnnnnnnnnnnnnnnnnnnnnnnnnnnnnnnnnnnnnnnnnnnnnnnnnnnnnnnnnnnnnnnnnnnnnnnnnnnnnnnnnnnnnnnnnnnnnnnnnnnnnnnnnnnnnnnnnnnnnnnnnnnnnnnnnnnnnnnnnnnnnnnnnnnnnnnnnnnnnnnnnnnnnnnnnnnnnnnnnnnnnnnnnnnnnnnnnnnnnnnnnnnnnnnnnnnnnnnnnnnnnnnnnnnnnnnnnnnnnnnnnnnnnnnnnnnnnnnnnnnnnnnnnnnnnnnnnnnnnnnnnnnnnnnnnnnnnnnnnnnnnnnnnnnnnnnnnnnnnnnnnnnnnnnnnnnnnnnnnnnnnnnnnnnnnnnnnnnnnnnnnnnnnnnnnnnnnnnnnnnnnnnnnnnnnnnnnnnnnnnnnnnnnnnnnnnnnnnnnnnnnnnnnnnnnnnnnnnnnnnnnnnnnnnnnnnnnnnnnnnnnnnnnnnnnnnnnnnnnnnnnnnnnnnnnnnnnnnnnnnnnnnnnnnnnnnnnnnnnnnnnnnnnnnnnnnnnnnnnnnnnnnnnnnnnnnnnnnnnnnnnnnnnnnnnnnnnnnnnnnnnnnnnnnnnnnnnnnnnnnnnnnnnnnnnnnnnnnnnnnnnnnnnnnnnnnnnnnnnnnnnnnnnnnnnnnnnnnnnnnnnnnnnnnnnnnnnnnnnnnnnnnnnnnnnnnnnnnnnnnnnnnnnnnnnnnnnnnnnnnnnnnnnnnnnnnnnnnnnnnnnnnnnnnnnnnnnnnnnnnnnnnnnnnnnnnnnnnnnnnnnnnnnnnnnnnnnnnnnnnnnnnnnnnnnnnnnnnnnnnnnnnnnnnnnnnnnnnnnnnnnnnnnnnnnnnnnnnnnnnnnnnnnnnnnnnnnnnnnnnnnnnnnnnnnnnnnnnnnnnnnnnnnnnnnnnnnnnnnnnnnnnnnnnnnnnnnnnnnnnnnnnnnnnnnnnnnnnnnnnnnnnnnnnnnnnnnnnnnnnnnnnnnnnnnnnnnnnnnnnnnnnnnnnnnnnnnnnnnnnnnnnnnnnnnnnnnnnnnnnnnnnnnnnnnnnnnnnnnnnnnnnnnnnnnnnnnnnnnnnnnnnnnnnnnnnnnnnnnnnnnnnnnnnnnnnnnnnnnnnnnnnnnnnnnnnnnnnnnnnnnnnnnnnnnnnnnnnnnnnnnnnnnnnnnnnnnnnnnnnnnnnnnnnnnnnnnnnnnnnnnnnnnnnnnnnnnnnnnnnnnnnnnnnnnnnnnnnnnnnnnnnnnnnnnnnnnnnnnnnnnnnnnnnnnnnnnnnnnnnnnnnnnnnnnnnnnnnnnnnnnnnnnnnnnnnnnnnnnnnnnnnnnnnnnnnnnnnnnnnnnnnnnnnnnnnnnnnnnnnnnnnnnnnnnnnnnnnnnnnnnnnnnnnnnnnnnnnnnnnnnnnnnnnnnnnnnnnnnnnnnnnnnnnnnnnnnnnnnnnnnnnnnnnnnnnnnnnnnnnnnnnnnnnnnnnnnnnnnnnnnnnnnnnnnnnnnnnnnnnnnnnnnnnnnnnnnnnnnnnnnnnnnnnnnnnnnnnnnnnnnnnnnnnnnnnnnnnnnnnnnnnnnnnnnnnnnnnnnnnnnnnnnnnnnnnnnnnnnnnnnnnnnnnnnnnnnnnnnnnnnnnnnnnnnnnnnnnnnnnnnnnnnnnnnnnnnnnnnnnnnnnnnnnnnnnnnnnnnnnnnnnnnnnnnnnnnnnnnnnnnnnnnnnnnnnnnnnnnnnnnnnnnnnnnnnnnnnnnnnnnnnnnnnnnnnnnnnnnnnnnnnnnnnnnnnnnnnnnnnnnnnnnnnnnnnnnnnnnnnnnnnnnnnnnnnnnnnnnnnnnnnnnnnnnnnnnnnnnnnnnnnnnnnnnnnnnnnnnnnnnnnnnnnnnnnnnnnnnnnnnnnnnnnnnnnnnnnnnnnnnnnnnnnnnnnnnnnnnnnnnnnnnnnnnnnnnnnnnnnnnnnnnnnnnnnnnnnnnnnnnnnnnnnnnnnnnnnnnnnnnnnnnnnnnnnnnnnnnnnnnnnnnnnnnnnnnnnnnnnnnnnnnnnnnnnnnnnnnnnnnnnnnnnnnnnnnnnnnnnnnnnnnnnnnnnnnnnnnnnnnnnnnnnnnnnnnnnnnnnnnnnnnnnnnnnnnnnnnnnnnnnnnnnnnnnnnnnnnnnnnnnnnnnnnnnnnnnnnnnnnnnnnnnnnnnnnnnnnnnnnnnnnnnnnnnnnnnnnnnnnnnnnnnnnnnnnnnnnnnnnnnnnnnnnnnnnnnnnnnnnnnnnnnnnnnnnnnnnnnnnnnnnnnnnnnnnnnnnnnnnnnnnnnnnnnnnnnnnnnnnnnnnnnnnnnnnnnnnnnnnnnnnnnnnnnnnnnnnnnnnnnnnnnnnnnnnnnnnnnnnnnnnnnnnnnnnnnnnnnnnnnnnnnnnnnnnnnnnnnnnnnnnnnnnnnnnnnnnnnnnnnnnnnnnnnnnnnnnnnnnnnnnnnnnnnnnnnnnnnnnnnnnnnnnnnnnnnnnnnnnnnnnnnnnnnnnnnnnnnnnnnnnnnnnnnnnnnnnnnnnnnnnnnnnnnnnnnnnnnnnnnnnnnnnnnnnnnnnnnnnnnnnnnnnnnnnnnnnnnnnnnnnnnnnnnnnnnnnnnnnnnnnnnnnnnnnnnnnnnnnnnnnnnnnnnnnnnnnnnnnnnnnnnnnnnnnnnnnnnnnnnnnnnnnnnnnnnnnnnnnnnnnnnnnnnnnnnnnnnnnnnnnnnnnnnnnnnnnnnnnnnnnnnnnnnnnnnnnnnnnnnnnnnnnnnnnnnnnnnnnnnnnnnnnnnnnnnnnnnnnnnnnnnnnnnnnnnnnnnnnnnnnnnnnnnnnnnnnnnnnnnnnnnnnnnnnnnnnnnnnnnnnnnnnnnnnnnnnnnnnnnnnnnnnnnnnnnnnnnnnnnnnnnnnnnnnnnnnnnnnnnnnnnnnnnnnnnnnnnnnnnnnnnnnnnnnnnnnnnnnnnnnnnnnnnnnnnnnnnnnnnnnnnnnnnnnnnnnnnnnnnnnnnnnnnnnnnnnnnnnnnnnnnnnnnnnnnnnnnnnnnnnnnnnnnnnnnnnnnnnnnnnnnnnnnnnnnnnnnnnnnnnnnnnnnnnnnnnnnnnnnnnnnnnnnnnnnnnnnnnnnnnnnnnnnnnnnnnnnnnnnnnnnnnnnnnnnnnnnnnnnnnnnnnnnnnnnnnnnnnnnnnnnnnnnnnnnnnnnnnnnnnnnnnnnnnnnnnnnnnnnnnnnnnnnnnnnnnnnnnnnnnnnnnnnnnnnnnnnnnnnnnnnnnnnnnnnnnnnnnnnnnnnnnnnnnnnnnnnnnnnnnnnnnnnnnnnnnnnnnnnnnnnnnnnnnnnnnnnnnnnnnnnnnnnnnnnnnnnnnnnnnnnnnnnnnnnnnnnnnnnnnnnnnnnnnnnnnnnnnnnnnnnnnnnnnnnnnnnnnnnnnnnnnnnnnnnnnnnnnnnnnnnnnnnnnnnnnnnnnnnnnnnnnnnnnnnnnnnnnnnnnnnnnnnnnnnnnnnnnnnnnnnnnnnnnnnnnnnnnnnnnnnnnnnnnnnnnnnnnnnnnnnnnnnnnnnnnnnnnnnnnnnnnnnnnnnnnnnnnnnnnnnnnnnnnnnnnnnnnnnnnnnnnnnnnnnnnnnnnnnnnnnnnnnnnnnnnnnnnnnnnnnnnnnnnnnnnnnnnnnnnnnnnnnnnnnnnnnnnnnnnnnnnnnnnnnnnnnnnnnnnnnnnnnnnnnnnnnnnnnnnnnnnnnnnnnnnnnnnnnnnnnnnnnnnnnnnnnnnnnnnnnnnnnnnnnnnnnnnnnnnnnnnnnnnnnnnnnnnnnnnnnnnnnnnnnnnnnnnnnnnnnnnnnnnnnnnnnnnnnnnnnnnnnnnnnnnnnnnnnnnnnnnnnnnnnnnnnnnnnnnnnnnnnnnnnnnnnnnnnnnnnnnnnnnnnnnnnnnnnnnnnnnnnnnnnnnnnnnnnnnnnnnnnnnnnnnnnnnnnnnnnnnnnnnnnnnnnnnnnnnnnnnnnnnnnnnnnnnnnnnnnnnnnnnnnnnnnnnnnnnnnnnnnnnnnnnnnnnnnnnnnnnnnnnnnnnnnnnnnnnnnnnnnnnnnnnnnnnnnnnnnnnnnnnnnnnnnnnnnnnnnnnnnnnnnnnnnnnnnnnnnnnnnnnnnnnnnnnnnnnnnnnnnnnnnnnnnnnnnnnnnnnnnnnnnnnnnnnnnnnnnnnnnnnnnnnnnnnnnnnnnnnnnnnnnnnnnnnnnnnnnnnnnnnnnnnnnnnnnnnnnnnnnnnnnnnnnnnnnnnnnnnnnnnnnnnnnnnnnnnnnnnnnnnnnnnnnnnnnnnnnnnnnnnnnnnnnnnnnnnnnnnnnnnnnnnnnnnnnnnnnnnnnnnnnnnnnnnnnnnnnnnnnnnnnnnnnnnnnnnnnnnnnnnnnnnnnnnnnnnnnnnnnnnnnnnnnnnnnnnnnnnnnnnnnnnnnnnnnnnnnnnnnnnnnnnnnnnnnnnnnnnnnnnnnnnnnnnnnnnnnnnnnnnnnnnnnnnnnnnnnnnnnnnnnnnnnnnnnnnnnnnnnnnnnnnnnnnnnnnnnnnnnnnnnnnnnnnnnnnnnnnnnnnnnnnnnnnnnnnnnnnnnnnnnnnnnnnnnnnnnnnnnnnnnnnnnnnnnnnnnnnnnnnnnnnnnnnnnnnnnnnnnnnnnnnnnnnnnnnnnnnnnnnnnnnnnnnnnnnnnnnnnnnnnnnnnnnnnnnnnnnnnnnnnnnnnnnnnnnnnnnnnnnnnnnnnnnnnnnnnnnnnnnnnnnnnnnnnnnnnnnnnnnnnnnnnnnnnnnnnnnnnnnnnnnnnnnnnnnnnnnnnnnnnnnnnnnnnnnnnnnnnnnnnnnnnnnnnnnnnnnnnnnnnnnnnnnnnnnnnnnnnnnnnnnnnnnnnnnnnnnnnnnnnnnnnnnnnnnnnnnnnnnnnnnnnnnnnnnnnnnnnnnnnnnnnnnnnnnnnnnnnnnnnnnnnnnnnnnnnnnnnnnnnnnnnnnnnnnnnnnnnnnnnnnnnnnnnnnnnnnnnnnnnnnnnnnnnnnnnnnnnnnnnnnnnnnnnnnnnnnnnnnnnnnnnnnnnnnnnnnnnnnnnnnnnnnnnnnnnnnnnnnnnnnnnnnnnnnnnnnnnnnnnnnnnnnnnnnnnnnnnnnnnnnnnnnnnnnnnnnnnnnnnnnnnnnnnnnnnnnnnnnnnnnnnnnnnnnnnnnnnnnnnnnnnnnnnnnnnnnnnnnnnnnnnnnnnnnnnnnnnnnnnnnnnnnnnnnnnnnnnnnnnnnnnnnnnnnnnnnnnnnnnnnnnnnnnnnnnnnnnnnnnnnnnnnnnnnnnnnnnnnnnnnnnnnnnnnnnnnnnnnnnnnnnnnnnnnnnnnnnnnnnnnnnnnnnnnnnnnnnnnnnnnnnnnnnnnnnnnnnnnnnnnnnnnnnnnnnnnnnnnnnnnnnnnnnnnnnnnnnnnnnnnnnnnnnnnnnnnnnnnnnnnnnnnnnnnnnnnnnnnnnnnnnnnnnnnnnnnnnnnnnnnnnnnnnnnnnnnnnnnnnnnnnnnnnnnnnnnnnnnnnnnnnnnnnnnnnnnnnnnnnnnnnnnnnnnnnnnnnnnnnnnnnnnnnnnnnnnnnnnnnnnnnnnnnnnnnnnnnnnnnnnnnnnnnnnnnnnnnnnnnnnnnnnnnnnnnnnnnnnnnnnnnnnnnnnnnnnnnnnnnnnnnnnnnnnnnnnnnnnnnnnnnnnnnnnnnnnnnnnnnnnnnnnnnnnnnnnnnnnnnnnnnnnnnnnnnnnnnnnnnnnnnnnnnnnnnnnnnnnnnnnnnnnnnnnnnnnnnnnnnnnnnnnnnnnnnnnnnnnnnnnnnnnnnnnnnnnnnnnnnnnnnnnnnnnnnnnnnnnnnnnnnnnnnnnnnnnnnnnnnnnnnnnnnnnnnnnnnnnnnnnnnnnnnnnnnnnnnnnnnnnnnnnnnnnnnnnnnnnnnnnnnnnnnnnnnnnnnnnnnnnnnnnnnnnnnnnnnnnnnnnnnnnnnnnnnnnnnnnnnnnnnnnnnnnnnnnnnnnnnnnnnnnnnnnnnnnnnnnnnnnnnnnnnnnnnnnnnnnnnnnnnnnnnnnnnnnnnnnnnnnnnnnnnnnnnnnnnnnnnnnnnnnnnnnnnnnnnnnnnnnnnnnnnnnnnnnnnnnnnnnnnnnnnnnnnnnnnnnnnnnnnnnnnnnnnnnnnnnnnnnnnnnnnnnnnnnnnnnnnnnnnnnnnnnnnnnnnnnnnnnnnnnnnnnnnnnnnnnnnnnnnnnnnnnnnnnnnnnnnnnnnnnnnnnnnnnnnnnnnnnnnnnnnnnnnnnnnnnnnnnnnnnnnnnnnnnnnnnnnnnnnnnnnnnnnnnnnnnnnnnnnnnnnnnnnnnnnnnnnnnnnnnnnnnnnnnnnnnnnnnnnnnnnnnnnnnnnnnnnnnnnnnnnnnnnnnnnnnnnnnnnnnnnnnnnnnnnnnnnnnnnnnnnnnnnnnnnnnnnnnnnnnnnnnnnnnnnnnnnnnnnnnnnnnnnnnnnnnnnnnnnnnnnnnnnnnnnnnnnnnnnnnnnnnnnnnnnnnnnnnnnnnnnnnnnnnnnnnnnnnnnnnnnnnnnnnnnnnnnnnnnnnnnnnnnnnnnnnnnnnnnnnnnnnnnnnnnnnnnnnnnnnnnnnnnnnnnnnnnnnnnnnnnnnnnnnnnnnnnnnnnnnnnnnnnnnnnnnnnnnnnnnnnnnnnnnnnnnnnnnnnnnnnnnnnnnnnnnnnnnnnnnnnnnnnnnnnnnnnnnnnnnnnnnnnnnnnnnnnnnnnnnnnnnnnnnnnnnnnnnnnnnnnnnnnnnnnnnnnnnnnnnnnnnnnnnnnnnnnnnnnnnnnnnnnnnnnnnnnnnnnnnnnnnnnnnnnnnnnnnnnnnnnnnnnnnnnnnnnnnnnnnnnnnnnnnnnnnnnnnnnnnnnnnnnnnnnnnnnnnnnnnnnnnnnnnnnnnnnnnnnnnnnnnnnnnnnnnnnnnnnnnnnnnnnnnnnnnnnnnnnnnnnnnnnnnnnnnnnnnnnnnnnnnnnnnnnnnnnnnnnnnnnnnnnnnnnnnnnnnnnnnnnnnnnnnnnnnnnnnnnnnnnnnnnnnnnnnnnnnnnnnnnnnnnnnnnnnnnnnnnnnnnnnnnnnnnnnnnnnnnnnnnnnnnnnnnnnnnnnnnnnnnnnnnnnnnnnnnnnnnnnnnnnnnnnnnnnnnnnnnnnnnnnnnnnnnnnnnnnnnnnnnnnnnnnnnnnnnnnnnnnnnnnnnnnnnnnnnnnnnnnnnnnnnnnnnnnnnnnnnnnnnnnnnnnnnnnnnnnnnnnnnnnnnnnnnnnnnnnnnnnnnnnnnnnnnnnnnnnnnnnnnnnnnnnnnnnnnnnnnnnnnnnnnnnnnnnnnnnnnnnnnnnnnnnnnnnnnnnnnnnnnnnnnnnnnnnnnnnnnnnnnnnnnnnnnnnnnnnnnnnnnnnnnnnnnnnnnnnnnnnnnnnnnnnnnnnnnnnnnnnnnnnnnnnnnnnnnnnnnnnnnnnnnnnnnnnnnnnnnnnnnnnnnnnnnnnnnnnnnnnnnnnnnnnnnnnnnnnnnnnnnnnnnnnnnnnnnnnnnnnnnnnnnnnnnnnnnnnnnnnnnnnnnnnnnnnnnnnnnnnnnnnnnnnnnnnnnnnnnnnnnnnnnnnnnnnnnnnnnnnnnnnnnnnnnnnnnnnnnnnnnnnnnnnnnnnnnnnnnnnnnnnnnnnnnnnnnnnnnnnnnnnnnnnnnnnnnnnnnnnnnnnnnnnnnnnnnnnnnnnnnnnnnnnnnnnnnnnnnnnnnnnnnnnnnnnnnnnnnnnnnnnnnnnnnnnnnnnnnnnnnnnnnnnnnnnnnnnnnnnnnnnnnnnnnnnnnnnnnnnnnnnnnnnnnnnnnnnnnnnnnnnnnnnnnnnnnnnnnnnnnnnnnnnnnnnnnnnnnnnnnnnnnnnnnnnnnnnnnnnnnnnnnnnnnnnnnnnnnnnnnnnnnnnnnnnnnnnnnnnnnnnnnnnnnnnnnnnnnnnnnnnnnnnnnnnnnnnnnnnnnnnnnnnnnnnnnnnnnnnnnnnnnnnnnnnnnnnnnnnnnnnnnnnnnnnnnnnnnnnnnnnnnnnnnnnnnnnnnnnnnnnnnnnnnnnnnnnnnnnnnnnnnnnnnnnnnnnnnnnnnnnnnnnnnnnnnnnnnnnnnnnnnnnnnnnnnnnnnnnnnnnnnnnnnnnnnnnnnnnnnnnnnnnnnnnnnnnnnnnnnnnnnnnnnnnnnnnnnnnnnnnnnnnnnnnnnnnnnnnnnnnnnnnnnnnnnnnnnnnnnnnnnnnnnnnnnnnnnnnnnnnnnnnnnnnnnnnnnnnnnnnnnnnnnnnnnnnnnnnnnnnnnnnnnnnnnnnnnnnnnnnnnnnnnnnnnnnnnnnnnnnnnnnnnnnnnnnnnnnnnnnnnnnnnnnnnnnnnnnnnnnnnnnnnnnnnnnnnnnnnnnnnnnnnnnnnnnnnnnnnnnnnnnnnnnnnnnnnnnnnnnnnnnnnnnnnnnnnnnnnnnnnnnnnnnnnnnnnnnnnnnnnnnnnnnnnnnnnnnnnnnnnnnnnnnnnnnnnnnnnnnnnnnnnnnnnnnnnnnnnnnnnnnnnnnnnnnnnnnnnnnnnnnnnnnnnnnnnnnnnnnnnnnnnnnnnnnnnnnnnnnnnnnnnnnnnnnnnnnnnnnnnnnnnnnnnnnnnnnnnnnnnnnnnnnnnnnnnnnnnnnnnnnnnnnnnnnnnnnnnnnnnnnnnnnnnnnnnnnnnnnnnnnnnnnnnnnnnnnnnnnnnnnnnnnnnnnnnnnnnnnnnnnnnnnnnnnnnnnnnnnnnnnnnnnnnnnnnnnnnnnnnnnnnnnnnnnnnnnnnnnnnnnnnnnnnnnnnnnnnnnnnnnnnnnnnnnnnnnnnnnnnnnnnnnnnnnnnnnnnnnnnnnnnnnnnnnnnnnnnnnnnnnnnnnnnnnnnnnnnnnnnnnnnnnnnnnnnnnnnnnnnnnnnnnnnnnnnnnnnnnnnnnnnnnnnnnnnnnnnnnnnnnnnnnnnnnnnnnnnnnnnnnnnnnnnnnnnnnnnnnnnnnnnnnnnnnnnnnnnnnnnnnnnnnnnnnnnnnnnnnnnnnnnnnnnnnnnnnnnnnnnnnnnnnnnnnnnnnnnnnnnnnnnnnnnnnnnnnnnnnnnnnnnnnnnnnnnnnnnnnnnnnnnnnnnnnnnnnnnnnnnnnnnnnnnnnnnnnnnnnnnnnnnnnnnnnnnnnnnnnnnnnnnnnnnnnnnnnnnnnnnnnnnnnnnnnnnnnnnnnnnnnnnnnnnnnnnnnnnnnnnnnnnnnnnnnnnnnnnnnnnnnnnnnnnnnnnnnnnnnnnnnnnnnnnnnnnnnnnnnnnnnnnnnnnnnnnnnnnnnnnnnnnnnnnnnnnnnnnnnnnnnnnnnnnnnnnnnnnnnnnnnnnnnnnnnnnnnnnnnnnnnnnnnnnnnnnnnnnnnnnnnnnnnnnnnnnnnnnnnnnnnnnnnnnnnnnnnnnnnnnnnnnnnnnnnnnnnnnnnnnnnnnnnnnnnnnnnnnnnnnnnnnnnnnnnnnnnnnnnnnnnnnnnnnnnnnnnnnnnnnnnnnnnnnnnnnnnnnnnnnnnnnnnnnnnnnnnnnnnnnnnnnnnnnnnnnnnnnnnnnnnnnnnnnnnnnnnnnnnnnnnnnnnnnnnnnnnnnnnnnnnnnnnnnnnnnnnnnnnnnnnnnnnnnnnnnnnnnnnnnnnnnnnnnnnnnnnnnnnnnnnnnnnnnnnnnnnnnnnnnnnnnnnnnnnnnnnnnnnnnnnnnnnnnnnnnnnnnnnnnnnnnnnnnnnnnnnnnnnnnnnnnnnnnnnnnnnnnnnnnnnnnnnnnnnnnnnnnnnnnnnnnnnnnnnnnnnnnnnnnnnnnnnnnnnnnnnnnnnnnnnnnnnnnnnnnnnnnnnnnnnnnnnnnnnnnnnnnnnnnnnnnnnnnnnnnnnnnnnnnnnnnnnnnnnnnnnnnnnnnnnnnnnnnnnnnnnnnnnnnnnnnnnnnnnnnnnnnnnnnnnnnnnnnnnnnnnnnnnnnnnnnnnnnnnnnnnnnnnnnnnnnnnnnnnnnnnnnnnnnnnnnnnnnnnnnnnnnnnnnnnnnnnnnnnnnnnnnnnnnnnnnnnnnnnnnnnnnnnnnnnnnnnnnnnnnnnnnnnnnnnnnnnnnnnnnnnnnnnnnnnnnnnnnnnnnnnnnnnnnnnnnnnnnnnnnnnnnnnnnnnnnnnnnnnnnnnnnnnnnnnnnnnnnnnnnnnnnnnnnnnnnnnnnnnnnnnnnnnnnnnnnnnnnnnnnnnnnnnnnnnnnnnnnnnnnnnnnnnnnnnnnnnnnnnnnnnnnnnnnnnnnnnnnnnnnnnnnnnnnnnnnnnnnnnnnnnnnnnnnnnnnnnnnnnnnnnnnnnnnnnnnnnnnnnnnnnnnnnnnnnnnnnnnnnnnnnnnnnnnnnnnnnnnnnnnnnnnnnnnnnnnnnnnnnnnnnnnnnnnnnnnnnnnnnnnnnnnnnnnnnnnnnnnnnnnnnnnnnnnnnnnnnnnnnnnnnnnnnnnnnnnnnnnnnnnnnnnnnnnnnnnnnnnnnnnnnnnnnnnnnnnnnnnnnnnnnnnnnnnnnnnnnnnnnnnnnnnnnnnnnnnnnnnnnnnnnnnnnnnnnnnnnnnnnnnnnnnnnnnnnnnnnnnnnnnnnnnnnnnnnnnnnnnnnnnnnnnnnnnnnnnnnnnnnnnnnnnnnnnnnnnnnnnnnnnnnnnnnnnnnnnnnnnnnnnnnnnnnnnnnnnnnnnnnnnnnnnnnnnnnnnnnnnnnnnnnnnnnnnnnnnnnnnnnnnnnnnnnnnnnnnnnnnnnnnnnnnnnnnnnnnnnnnnnnnnnnnnnnnnnnnnnnnnnnnnnnnnnnnnnnnnnnnnnnnnnnnnnnnnnnnnnnnnnnnnnnnnnnnnnnnnnnnnnnnnnnnnnnnnnnnnnnnnnnnnnnnnnnnnnnnnnnnnnnnnnnnnnnnnnnnnnnnnnnnnnnnnnnnnnnnnnnnnnnnnnnnnnnnnnnnnnnnnnnnnnnnnnnnnnnnnnnnnnnnnnnnnnnnnnnnnnnnnnnnnnnnnnnnnnnnnnnnnnnnnnnnnnnnnnnnnnnnnnnnnnnnnnnnnnnnnnnnnnnnnnnnnnnnnnnnnnnnnnnnnnnnnnnnnnnnnnnnnnnnnnnnnnnnnnnnnnnnnnnnnnnnnnnnnnnnnnnnnnnnnnnnnnnnnnnnnnnnnnnnnnnnnnnnnnnnnnnnnnnnnnnnnnnnnnnnnnnnnnnnnnnnnnnnnnnnnnnnnnnnnnnnnnnnnnnnnnnnnnnnnnnnnnnnnnnnnnnnnnnnnnnnnnnnnnnnnnnnnnnnnnnnnnnnnnnnnnnnnnnnnnnnnnnnnnnnnnnnnnnnnnnnnnnnnnnnnnnnnnnnnnnnnnnnnnnnnnnnnnnnnnnnnnnnnnnnnnnnnnnnnnnnnnnnnnnnnnnnnnnnnnnnnnnnnnnnnnnnnnnnnnnnnnnnnnnnnnnnnnnnnnnnnnnnnnnnnnnnnnnnnnnnnnnnnnnnnnnnnnnnnnnnnnnnnnnnnnnnnnnnnnnnnnnnnnnnnnnnnnnnnnnnnnnnnnnnnnnnnnnnnnnnnnnnnnnnnnnnnnnnnnnnnnnnnnnnnnnnnnnnnnnnnnnnnnnnnnnnnnnnnnnnnnnnnnnnnnnnnnnnnnnnnnnnnnnnnnnnnnnnnnnnnnnnnnnnnnnnnnnnnnnnnnnnnnnnnnnnnnnnnnnnnnnnnnnnnnnnnnnnnnnnnnnnnnnnnnnnnnnnnnnnnnnnnnnnnnnnnnnnnnnnnnnnnnnnnnnnnnnnnnnnnnnnnnnnnnnnnnnnnnnnnnnnnnnnnnnnnnnnnnnnnnnnnnnnnnnnnnnnnnnnnnnnnnnnnnnnnnnnnnnnnnnnnnnnnnnnnnnnnnnnnnnnnnnnnnnnnnnnnnnnnnnnnnnnnnnnnnnnnnnnnnnnnnnnnnnnnnnnnnnnnnnnnnnnnnnnnnnnnnnnnnnnnnnnnnnnnnnnnnnnnnnnnnnnnnnnnnnnnnnnnnnnnnnnnnnnnnnnnnnnnnnnnnnnnnnnnnnnnnnnnnnnnnnnnnnnnnnnnnnnnnnnnnnnnnnnnnnnnnnnnnnnnnnnnnnnnnnnnnnnnnnnnnnnnnnnnnnnnnnnnnnnnnnnnnnnnnnnnnnnnnnnnnnnnnnnnnnnnnnnnnnnnnnnnnnnnnnnnnnnnnnnnnnnnnnnnnnnnnnnnnnnnnnnnnnnnnnnnnnnnnnnnnnnnnnnnnnnnnnnnnnnnnnnnnnnnnnnnnnnnnnnnnnnnnnnnnnnnnnnnnnnnnnnnnnnnnnnnnnnnnnnnnnnnnnnnnnnnnnnnnnnnnnnnnnnnnnnnnnnnnnnnnnnnnnnnnnnnnnnnnnnnnnnnnnnnnnnnnnnnnnnnnnnnnnnnnnnnnnnnnnnnnnnnnnnnnnnnnnnnnnnnnnnnnnnnnnnnnnnnnnnnnnnnnnnnnnnnnnnnnnnnnnnnnnnnnnnnnnnnnnnnnnnnnnnnnnnnnnnnnnnnnnnnnnnnnnnnnnnnnnnnnnnnnnnnnnnnnnnnnnnnnnnnnnnnnnnnnnnnnnnnnnnnnnnnnnnnnnnnnnnnnnnnnnnnnnnnnnnnnnnnnnnnnnnnnnnnnnnnnnnnnnnnnnnnnnnnnnnnnnnnnnnnnnnnnnnnnnnnnnnnnnnnnnnnnnnnnnnnnnnnnnnnnnnnnnnnnnnnnnnnnnnnnnnnnnnnnnnnnnnnnnnnnnnnnnnnnnnnnnnnnnnnnnnnnnnnnnnnnnnnnnnnnnnnnnnnnnnnnnnnnnnnnnnnnnnnnnnnnnnnnnnnnnnnnnnnnnnnnnnnnnnnnnnnnnnnnnnnnnnnnnnnnnnnnnnnnnnnnnnnnnnnnnnnnnnnnnnnnnnnnnnnnnnnnnnnnnnnnnnnnnnnnnnnnnnnnnnnnnnnnnnnnnnnnnnnnnnnnnnnnnnnnnnnnnnnnnnnnnnnnnnnnnnnnnnnnnnnnnnnnnnnnnnnnnnnnnnnnnnnnnnnnnnnnnnnnnnnnnnnnnnnnnnnnnnnnnnnnnnnnnnnnnnnnnnnnnnnnnnnnnnnnnnnnnnnnnnnnnnnnnnnnnnnnnnnnnnnnnnnnnnnnnnnnnnnnnnnnnnnnnnnnnnnnnnnnnnnnnnnnnnnnnnnnnnnnnnnnnnnnnnnnnnnnnnnnnnnnnnnnnnnnnnnnnnnnnnnnnnnnnnnnnnnnnnnnnnnnnnnnnnnnnnnnnnnnnnnnnnnnnnnnnnnnnnnnnnnnnnnnnnnnnnnnnnnnnnnnnnnnnnnnnnnnnnnnnnnnnnnnnnnnnnnnnnnnnnnnnnnnnnnnnnnnnnnnnnnnnnnnnnnnnnnnnnnnnnnnnnnnnnnnnnnnnnnnnnnnnnnnnnnnnnnnnnnnnnnnnnnnnnnnnnnnnnnnnnnnnnnnnnnnnnnnnnnnnnnnnnnnnnnnnnnnnnnnnnnnnnnnnnnnnnnnnnnnnnnnnnnnnnnnnnnnnnnnnnnnnnnnnnnnnnnnnnnnnnnnnnnnnnnnnnnnnnnnnnnnnnnnnnnnnnnnnnnnnnnnnnnnnnnnnnnnnnnnnnnnnnnnnnnnnnnnnnnnnnnnnnnnnnnnnnnnnnnnnnnnnnnnnnnnnnnnnnnnnnnnnnnnnnnnnnnnnnnnnnnnnnnnnnnnnnnnnnnnnnnnnnnnnnnnnnnnnnnnnnnnnnnnnnnnnnnnnnnnnnnnnnnnnnnnnnnnnnnnnnnnnnnnnnnnnnnnnnnnnnnnnnnnnnnnnnnnnnnnnnnnnnnnnnnnnnnnnnnnnnnnnnnnnnnnnnnnnnnnnnnnnnnnnnnnnnnnnnnnnnnnnnnnnnnnnnnnnnnnnnnnnnnnnnnnnnnnnnnnnnnnnnnnnnnnnnnnnnnnnnnnnnnnnnnnnnnnnnnnnnnnnnnnnnnnnnnnnnnnnnnnnnnnnnnnnnnnnnnnnnnnnnnnnnnnnnnnnnnnnnnnnnnnnnnnnnnnnnnnnnnnnnnnnnnnnnnnnnnnnnnnnnnnnnnnnnnnnnnnnnnnnnnnnnnnnnnnnnnnnnnnnnnnnnnnnnnnnnnnnnnnnnnnnnnnnnnnnnnnnnnnnnnnnnnnnnnnnnnnnnnnnnnnnnnnnnnnnnnnnnnnnnnnnnnnnnnnnnnnnnnnnnnnnnnnnnnnnnnnnnnnnnnnnnnnnnnnnnnnnnnnnnnnnnnnnnnnnnnnnnnnnnnnnnnnnnnnnnnnnnnnnnnnnnnnnnnnnnnnnnnnnnnnnnnnnnnnnnnnnnnnnnnnnnnnnnnnnnnnnnnnnnnnnnnnnnnnnnnnnnnnnnnnnnnnnnnnnnnnnnnnnnnnnnnnnnnnnnnnnnnnnnnnnnnnnnnnnnnnnnnnnnnnnnnnnnnnnnnnnnnnnnnnnnnnnnnnnnnnnnnnnnnnnnnnnnnnnnnnnnnnnnnnnnnnnnnnnnnnnnnnnnnnnnnnnnnnnnnnnnnnnnnnnnnnnnnnnnnnnnnnnnnnnnnnnnnnnnnnnnnnnnnnnnnnnnnnnnnnnnnnnnnnnnnnnnnnnnnnnnnnnnnnnnnnnnnnnnnnnnnnnnnnnnnnnnnnnnnnnnnnnnnnnnnnnnnnnnnnnnnnnnnnnnnnnnnnnnnnnnnnnnnnnnnnnnnnnnnnnnnnnnnnnnnnnnnnnnnnnnnnnnnnnnnnnnnnnnnnnnnnnnnnnnnnnnnnnnnnnnnnnnnnnnnnnnnnnnnnnnnnnnnnnnnnnnnnnnnnnnnnnnnnnnnnnnnnnnnnnnnnnnnnnnnnnnnnnnnnnnnnnnnnnnnnnnnnnnnnnnnnnnnnnnnnnnnnnnnnnnnnnnnnnnnnnnnnnnnnnnnnnnnnnnnnnnnnnnnnnnnnnnnnnnnnnnnnnnnnnnnnnnnnnnnnnnnnnnnnnnnnnnnnnnnnnnnnnnnnnnnnnnnnnnnnnnnnnnnnnnnnnnnnnnnnnnnnnnnnnnnnnnnnnnnnnnnnnnnnnnnnnnnnnnnnnnnnnnnnnnnnnnnnnnnnnnnnnnnnnnnnnnnnnnnnnnnnnnnnnnnnnnnnnnnnnnnnnnnnnnnnnnnnnnnnnnnnnnnnnnnnnnnnnnnnnnnnnnnnnnnnnnnnnnnnnnnnnnnnnnnnnnnnnnnnnnnnnnnnnnnnnnnnnnnnnnnnnnnnnnnnnnnnnnnnnnnnnnnnnnnnnnnnnnnnnnnnnnnnnnnnnnnnnnnnnnnnnnnnnnnnnnnnnnnnnnnnnnnnnnnnnnnnnnnnnnnnnnnnnnnnnnnnnnnnnnnnnnnnnnnnnnnnnnnnnnnnnnnnnnnnnnnnnnnnnnnnnnnnnnnnnnnnnnnnnnnnnnnnnnnnnnnnnnnnnnnnnnnnnnnnnnnnnnnnnnnnnnnnnnnnnnnnnnnnnnnnnnnnnnnnnnnnnnnnnnnnnnnnnnnnnnnnnnnnnnnnnnnnnnnnnnnnnnnnnnnnnnnnnnnnnnnnnnnnnnnnnnnnnnnnnnnnnnnnnnnnnnnnnnnnnnnnnnnnnnnnnnnnnnnnnnnnnnnnnnnnnnnnnnnnnnnnnnnnnnnnnnnnnnnnnnnnnnnnnnnnnnnnnnnnnnnnnnnnnnnnnnnnnnnnnnnnnnnnnnnnnnnnnnnnnnnnnnnnnnnnnnnnnnnnnnnnnnnnnnnnnnnnnnnnnnnnnnnnnnnnnnnnnnnnnnnnnnnnnnnnnnnnnnnnnnnnnnnnnnnnnnnnnnnnnnnnnnnnnnnnnnnnnnnnnnnnnnnnnnnnnnnnnnnnnnnnnnnnnnnnnnnnnnnnnnnnnnnnnnnnnnnnnnnnnnnnnnnnnnnnnnnnnnnnnnnnnnnnnnnnnnnnnnnnnnnnnnnnnnnnnnnnnnnnnnnnnnnnnnnnnnnnnnnnnnnnnnnnnnnnnnnnnnnnnnnnnnnnnnnnnnnnnnnnnnnnnnnnnnnnnnnnnnnnnnnnnnnnnnnnnnnnnnnnnnnnnnnnnnnnnnnnnnnnnnnnnnnnnnnnnnnnnnnnnnnnnnnnnnnnnnnnnnnnnnnnnnnnnnnnnnnnnnnnnnnnnnnnnnnnnnnnnnnnnnnnnnnnnnnnnnnnnnnnnnnnnnnnnnnnnnnnnnnnnnnnnnnnnnnnnnnnnnnnnnnnnnnnnnnnnnnnnnnnnnnnnnnnnnnnnnnnnnnnnnnnnnnnnnnnnnnnnnnnnnnnnnnnnnnnnnnnnnnnnnnnnnnnnnnnnnnnnnnnnnnnnnnnnnnnnnnnnnnnnnnnnnnnnnnnnnnnnnnnnnnnnnnnnnnnnnnnnnnnnnnnnnnnnnnnnnnnnnnnnnnnnnnnnnnnnnnnnnnnnnnnnnnnnnnnnnnnnnnnnnnnnnnnnnnnnnnnnnnnnnnnnnnnnnnnnnnnnnnnnnnnnnnnnnnnnnnnnnnnnnnnnnnnnnnnnnnnnnnnnnnnnnnnnnnnnnnnnnnnnnnnnnnnnnnnnnnnnnnnnnnnnnnnnnnnnnnnnnnnnnnnnnnnnnnnnnnnnnnnnnnnnnnnnnnnnnnnnnnnnnnnnnnnnnnnnnnnnnnnnnnnnnnnnnnnnnnnnnnnnnnnnnnnnnnnnnnnnnnnnnnnnnnnnnnnnnnnnnnnnnnnnnnnnnnnnnnnnnnnnnnnnnnnnnnnnnnnnnnnnnnnnnnnnnnnnnnnnnnnnnnnnnnnnnnnnnnnnnnnnnnnnnnnnnnnnnnnnnnnnnnnnnnnnnnnnnnnnnnnnnnnnnnnnnnnnnnnnnnnnnnnnnnnnnnnnnnnnnnnnnnnnnnnnnnnnnnnnnnnnnnnnnnnnnnnnnnnnnnnnnnnnnnnnnnnnnnnnnnnnnnnnnnnnnnnnnnnnnnnnnnnnnnnnnnnnnnnnnnnnnnnnnnnnnnnnnnnnnnnnnnnnnnnnnnnnnnnnnnnnnnnnnnnnnnnnnnnnnnnnnnnnnnnnnnnnnnnnnnnnnnnnnnnnnnnnnnnnnnnnnnnnnnnnnnnnnnnnnnnnnnnnnnnnnnnnnnnnnnnnnnnnnnnnnnnnnnnnnnnnnnnnnnnnnnnnnnnnnnnnnnnnnnnnnnnnnnnnnnnnnnnnnnnnnnnnnnnnnnnnnnnnnnnnnnnnnnnnnnnnnnnnnnnnnnnnnnnnnnnnnnnnnnnnnnnnnnnnnnnnnnnnnnnnnnnnnnnnnnnnnnnnnnnnnnnnnnnnnnnnnnnnnnnnnnnnnnnnnnnnnnnnnnnnnnnnnnnnnnnnnnnnnnnnnnnnnnnnnnnnnnnnnnnnnnnnnnnnnnnnnnnnnnnnnnnnnnnnnnnnnnnnnnnnnnnnnnnnnnnnnnnnnnnnnnnnnnnnnnnnnnnnnnnnnnnnnnnnnnnnnnnnnnnnnnnnnnnnnnnnnnnnnnnnnnnnnnnnnnnnnnnnnnnnnnnnnnnnnnnnnnnnnnnnnnnnnnnnnnnnnnnnnnnnnnnnnnnnnnnnnnnnnnnnnnnnnnnnnnnnnnnnnnnnnnnnnnnnnnnnnnnnnnnnnnnnnnnnnnnnnnnnnnnnnnnnnnnnnnnnnnnnnnnnnnnnnnnnnnnnnnnnnnnnnnnnnnnnnnnnnnnnnnnnnnnnnnnnnnnnnnnnnnnnnnnnnnnnnnnnnnnnnnnnnnnnnnnnnnnnnnnnnnnnnnnnnnnnnnnnnnnnnnnnnnnnnnnnnnnnnnnnnnnnnnnnnnnnnnnnnnnnnnnnnnnnnnnnnnnnnnnnnnnnnnnnnnnnnnnnnnnnnnnnnnnnnnnnnnnnnnnnnnnnnnnnnnnnnnnnnnnnnnnnnnnnnnnnnnnnnnnnnnnnnnnnnnnnnnnnnnnnnnnnnnnnnnnnnnnnnnnnnnnnnnnnnnnnnnnnnnnnnnnnnnnnnnnnnnnnnnnnnnnnnnnnnnnnnnnnnnnnnnnnnnnnnnnnnnnnnnnnnnnnnnnnnnnnnnnnnnnnnnnnnnnnnnnnnnnnnnnnnnnnnnnnnnnnnnnnnnnnnnnnnnnnnnnnnnnnnnnnnnnnnnnnnnnnnnnnnnnnnnnnnnnnnnnnnnnnnnnnnnnnnnnnnnnnnnnnnnnnnnnnnnnnnnnnnnnnnnnnnnnnnnnnnnnnnnnnnnnnnnnnnnnnnnnnnnnnnnnnnnnnnnnnnnnnnnnnnnnnnnnnnnnnnnnnnnnnnnnnnnnnnnnnnnnnnnnnnnnnnnnnnnnnnnnnnnnnnnnnnnnnnnnnnnnnnnnnnnnnnnnnnnnnnnnnnnnnnnnnnnnnnnnnnnnnnnnnnnnnnnnnnnnnnnnnnnnnnnnnnnnnnnnnnnnnnnnnnnnnnnnnnnnnnnnnnnnnnnnnnnnnnnnnnnnnnnnnnnnnnnnnnnnnnnnnnnnnnnnnnnnnnnnnnnnnnnnnnnnnnnnnnnnnnnnnnnnnnnnnnnnnnnnnnnnnnnnnnnnnnnnnnnnnnnnnnnnnnnnnnnnnnnnnnnnnnnnnnnnnnnnnnnnnnnnnnnnnnnnnnnnnnnnnnnnnnnnnnnnnnnnnnnnnnnnnnnnnnnnnnnnnnnnnnnnnnnnnnnnnnnnnnnnnnnnnnnnnnnnnnnnnnnnnnnnnnnnnnnnnnnnnnnnnnnnnnnnnnnnnnnnnnnnnnnnnnnnnnnnnnnnnnnnnnnnnnnnnnnnnnnnnnnnnnnnnnnnnnnnnnnnnnnnnnnnnnnnnnnnnnnnnnnnnnnnnnnnnnnnnnnnnnnnnnnnnnnnnnnnnnnnnnnnnnnnnnnnnnnnnnnnnnnnnnnnnnnnnnnnnnnnnnnnnnnnnnnnnnnnnnnnnnnnnnnnnnnnnnnnnnnnnnnnnnnnnnnnnnnnnnnnnnnnnnnnnnnnnnnnnnnnnnnnnnnnnnnnnnnnnnnnnnnnnnnnnnnnnnnnnnnnnnnnnnnnnnnnnnnnnnnnnnnnnnnnnnnnnnnnnnnnnnnnnnnnnnnnnnnnnnnnnnnnnnnnnnnnnnnnnnnnnnnnnnnnnnnnnnnnnnnnnnnnnnnnnnnnnnnnnnnnnnnnnnnnnnnnnnnnnnnnnnnnnnnnnnnnnnnnnnnnnnnnnnnnnnnnnnnnnnnnnnnnnnnnnnnnnnnnnnnnnnnnnnnnnnnnnnnnnnnnnnnnnnnnnnnnnnnnnnnnnnnnnnnnnnnnnnnnnnnnnnnnnnnnnnnnnnnnnnnnnnnnnnnnnnnnnnnnnnnnnnnnnnnnnnnnnnnnnnnnnnnnnnnnnnnnnnnnnnnnnnnnnnnnnnnnnnnnnnnnnnnnnnnnnnnnnnnnnnnnnnnnnnnnnnnnnnnnnnnnnnnnnnnnnnnnnnnnnnnnnnnnnnnnnnnnnnnnnnnnnnnnnnnnnnnnnnnnnnnnnnnnnnnnnnnnnnnnnnnnnnnnnnnnnnnnnnnnnnnnnnnnnnnnnnnnnnnnnnnnnnnnnnnnnnnnnnnnnnnnnnnnnnnnnnnnnnnnnnnnnnnnnnnnnnnnnnnnnnnnnnnnnnnnnnnnnnnnnnnnnnnnnnnnnnnnnnnnnnnnnnnnnnnnnnnnnnnnnnnnnnnnnnnnnnnnnnnnnnnnnnnnnnnnnnnnnnnnnnnnnnnnnnnnnnnnnnnnnnnnnnnnnnnnnnnnnnnnnnnnnnnnnnnnnnnnnnnnnnnnnnnnnnnnnnnnnnnnnnnnnnnnnnnnnnnnnnnnnnnnnnnnnnnnnnnnnnnnnnnnnnnnnnnnnnnnnnnnnnnnnnnnnnnnnnnnnnnnnnnnnnnnnnnnnnnnnnnnnnnnnnnnnnnnnnnnnnnnnnnnnnnnnnnnnnnnnnnnnnnnnnnnnnnnnnnnnnnnnnnnnnnnnnnnnnnnnnnnnnnnnnnnnnnnnnnnnnnnnnnnnnnnnnnnnnnnnnnnnnnnnnnnnnnnnnnnnnnnnnnnnnnnnnnnnnnnnnnnnnnnnnnnnnnnnnnnnnnnnnnnnnnnnnnnnnnnnnnnnnnnnnnnnnnnnnnnnnnnnnnnnnnnnnnnnnnnnnnnnnnnnnnnnnnnnnnnnnnnnnnnnnnnnnnnnnnnnnnnnnnnnnnnnnnnnnnnnnnnnnnnnnnnnnnnnnnnnnnnnnnnnnnnnnnnnnnnnnnnnnnnnnnnnnnnnnnnnnnnnnnnnnnnnnnnnnnnnnnnnnnnnnnnnnnnnnnnnnnnnnnnnnnnnnnnnnnnnnnnnnnnnnnnnnnnnnnnnnnnnnnnnnnnnnnnnnnnnnnnnnnnnnnnnnnnnnnnnnnnnnnnnnnnnnnnnnnnnnnnnnnnnnnnnnnnnnnnnnnnnnnnnnnnnnnnnnnnnnnnnnnnnnnnnnnnnnnnnnnnnnnnnnnnnnnnnnnnnnnnnnnnnnnnnnnnnnnnnnnnnnnnnnnnnnnnnnnnnnnnnnnnnnnnnnnnnnnnnnnnnnnnnnnnnnnnnnnnnnnnnnnnnnnnnnnnnnnnnnnnnnnnnnnnnnnnnnnnnnnnnnnnnnnnnnnnnnnnnnnnnnnnnnnnnnnnnnnnnnnnnnnnnnnnnnnnnnnnnnnnnnnnnnnnnnnnnnnnnnnnnnnnnnnnnnnnnnnnnnnnnnnnnnnnnnnnnnnnnnnnnnnnnnnnnnnnnnnnnnnnnnnnnnnnnnnnnnnnnnnnnnnnnnnnnnnnnnnnnnnnnnnnnnnnnnnnnnnnnnnnnnnnnnnnnnnnnnnnnnnnnnnnnnnnnnnnnnnnnnnnnnnnnnnnnnnnnnnnnnnnnnnnnnnnnnnnnnnnnnnnnnnnnnnnnnnnnnnnnnnnnnnnnnnnnnnnnnnnnnnnnnnnnnnnnnnnnnnnnnnnnnnnnnnnnnnnnnnnnnnnnnnnnnnnnnnnnnnnnnnnnnnnnnnnnnnnnnnnnnnnnnnnnnnnnnnnnnnnnnnnnnnnnnnnnnnnnnnnnnnnnnnnnnnnnnnnnnnnnnnnnnnnnnnnnnnnnnnnnnnnnnnnnnnnnnnnnnnnnnnnnnnnnnnnnnnnnnnnnnnnnnnnnnnnnnnnnnnnnnnnnnnnnnnnnnnnnnnnnnnnnnnnnnnnnnnnnnnnnnnnnnnnnnnnnnnnnnnnnnnnnnnnnnnnnnnnnnnnnnnnnnnnnnnnnnnnnnnnnnnnnnnnnnnnnnnnnnnnnnnnnnnnnnnnnnnnnnnnnnnnnnnnnnnnnnnnnnnnnnnnnnnnnnnnnnnnnnnnnnnnnnnnnnnnnnnnnnnnnnnnnnnnnnnnnnnnnnnnnnnnnnnnnnnnnnnnnnnnnnnnnnnnnnnnnnnnnnnnnnnnnnnnnnnnnnnnnnnnnnnnnnnnnnnnnnnnnnnnnnnnnnnnnnnnnnnnnnnnnnnnnnnnnnnnnnnnnnnnnnnnnnnnnnnnnnnnnnnnnnnnnnnnnnnnnnnnnnnnnnnnnnnnnnnnnnnnnnnnnnnnnnnnnnnnnnnnnnnnnnnnnnnnnnnnnnnnnnnnnnnnnnnnnnnnnnnnnnnnnnnnnnnnnnnnnnnnnnnnnnnnnnnnnnnnnnnnnnnnnnnnnnnnnnnnnnnnnnnnnnnnnnnnnnnnnnnnnnnnnnnnnnnnnnnnnnnnnnnnnnnnnnnnnnnnnnnnnnnnnnnnnnnnnnnnnnnnnnnnnnnnnnnnnnnnnnnnnnnnnnnnnnnnnnnnnnnnnnnnnnnnnnnnnnnnnnnnnnnnnnnnnnnnnnaggtggacaactggccgtcggaaaggccgtcaagagccgtgcgggcggatcggatagacctgttgacagaccgagcgctggtcggccgcccagcctggtttcttactgtctgaatcgcagtattcgaaatcgaacaccctggtcggtggtcaagccctctgttcggatggacgcctgcaagcggtaagggcccggcgtcacaaaagcgagctgggatgcggccgcgaagtcgagattctgcgtccccgcgaagctgatgcgaagcgagcacttccctgccccggcggtcgcgcagtcacgggcgacttcaacgccctgagcgtgtccgaagttccaatcgaacggtgatggcgtgggctcgaattggaagtttccattaaagaggtcgttcgacttccggtagtcgcccgcgcgcgcgcccaggtgctgcgcccatgcggacaccgccgcttcgggatggccttgctgcacgagaaaaccggcatactcccctgccgtactatcatcgttatacccatgtcgagcgatccaatcccaagtgcgttgcgcatcatccaggcgcccggcttgcatcaggtattggagccaggattgtaccgcccgccgatcttccggaaggccgtacagcaaaacatcatcagcgtgatctaccaggcgcgtgtactcgctgaagatgatcgaatcgtaatccggagtgagcgtcaggatacgcgccgtggcggggagggcttggtggttctcgccgacttggaaatagaagttcgccgcgcgcaggagaaggggcgcagaccgcggggcgagggccagcacctggccgaagcactcgcgcgcctctcccttctgtccggcatcgagaaacgcctccccgaggtcggcccatcgatagggattttgcgggtctcgctggagaacctcgcggaataggacaatggccttttggacgtcctcttcgctcatccccgtcaattgctaccgcgctcgcaactccaagggcgcgttggtgcaaacaaagatgcggcacagaacgcggtcaacctccgcgttgttctgccccaacgtctccgagagaatgcccgcctcgcagtaggcagccaaaaccaccccgaggatgaacgtcagcactttcaatccagcacactctcccgacgacggaccttttcgaaagcccgctgatgtaacggcgaatttacctagccatatggcggcgcaaagccgcctctacatcaatctgacccactgccgaacattacagccacatgccgggacggccctaatcgcaatgcggatgatccggtgggcaatgaaggctacgcgggggtggcggcggcggaggtggaggtgggaagggtggccgcggtggcgagggcggtcggggtgggtcgtgcggccgtggaggatttccgcctctggcaagtggggtggcgggctgagccgaagctggccccgcggcggagttccgcgccaccggatgaactagcgggaccaagctcactcgcgagccttccgccggcttcaagtcgaccgacccagacagaacgcgcagcgccactgaagagctgcccgcctccagcttgacccgcgaattcggatcgagcgtggcgcggctccggtcggccaaatagatcatggccgacgaaccagcggtggcgatctcgtcgcccgccaccaccggcaaggatgatacggcggttgccagcgcggccttgccgttgagcgtcagcgcccccgaactggtgaccctgcccaccggatcggcggccatcaggactacggtcgtcatcatgacgataagcagacgcaaatatttcacggctacctcctgtgattgctgattggcgatgggcgatgggaaaacgggtatggcgacgtcctctgtcgtcaatcgccagtcggaaataggccattcccgagccccgcggacattcccgcaacccacgccaggagcatggcattggccggaatatagaagttgaaatccgccaggctatgcaccagaatcgcggccagcgcacccgcgcacgccacggcaagataccgcgcccccgggtctcgcgatccgacggctttccgcaccgccgtcctcaccacgaagaacgccagcgcggccacgatggcgaaacccaccagccccagttccgccagcaactgaaggtaatcgttatgcgcgaaatcgtccgtgacgagcggcgaggaaaccttgaatcttaagaacgctgtctcatatccgcccagcccgcacccgaagacggggtaagctctgatcaacggaatcgtctcggcccaaagctgcgcgcggccttctccggtgggatcggtcgaaacgagctggacgaatcgcgcgatcagcttgtccggcggcagaaacacgaagcccgccagcaccagtgcggcgaccaggccgaccgtggctgtttgccgtttccgggagcgcgcggcccagctcagttgccgggttccgagtgccagcgcccccatcacgaacagggaagcaagtgtcgcgaagaaccccatccgtgaaaaggaaaagacgattgcggcaaacatcaatcccgccagcgcccacacgccgcaagcccccagcgccggagtcaccgccgagtgccctcgcgagcgcgtgcgccgccaaagcgccacggggtacaccactgcgaacggcagcgccatctccaggaagcctgcgtagtggttatggttgacgtacgtcccccaccggagttggtccacgcctcggccgaagttctgcgagaggcccagaccggcttccagagcgccgatggcgacgatgggccacatcgccagccagcggttatccgcaaatcgccaagtcagctcgcgcaccagcaggaagatgatcacgtacccgcagacgagcaggaaaaattgaaaagtcgcgatgggtgaaacgctcaggggtacaaagttggctgggcgtccgatgagtgctgctggaggcatcgccgcggtgcgggcgggtgacagcacgcgcaccaggtacaccggcagcggcaccacctgcatcaggatgtagacgggcaagagagccagggtccagcgcaccacgcggccgggtagtggcgcccactggtggcgggggcgggcaaggctcagcaccaccgccagcaggcacagcaccaggaggtagtggtactggtcgattcggagcgctccgccccactcgaagacagcgtaggcgagcaccaatcccattgtggataaagcgccgatgtccgctattcttagagactctcgcgttggcttttcggggtgggactggaggcgcatggactggattgggagcatcaccgtaccgctaataggctagaaagtaaacctgggtcatgggtgacaggtgacaggtgacaggtgacaggaaaggaggctgcgccctggcgcagtaggtgtcagcagacaggttagaggtcacaggtgacagtgaaggagcctcaagcaagctcataggggacaggggacagggaacgagtgtgcgccttgcggcgccataggtggcacgcgacccgggagggaagctgagccctgtgacctataacctattccctgtcctcctgttccctgttttccctgctgtaccctgtaacctataacctattccctgcctacttgttccctgtcttcctgtaccctgtgccctgtaacctattccctatttccccctcattgcggaacgctatggccccctcggagggtatggttcgcgacgctcatgccgaggagggcggacagcagccaccgggtgagcagaattcccaagaagtagatgatgcgatgttcgaaattgaaaccccgcaggaggacggttccccaagccgcgcccaaggtgctgcacgccgctaccaagagccacgatccgatccggaacttgttggacttccaacccggcacgtaggcgttcaggtgaaaatcctcggacttattgtctccgtcatctgcgatcggcaggagttcgatcctttcccaaaaataaatgcaccattggcgatacgcgccaacgagcacggcgatgagcaggcacattgcgcagcccacccaggaattattaggtaaggcaagaatcatttcgatctcctgtccggcgagcaggttataggtgacagccagaggttacaggttacaggtcacaggtgtcaggtgtcaggtgacagaaaaagaggctgcgccctgtccccctgtctttccgttccctgccttcctccgtcccctgtaccttgtgacctgtcacctgtaccctgttctctcttctctaccctatgacctgttccctgtaacctgttccctgtctttctgttccctgtctttctgttccctgtctttctgttccctgtctttctgttccctgtcttcctgttccctgtccactgtccactgttccctgtaacctgtccgctgtcttctcatattcgtgcgctgctcgatagggaaactatgcagcaggacggtggccaaagccgcgccctgcgaggccaaaggtgacagggaaagaggagagaataggcaataggtgacaggttacaggtgacagggaaagaggctgcgccctgcggcgccaaaggtgagcctgttccctgacgcctgacacctgttttcccctgttccctgtccacggtcctctgccttcgggttccctgtcttcccctgtcccctgtgacctgtaacctgtcacctctcttcctgctgtaccctgtcccctgtaacctatcccctgtcctgaccgctcagagccctacgctacagccattttgtccagcccgctcatgacaccttaagtctgatgaccaagctactcacccgttggagagtcagcccttccctggcgcgctgtagtggcggtctctgactgtcggagggtgttgtggcatggccaacttggggtagcgccctaattctgtgttggtcccctccctcttgacaaactgcgatcgcacgtagcatctttccagcagcgaaaaacaaggtaaggaccccgctgctgtcgaacttggacggaggggcggcgaagcgatcgctaggtgcggccctgcttatctcaagtggcttcagtcttagcggttgacccgtaagggaggaagaccgaagtctaaatagtgaaaacgtgtttgaaaatggcacctgactcactcgggatgttgaccgcgattttgatatccgttggcctaatcgtaagcggagtgcatcttcgtcgtgtacctaaacttaaaatcgtgggagcgctgctggctgtacttggcatcttcggactcatggcagctctgggcttcatcagggtttattaacagcactcaccacaatcttcatctctgccagaacctcttggccgatcagcacgcgcgttgagtgcctatattggtaaaagccatgaccagcgacgtatgccccaaatgcgagagtatgaatctcgccgactcccatcggcgaggttggatcgagcggtggattcttagcttttttggtatcgtgcccattcgctgcatggactgtaatacccgtttttactccttccgccgtcccctctactgactccttttttcttcggcactcggttcagctcgccaagttgcacagatttcctttcggccgtcaatgtaacttctcagccaatacccctggactgacttgacaaaaccccattggatgggttaatataggtttccggtagtctagccaaaaggggaggggctgccgatgcaaacaaatgcctccgttaattcgcgccggtgtgagcgcaaaatagcaacaattccaatcaaacttgtggtgaaggccgacctcttcaatgcagacgattcagctctcgcggtcgacatttctccgcgcggcgcctgtgttcgaaccaagctggagttagatccaggagagtgggtgggtgtcgttcccaagggaggatacccgtatgccatccccactcgcacgatttgggtgcgggaggatgagttcagccattggaccttcgcggggcttgagttcttaaacaccccggaaggttagaaaatgcactccatggcacacccttccagtgtttgattggaattccaaaaccccaccaacacacgtttaggacgctacctgcctccccgaaggggaggaatatcattagccgtaggtgaaacctacggaccgagacggcgacgaaaggaacctaattttccgcgtttcctttccgtgggtttcacctaaggctatgggcgacaggcagagggcacaggttacaggtgacaggccaagaggcagcgccgtccggcgcccaaggtcagcctgctgcctgacacctgatacctgacacctgttttcccctgttccctaacccctgttttcccttctttcccctgtaacctgtaacctgtcccctgccttgcggtggcagagccgctggggctcttgcgtgaggcggaagaaccactcgaggccgttctcctgcatccatgcttgcttggcagtcccggcgatgaagtcgaaggccgctcccaccccggccatcgccggcacgcctagccgtgagcggtgctcgaacatcgagcgttcctgtttgggagtgctcaagcctacccagacgacatccggcgccgccgcctggattcgtagctccacttccaccttttcttcctgggtcagcggccgaaagggtggcgagcaggtggctcctggttcgcgtctgctaagcagaggcgataaccgttcttgtggtcttcgggccttgcctttctcgcgtgccgggtgtataccttcatcgcgttaatcatttggtagacagccacccgacaatcgggccgccaggagcgcaacgggccgcccaccagcctcttgccaaggcaaggaggaagttatgagctataacctgctcgaagaaaactggattccagttctatggaaagacgggaatagcaatcgcgtgggcattactgaagctcttaggcaagcaggccggattcgtcaagtcgccgccagcaatcccatggaccgtttggccatcctgcgtttcctcctcgcgcttctctattggtgcaaggggaatccgccggacgatgaagactcggtctcttcgtttccctcggattggttcaggaaacttgatgacaataaggactgtttcaaccttctgggagatggcaagcggttctatcagtgcaatgccaagtctggaacagagggaaagctttccgccaactacctgatgcaagaggtgcccactggcacaaactcttggcacttccggcattcgacagataaagaggacggattatgtccggcgtgctgcgccgcggggttattgcgtttaccgctatttgctacgtcaggggggcgcggcaagccgccaggggtcaaccagaaaccgccggtttatgtcgtaccggtcggcggttcacttgcggaaaccctgcgtctctcctggcgcaaggtatcggacacggacttcggaacgccggcttgggaagagcccgatcttagccttcctcgacatggcaatgttccgctgcttgtgggattgacgtcgctgccccggcgcgtgtggctggacaatccgcaggaacccgacgccaactgcatctcgtgcggacgtaaagcgcctctaatacgccaatgtgtgtttgctggtgtcggcagcgcaaaaacggatgaaaatggcctgggccgcgtatggagcgacccgcacaccatcactgacggcgaggatgtcattaaacccagcaatgcccttggtgcaaccgacgcggcggctgggcaatgggcaaggatagcggcgggaattcttcgggagaaaaagcccaatggcaaaagaggcttgtgggtcgtcagctttgcgacggtgcagaacgacaagtacctggaagcgatggaatatgagattcctctcccgagcacgctagatgatcggcaggtcgcggagagtgtcgaaacgattgacatgtggcaaaaggagggccggaagcttgccggcaaagccaaaccgagagggacttcccgaagacatcttgaaattcctcccatggtcgccgcagttcgcccgcacgtagaagcaaaggtctccgggaaggtcggcgagttgatttcgcgaggccgcgatgcgtgggagcaggcagcccgggaatataggccgatgatggccgccgtcgccaaatcgctttccccgggctataccaccgctgcgctccggcggcgacgccagattgtcaatgtaaggccgaacatgcagccaggcaccccaccggccgggagggccggacggaagaagggaggcgacaaatgactccaacggagcaatacgtcgacgtcctgacacatctgaagtccggtgatctcggactcctgcgcgagcatgccgggcaagggctcgaccaatcggtcgatgcctttgacctcttcgcggggctctggtggccgttgcgggagaggaatcagcgcgcgccccgccgtgcggtggcgtggcttatcgcaaaactctatgccttccggccgatcgagcattcacccgggcagacgcttgcgtggcagcttgggcggtaccggaacgacaatgaccccgagaaagaccctgtcgcggaaaggttcgacaggatgctgaccttgccggttgatatactcgagccggccttgcaatggtcgcttaacctcatcgcctccaaaaacccgaagctcgactgggtgacgctgacaaacgatctttccatttgggaacgcgaaaccacccggctcaagtgggccgaggaattcttgaagtcttcgaaggaggaccgtcatgttaattgaaattcatgccattcaaaatcacagcccggccaacctgaaccgggacgacttgggcgctcccaagacctgctacttcggcggagtactgcgctcccgtatttccagtcagtgcctcaagcggagcatccgcatgagtgacgaattcaagcagttgctcggcggcgttcgcacacggcgactggcgcaattgatcgctccaggcggcccggataccgccgagtttaaaaaggcgatcgcggttttagaaatctgcggcatcgcggcaaaagagaagaaagggaagaaaggcgacgacgaggaatctacgcccgacgaaaaaagcgccggagtggtttatgtgagcaaacaagcggtcaacgagatgtctgagcttctgaaaaccaagtcggccaagaccgataacgagctcgccaaggaatttgcccagataatcgctcgccatacgagcaccccggacatggcactctgtggcagaatgctggaaccaaagaaagcgaaaaagcaggcgtcggaggaaggcggcgcgaagcccaagggcggcgacgtctggaagggacttgacacaaccgttgaggcggcgctgcaagttgcccacgcaatttctactcacgcggctcgcccggagattgactactatgtggccgctgatgatgtgcccggtgaagacgcgggagcaggctttgtagatgaagcaatgttcggctccgcctgcttctacaagtatttttcgattgacttcgaaaccctcatcaacaatctgaagggcaacaaggaactggccgctcatactgtcggcgcgttcatccggggagcggcgttggtgaatcccacgggcaaacagaatagtttcgccgcgcacaacccacccgacggaatgctggtcgaaatcagaaactcacctctcagctatgccaacgcttttgcccgaccagccatagcccagggcgaacgagacatcatatcccagagcgtcgcgcaactcggccagtacgttcacgatatcgacaccggatacggcaaaccaacgaggcggttctggttctcgcccaatcttcgctatcccttgaccgttacggagggggataaggaaaacgccttggccgaaaacaatatcaagtcgctcgaggaattgatcgaggcagtcatcaagggaatcggccatgattgggaggaggttcagaaagtggttgtgaactcggaggtggcctgatgagcgcaaataccctctttctccgcctcgaagccccccttcaggcatggggcgatcagcagtcgaagtttgtgattcggcggacggctgacgccccaaccaggtctggcgtcatggggatgctttgcgcggcgttgggcgtctcccgctcggcggcgccggaaggctggcttccaaggcttagccgcctgcgcatgggcgtccgcatcgatgtgccgggggtccgctggtgggattatcacacggtgggcgccgggatgccgatgcgcactgccgaaggtggaaccaagccaggggccgtgctgacccgccgcgaatacctttgcgacgcctcgtttctcgtcgcttttcagggagagtcggacctcattgccgaactggagtccgcaattaaagcgcccaaatggacgctctatctgggcagaaagtgctgccctccctcgcgccctttactggagcatccggggggtgaatttcctgacttgctttctgccctcaaatcggttccctggcgcaagaggttggagggagacgatcagcccgaagcgctggattgcctgcttgattggaagtcaaccgaagagcagccggaggctcccgatgatgcgctcgtctggtacgacgtgcccgtgaccttcgacccgccctcccaccagccccgatttgtcattcgcaagcaactgcgcgttggactcgacggcgaagtaacgcttgcaactcagccagcacagagctacacgccagcgcctccccgcccaagagcggattacactaataccgagtacagaatccgacgggaaaagcggctcgacgacgactatcacttgtgcgtcttttgcaagtcgcccgccaccaccgtccagcacatcacctatcgccgcgcgggtggcaatgaactcgcggatgacttgcgctctctctgtcgcctctgccacgatgccgtcaccatgatcgaatatggcctaggcatgggcatggaccgcatcaacccggaagagccgcgttggcgcgacttgattatccaaaagcggaacgaaatcatcacgttccgctccctggagactcgccgcaggcgcctggtcgccgaggaggtggagtagccatgtaccggtcctgccttttgattgacgtcgggagtaaccccgaccggcctcggcccggaaggctgtggcttcggaatctctatcacgtccaccagcgcctttggatggcgtttccctccgagaaccgaaaatcccatgatcgcgattttcttaagcctttcaaacccgcggactttggcgagaagccggttcaggtagaacgcggggcgggttccggctttctttttcgcattgagccgcagcccgccgggcgggtcgtgattctcgtccagtccaactccgccgtgaagccggattgggactacgccttccacaacgcccgttttcttttgaatcctctggctgctcccccgcaggtagaggaattcgaccctcgcttcgccaagggccaacagcttcggttccgcatccgcatcaatctaagcaagaagttaaaaacgagcgcaaagggcgtcgatcttaccaaggcgggcgagggaacagatcgccaaggccgcccgaaggcccaaagcaaacgcgtagcgctgacctgggataaggaccagaaccccgacgatgtgatacgaaaatggttcgccgccaagggcgaccaaggtggcttccaggtggaaactttccgcgtcttgcaaatcgggtggggcgcaggaaaccgatcggacccgaggccggcgggcgatcgcatgaaatttcgctcagccttattggaggggacgcttacggttaaagacgcggatagcttcagagaaaccatcgtgggcggcatcgggcacggcaaagccttcggcttcgggcttctttccgtagcccctcgcacaccactcccggcagaggcaacgtgagagttctgacgccaaagcgagccccgaagcagcgcgccgagatcgcccgccgcatgtttgtgcagcgctttcccggtgtggatgtgcaggcgtattccgtcaccgaattgcggggaatggagggcttgcgcgtgcccgccaaatacgcggaactcggcgagcagtacggagtcacctggaaggggcgcaactacgacaaatccaactggaatctggcggacaacatcaatcgcgccctctcgacggccaatgccagcctttacgccttgtgcgccgccgtactctgctcgctgggttacctgccgtctctgggattcgttcacgacgccggcacgttgccctttatctatgatgtggcggacctgtacaaggaaataaccagtttcccggcagcctttcagtccatgcgccaggaccccaatgacaaaggcgacctggtccgcacgctgctgaaggaacgcgtcgagcaggagaaactgctccagagaattcccaaagacatggaggaactgtttgcatgacggtcatcgtcgccaccgacacgccggatgccattcgcggaatgctgaaacgctggtttatcgagccccgccctaatgtcttcgtcggctcactgaatcggcgcactcatgagaaaacgatcgagtacatcaagcgcaacgccgccgacatcggcctgctgatcgtcaacagctaccctaattgccagggcttcaaaatcgataccaccggccccaccgaccgcaagggcgtcgaagtcagcggtttgtggatggtggccgagaaatgggaggaagggacgacgactgcgccagctcaaaccaccgattttccccctgaatcctcaagctaagtcctttggaattcagggtgatccccacgcgcgtggggatggtccgtataggcccaggttatttgctgatgtcatagggtgatccccacgcgcgtggggatggtccggcccgaggctgtggcctacacatttgttttccgtgatccccacgcgcgtggggatggtccggcggcgtcaatagcagcacgaacgctggcagcgtgatccccacgcgcgtggggatggtccgcctgttcaccgctgattttatcgccgcagaccgtgatccccacgcgcgtggggatggtccggacaagcgcggttccatcctccgacaattgcggtgatccccacgcgcgtggggatggtccggccatcaattccgcaagggaggaaggcagagcgtgatccccacgcgcgtggggatggtccgggctatccgggatcgaaattcattctgacggtgtgatccccacgcgcgtggggatggtccgcacggccagaatatgttcctgtgggcgtcgatgtgatccccacgcgcgtggggatggtccggacgaaggcagccggcctctcactgatacggtgtgatccccacgcgcgtggggatggtccggagaaaatcaatgcctcaggcattcgcagtgggtgatccccacgcgcgtggggatggtccgccgctcatctgcgccatcacctggatgagattg

SEQ ID NO: 1012 - DNA, 104810 bp, Artificial Sequence
  Synthetic Oligonucleotide
  misc_feature (1)..(91640): n is a, c, g, or t
nnnnnnnnnnnnnnnnnnnnnnnnnnnnnnnnnnnnnnnnnnnnnnnnnnnnnnnnnnnnnnnnnnnnnnnnnnnnnnnnnnnnnnnnnnnnnnnnnnnnnnnnnnnnnnnnnnnnnnnnnnnnnnnnnnnnnnnnnnnnnnnnnnnnnnnnnnnnnnnnnnnnnnnnnnnnnnnnnnnnnnnnnnnnnnnnnnnnnnnnnnnnnnnnnnnnnnnnnnnnnnnnnnnnnnnnnnnnnnnnnnnnnnnnnnnnnnnnnnnnnnnnnnnnnnnnnnnnnnnnnnnnnnnnnnnnnnnnnnnnnnnnnnnnnnnnnnnnnnnnnnnnnnnnnnnnnnnnnnnnnnnnnnnnnnnnnnnnnnnnnnnnnnnnnnnnnnnnnnnnnnnnnnnnnnnnnnnnnnnnnnnnnnnnnnnnnnnnnnnnnnnnnnnnnnnnnnnnnnnnnnnnnnnnnnnnnnnnnnnnnnnnnnnnnnnnnnnnnnnnnnnnnnnnnnnnnnnnnnnnnnnnnnnnnnnnnnnnnnnnnnnnnnnnnnnnnnnnnnnnnnnnnnnnnnnnnnnnnnnnnnnnnnnnnnnnnnnnnnnnnnnnnnnnnnnnnnnnnnnnnnnnnnnnnnnnnnnnnnnnnnnnnnnnnnnnnnnnnnnnnnnnnnnnnnnnnnnnnnnnnnnnnnnnnnnnnnnnnnnnnnnnnnnnnnnnnnnnnnnnnnnnnnnnnnnnnnnnnnnnnnnnnnnnnnnnnnnnnnnnnnnnnnnnnnnnnnnnnnnnnnnnnnnnnnnnnnnnnnnnnnnnnnnnnnnnnnnnnnnnnnnnnnnnnnnnnnnnnnnnnnnnnnnnnnnnnnnnnnnnnnnnnnnnnnnnnnnnnnnnnnnnnnnnnnnnnnnnnnnnnnnnnnnnnnnnnnnnnnnnnnnnnnnnnnnnnnnnnnnnnnnnnnnnnnnnnnnnnnnnnnnnnnnnnnnnnnnnnnnnnnnnnnnnnnnnnnnnnnnnnnnnnnnnnnnnnnnnnnnnnnnnnnnnnnnnnnnnnnnnnnnnnnnnnnnnnnnnnnnnnnnnnnnnnnnnnnnnnnnnnnnnnnnnnnnnnnnnnnnnnnnnnnnnnnnnnnnnnnnnnnnnnnnnnnnnnnnnnnnnnnnnnnnnnnnnnnnnnnnnnnnnnnnnnnnnnnnnnnnnnnnnnnnnnnnnnnnnnnnnnnnnnnnnnnnnnnnnnnnnnnnnnnnnnnnnnnnnnnnnnnnnnnnnnnnnnnnnnnnnnnnnnnnnnnnnnnnnnnnnnnnnnnnnnnnnnnnnnnnnnnnnnnnnnnnnnnnnnnnnnnnnnnnnnnnnnnnnnnnnnnnnnnnnnnnnnnnnnnnnnnnnnnnnnnnnnnnnnnnnnnnnnnnnnnnnnnnnnnnnnnnnnnnnnnnnnnnnnnnnnnnnnnnnnnnnnnnnnnnnnnnnnnnnnnnnnnnnnnnnnnnnnnnnnnnnnnnnnnnnnnnnnnnnnnnnnnnnnnnnnnnnnnnnnnnnnnnnnnnnnnnnnnnnnnnnnnnnnnnnnnnnnnnnnnnnnnnnnnnnnnnnnnnnnnnnnnnnnnnnnnnnnnnnnnnnnnnnnnnnnnnnnnnnnnnnnnnnnnnnnnnnnnnnnnnnnnnnnnnnnnnnnnnnnnnnnnnnnnnnnnnnnnnnnnnnnnnnnnnnnnnnnnnnnnnnnnnnnnnnnnnnnnnnnnnnnnnnnnnnnnnnnnnnnnnnnnnnnnnnnnnnnnnnnnnnnnnnnnnnnnnnnnnnnnnnnnnnnnnnnnnnnnnnnnnnnnnnnnnnnnnnnnnnnnnnnnnnnnnnnnnnnnnnnnnnnnnnnnnnnnnnnnnnnnnnnnnnnnnnnnnnnnnnnnnnnnnnnnnnnnnnnnnnnnnnnnnnnnnnnnnnnnnnnnnnnnnnnnnnnnnnnnnnnnnnnnnnnnnnnnnnnnnnnnnnnnnnnnnnnnnnnnnnnnnnnnnnnnnnnnnnnnnnnnnnnnnnnnnnnnnnnnnnnnnnnnnnnnnnnnnnnnnnnnnnnnnnnnnnnnnnnnnnnnnnnnnnnnnnnnnnnnnnnnnnnnnnnnnnnnnnnnnnnnnnnnnnnnnnnnnnnnnnnnnnnnnnnnnnnnnnnnnnnnnnnnnnnnnnnnnnnnnnnnnnnnnnnnnnnnnnnnnnnnnnnnnnnnnnnnnnnnnnnnnnnnnnnnnnnnnnnnnnnnnnnnnnnnnnnnnnnnnnnnnnnnnnnnnnnnnnnnnnnnnnnnnnnnnnnnnnnnnnnnnnnnnnnnnnnnnnnnnnnnnnnnnnnnnnnnnnnnnnnnnnnnnnnnnnnnnnnnnnnnnnnnnnnnnnnnnnnnnnnnnnnnnnnnnnnnnnnnnnnnnnnnnnnnnnnnnnnnnnnnnnnnnnnnnnnnnnnnnnnnnnnnnnnnnnnnnnnnnnnnnnnnnnnnnnnnnnnnnnnnnnnnnnnnnnnnnnnnnnnnnnnnnnnnnnnnnnnnnnnnnnnnnnnnnnnnnnnnnnnnnnnnnnnnnnnnnnnnnnnnnnnnnnnnnnnnnnnnnnnnnnnnnnnnnnnnnnnnnnnnnnnnnnnnnnnnnnnnnnnnnnnnnnnnnnnnnnnnnnnnnnnnnnnnnnnnnnnnnnnnnnnnnnnnnnnnnnnnnnnnnnnnnnnnnnnnnnnnnnnnnnnnnnnnnnnnnnnnnnnnnnnnnnnnnnnnnnnnnnnnnnnnnnnnnnnnnnnnnnnnnnnnnnnnnnnnnnnnnnnnnnnnnnnnnnnnnnnnnnnnnnnnnnnnnnnnnnnnnnnnnnnnnnnnnnnnnnnnnnnnnnnnnnnnnnnnnnnnnnnnnnnnnnnnnnnnnnnnnnnnnnnnnnnnnnnnnnnnnnnnnnnnnnnnnnnnnnnnnnnnnnnnnnnnnnnnnnnnnnnnnnnnnnnnnnnnnnnnnnnnnnnnnnnnnnnnnnnnnnnnnnnnnnnnnnnnnnnnnnnnnnnnnnnnnnnnnnnnnnnnnnnnnnnnnnnnnnnnnnnnnnnnnnnnnnnnnnnnnnnnnnnnnnnnnnnnnnnnnnnnnnnnnnnnnnnnnnnnnnnnnnnnnnnnnnnnnnnnnnnnnnnnnnnnnnnnnnnnnnnnnnnnnnnnnnnnnnnnnnnnnnnnnnnnnnnnnnnnnnnnnnnnnnnnnnnnnnnnnnnnnnnnnnnnnnnnnnnnnnnnnnnnnnnnnnnnnnnnnnnnnnnnnnnnnnnnnnnnnnnnnnnnnnnnnnnnnnnnnnnnnnnnnnnnnnnnnnnnnnnnnnnnnnnnnnnnnnnnnnnnnnnnnnnnnnnnnnnnnnnnnnnnnnnnnnnnnnnnnnnnnnnnnnnnnnnnnnnnnnnnnnnnnnnnnnnnnnnnnnnnnnnnnnnnnnnnnnnnnnnnnnnnnnnnnnnnnnnnnnnnnnnnnnnnnnnnnnnnnnnnnnnnnnnnnnnnnnnnnnnnnnnnnnnnnnnnnnnnnnnnnnnnnnnnnnnnnnnnnnnnnnnnnnnnnnnnnnnnnnnnnnnnnnnnnnnnnnnnnnnnnnnnnnnnnnnnnnnnnnnnnnnnnnnnnnnnnnnnnnnnnnnnnnnnnnnnnnnnnnnnnnnnnnnnnnnnnnnnnnnnnnnnnnnnnnnnnnnnnnnnnnnnnnnnnnnnnnnnnnnnnnnnnnnnnnnnnnnnnnnnnnnnnnnnnnnnnnnnnnnnnnnnnnnnnnnnnnnnnnnnnnnnnnnnnnnnnnnnnnnnnnnnnnnnnnnnnnnnnnnnnnnnnnnnnnnnnnnnnnnnnnnnnnnnnnnnnnnnnnnnnnnnnnnnnnnnnnnnnnnnnnnnnnnnnnnnnnnnnnnnnnnnnnnnnnnnnnnnnnnnnnnnnnnnnnnnnnnnnnnnnnnnnnnnnnnnnnnnnnnnnnnnnnnnnnnnnnnnnnnnnnnnnnnnnnnnnnnnnnnnnnnnnnnnnnnnnnnnnnnnnnnnnnnnnnnnnnnnnnnnnnnnnnnnnnnnnnnnnnnnnnnnnnnnnnnnnnnnnnnnnnnnnnnnnnnnnnnnnnnnnnnnnnnnnnnnnnnnnnnnnnnnnnnnnnnnnnnnnnnnnnnnnnnnnnnnnnnnnnnnnnnnnnnnnnnnnnnnnnnnnnnnnnnnnnnnnnnnnnnnnnnnnnnnnnnnnnnnnnnnnnnnnnnnnnnnnnnnnnnnnnnnnnnnnnnnnnnnnnnnnnnnnnnnnnnnnnnnnnnnnnnnnnnnnnnnnnnnnnnnnnnnnnnnnnnnnnnnnnnnnnnnnnnnnnnnnnnnnnnnnnnnnnnnnnnnnnnnnnnnnnnnnnnnnnnnnnnnnnnnnnnnnnnnnnnnnnnnnnnnnnnnnnnnnnnnnnnnnnnnnnnnnnnnnnnnnnnnnnnnnnnnnnnnnnnnnnnnnnnnnnnnnnnnnnnnnnnnnnnnnnnnnnnnnnnnnnnnnnnnnnnnnnnnnnnnnnnnnnnnnnnnnnnnnnnnnnnnnnnnnnnnnnnnnnnnnnnnnnnnnnnnnnnnnnnnnnnnnnnnnnnnnnnnnnnnnnnnnnnnnnnnnnnnnnnnnnnnnnnnnnnnnnnnnnnnnnnnnnnnnnnnnnnnnnnnnnnnnnnnnnnnnnnnnnnnnnnnnnnnnnnnnnnnnnnnnnnnnnnnnnnnnnnnnnnnnnnnnnnnnnnnnnnnnnnnnnnnnnnnnnnnnnnnnnnnnnnnnnnnnnnnnnnnnnnnnnnnnnnnnnnnnnnnnnnnnnnnnnnnnnnnnnnnnnnnnnnnnnnnnnnnnnnnnnnnnnnnnnnnnnnnnnnnnnnnnnnnnnnnnnnnnnnnnnnnnnnnnnnnnnnnnnnnnnnnnnnnnnnnnnnnnnnnnnnnnnnnnnnnnnnnnnnnnnnnnnnnnnnnnnnnnnnnnnnnnnnnnnnnnnnnnnnnnnnnnnnnnnnnnnnnnnnnnnnnnnnnnnnnnnnnnnnnnnnnnnnnnnnnnnnnnnnnnnnnnnnnnnnnnnnnnnnnnnnnnnnnnnnnnnnnnnnnnnnnnnnnnnnnnnnnnnnnnnnnnnnnnnnnnnnnnnnnnnnnnnnnnnnnnnnnnnnnnnnnnnnnnnnnnnnnnnnnnnnnnnnnnnnnnnnnnnnnnnnnnnnnnnnnnnnnnnnnnnnnnnnnnnnnnnnnnnnnnnnnnnnnnnnnnnnnnnnnnnnnnnnnnnnnnnnnnnnnnnnnnnnnnnnnnnnnnnnnnnnnnnnnnnnnnnnnnnnnnnnnnnnnnnnnnnnnnnnnnnnnnnnnnnnnnnnnnnnnnnnnnnnnnnnnnnnnnnnnnnnnnnnnnnnnnnnnnnnnnnnnnnnnnnnnnnnnnnnnnnnnnnnnnnnnnnnnnnnnnnnnnnnnnnnnnnnnnnnnnnnnnnnnnnnnnnnnnnnnnnnnnnnnnnnnnnnnnnnnnnnnnnnnnnnnnnnnnnnnnnnnnnnnnnnnnnnnnnnnnnnnnnnnnnnnnnnnnnnnnnnnnnnnnnnnnnnnnnnnnnnnnnnnnnnnnnnnnnnnnnnnnnnnnnnnnnnnnnnnnnnnnnnnnnnnnnnnnnnnnnnnnnnnnnnnnnnnnnnnnnnnnnnnnnnnnnnnnnnnnnnnnnnnnnnnnnnnnnnnnnnnnnnnnnnnnnnnnnnnnnnnnnnnnnnnnnnnnnnnnnnnnnnnnnnnnnnnnnnnnnnnnnnnnnnnnnnnnnnnnnnnnnnnnnnnnnnnnnnnnnnnnnnnnnnnnnnnnnnnnnnnnnnnnnnnnnnnnnnnnnnnnnnnnnnnnnnnnnnnnnnnnnnnnnnnnnnnnnnnnnnnnnnnnnnnnnnnnnnnnnnnnnnnnnnnnnnnnnnnnnnnnnnnnnnnnnnnnnnnnnnnnnnnnnnnnnnnnnnnnnnnnnnnnnnnnnnnnnnnnnnnnnnnnnnnnnnnnnnnnnnnnnnnnnnnnnnnnnnnnnnnnnnnnnnnnnnnnnnnnnnnnnnnnnnnnnnnnnnnnnnnnnnnnnnnnnnnnnnnnnnnnnnnnnnnnnnnnnnnnnnnnnnnnnnnnnnnnnnnnnnnnnnnnnnnnnnnnnnnnnnnnnnnnnnnnnnnnnnnnnnnnnnnnnnnnnnnnnnnnnnnnnnnnnnnnnnnnnnnnnnnnnnnnnnnnnnnnnnnnnnnnnnnnnnnnnnnnnnnnnnnnnnnnnnnnnnnnnnnnnnnnnnnnnnnnnnnnnnnnnnnnnnnnnnnnnnnnnnnnnnnnnnnnnnnnnnnnnnnnnnnnnnnnnnnnnnnnnnnnnnnnnnnnnnnnnnnnnnnnnnnnnnnnnnnnnnnnnnnnnnnnnnnnnnnnnnnnnnnnnnnnnnnnnnnnnnnnnnnnnnnnnnnnnnnnnnnnnnnnnnnnnnnnnnnnnnnnnnnnnnnnnnnnnnnnnnnnnnnnnnnnnnnnnnnnnnnnnnnnnnnnnnnnnnnnnnnnnnnnnnnnnnnnnnnnnnnnnnnnnnnnnnnnnnnnnnnnnnnnnnnnnnnnnnnnnnnnnnnnnnnnnnnnnnnnnnnnnnnnnnnnnnnnnnnnnnnnnnnnnnnnnnnnnnnnnnnnnnnnnnnnnnnnnnnnnnnnnnnnnnnnnnnnnnnnnnnnnnnnnnnnnnnnnnnnnnnnnnnnnnnnnnnnnnnnnnnnnnnnnnnnnnnnnnnnnnnnnnnnnnnnnnnnnnnnnnnnnnnnnnnnnnnnnnnnnnnnnnnnnnnnnnnnnnnnnnnnnnnnnnnnnnnnnnnnnnnnnnnnnnnnnnnnnnnnnnnnnnnnnnnnnnnnnnnnnnnnnnnnnnnnnnnnnnnnnnnnnnnnnnnnnnnnnnnnnnnnnnnnnnnnnnnnnnnnnnnnnnnnnnnnnnnnnnnnnnnnnnnnnnnnnnnnnnnnnnnnnnnnnnnnnnnnnnnnnnnnnnnnnnnnnnnnnnnnnnnnnnnnnnnnnnnnnnnnnnnnnnnnnnnnnnnnnnnnnnnnnnnnnnnnnnnnnnnnnnnnnnnnnnnnnnnnnnnnnnnnnnnnnnnnnnnnnnnnnnnnnnnnnnnnnnnnnnnnnnnnnnnnnnnnnnnnnnnnnnnnnnnnnnnnnnnnnnnnnnnnnnnnnnnnnnnnnnnnnnnnnnnnnnnnnnnnnnnnnnnnnnnnnnnnnnnnnnnnnnnnnnnnnnnnnnnnnnnnnnnnnnnnnnnnnnnnnnnnnnnnnnnnnnnnnnnnnnnnnnnnnnnnnnnnnnnnnnnnnnnnnnnnnnnnnnnnnnnnnnnnnnnnnnnnnnnnnnnnnnnnnnnnnnnnnnnnnnnnnnnnnnnnnnnnnnnnnnnnnnnnnnnnnnnnnnnnnnnnnnnnnnnnnnnnnnnnnnnnnnnnnnnnnnnnnnnnnnnnnnnnnnnnnnnnnnnnnnnnnnnnnnnnnnnnnnnnnnnnnnnnnnnnnnnnnnnnnnnnnnnnnnnnnnnnnnnnnnnnnnnnnnnnnnnnnnnnnnnnnnnnnnnnnnnnnnnnnnnnnnnnnnnnnnnnnnnnnnnnnnnnnnnnnnnnnnnnnnnnnnnnnnnnnnnnnnnnnnnnnnnnnnnnnnnnnnnnnnnnnnnnnnnnnnnnnnnnnnnnnnnnnnnnnnnnnnnnnnnnnnnnnnnnnnnnnnnnnnnnnnnnnnnnnnnnnnnnnnnnnnnnnnnnnnnnnnnnnnnnnnnnnnnnnnnnnnnnnnnnnnnnnnnnnnnnnnnnnnnnnnnnnnnnnnnnnnnnnnnnnnnnnnnnnnnnnnnnnnnnnnnnnnnnnnnnnnnnnnnnnnnnnnnnnnnnnnnnnnnnnnnnnnnnnnnnnnnnnnnnnnnnnnnnnnnnnnnnnnnnnnnnnnnnnnnnnnnnnnnnnnnnnnnnnnnnnnnnnnnnnnnnnnnnnnnnnnnnnnnnnnnnnnnnnnnnnnnnnnnnnnnnnnnnnnnnnnnnnnnnnnnnnnnnnnnnnnnnnnnnnnnnnnnnnnnnnnnnnnnnnnnnnnnnnnnnnnnnnnnnnnnnnnnnnnnnnnnnnnnnnnnnnnnnnnnnnnnnnnnnnnnnnnnnnnnnnnnnnnnnnnnnnnnnnnnnnnnnnnnnnnnnnnnnnnnnnnnnnnnnnnnnnnnnnnnnnnnnnnnnnnnnnnnnnnnnnnnnnnnnnnnnnnnnnnnnnnnnnnnnnnnnnnnnnnnnnnnnnnnnnnnnnnnnnnnnnnnnnnnnnnnnnnnnnnnnnnnnnnnnnnnnnnnnnnnnnnnnnnnnnnnnnnnnnnnnnnnnnnnnnnnnnnnnnnnnnnnnnnnnnnnnnnnnnnnnnnnnnnnnnnnnnnnnnnnnnnnnnnnnnnnnnnnnnnnnnnnnnnnnnnnnnnnnnnnnnnnnnnnnnnnnnnnnnnnnnnnnnnnnnnnnnnnnnnnnnnnnnnnnnnnnnnnnnnnnnnnnnnnnnnnnnnnnnnnnnnnnnnnnnnnnnnnnnnnnnnnnnnnnnnnnnnnnnnnnnnnnnnnnnnnnnnnnnnnnnnnnnnnnnnnnnnnnnnnnnnnnnnnnnnnnnnnnnnnnnnnnnnnnnnnnnnnnnnnnnnnnnnnnnnnnnnnnnnnnnnnnnnnnnnnnnnnnnnnnnnnnnnnnnnnnnnnnnnnnnnnnnnnnnnnnnnnnnnnnnnnnnnnnnnnnnnnnnnnnnnnnnnnnnnnnnnnnnnnnnnnnnnnnnnnnnnnnnnnnnnnnnnnnnnnnnnnnnnnnnnnnnnnnnnnnnnnnnnnnnnnnnnnnnnnnnnnnnnnnnnnnnnnnnnnnnnnnnnnnnnnnnnnnnnnnnnnnnnnnnnnnnnnnnnnnnnnnnnnnnnnnnnnnnnnnnnnnnnnnnnnnnnnnnnnnnnnnnnnnnnnnnnnnnnnnnnnnnnnnnnnnnnnnnnnnnnnnnnnnnnnnnnnnnnnnnnnnnnnnnnnnnnnnnnnnnnnnnnnnnnnnnnnnnnnnnnnnnnnnnnnnnnnnnnnnnnnnnnnnnnnnnnnnnnnnnnnnnnnnnnnnnnnnnnnnnnnnnnnnnnnnnnnnnnnnnnnnnnnnnnnnnnnnnnnnnnnnnnnnnnnnnnnnnnnnnnnnnnnnnnnnnnnnnnnnnnnnnnnnnnnnnnnnnnnnnnnnnnnnnnnnnnnnnnnnnnnnnnnnnnnnnnnnnnnnnnnnnnnnnnnnnnnnnnnnnnnnnnnnnnnnnnnnnnnnnnnnnnnnnnnnnnnnnnnnnnnnnnnnnnnnnnnnnnnnnnnnnnnnnnnnnnnnnnnnnnnnnnnnnnnnnnnnnnnnnnnnnnnnnnnnnnnnnnnnnnnnnnnnnnnnnnnnnnnnnnnnnnnnnnnnnnnnnnnnnnnnnnnnnnnnnnnnnnnnnnnnnnnnnnnnnnnnnnnnnnnnnnnnnnnnnnnnnnnnnnnnnnnnnnnnnnnnnnnnnnnnnnnnnnnnnnnnnnnnnnnnnnnnnnnnnnnnnnnnnnnnnnnnnnnnnnnnnnnnnnnnnnnnnnnnnnnnnnnnnnnnnnnnnnnnnnnnnnnnnnnnnnnnnnnnnnnnnnnnnnnnnnnnnnnnnnnnnnnnnnnnnnnnnnnnnnnnnnnnnnnnnnnnnnnnnnnnnnnnnnnnnnnnnnnnnnnnnnnnnnnnnnnnnnnnnnnnnnnnnnnnnnnnnnnnnnnnnnnnnnnnnnnnnnnnnnnnnnnnnnnnnnnnnnnnnnnnnnnnnnnnnnnnnnnnnnnnnnnnnnnnnnnnnnnnnnnnnnnnnnnnnnnnnnnnnnnnnnnnnnnnnnnnnnnnnnnnnnnnnnnnnnnnnnnnnnnnnnnnnnnnnnnnnnnnnnnnnnnnnnnnnnnnnnnnnnnnnnnnnnnnnnnnnnnnnnnnnnnnnnnnnnnnnnnnnnnnnnnnnnnnnnnnnnnnnnnnnnnnnnnnnnnnnnnnnnnnnnnnnnnnnnnnnnnnnnnnnnnnnnnnnnnnnnnnnnnnnnnnnnnnnnnnnnnnnnnnnnnnnnnnnnnnnnnnnnnnnnnnnnnnnnnnnnnnnnnnnnnnnnnnnnnnnnnnnnnnnnnnnnnnnnnnnnnnnnnnnnnnnnnnnnnnnnnnnnnnnnnnnnnnnnnnnnnnnnnnnnnnnnnnnnnnnnnnnnnnnnnnnnnnnnnnnnnnnnnnnnnnnnnnnnnnnnnnnnnnnnnnnnnnnnnnnnnnnnnnnnnnnnnnnnnnnnnnnnnnnnnnnnnnnnnnnnnnnnnnnnnnnnnnnnnnnnnnnnnnnnnnnnnnnnnnnnnnnnnnnnnnnnnnnnnnnnnnnnnnnnnnnnnnnnnnnnnnnnnnnnnnnnnnnnnnnnnnnnnnnnnnnnnnnnnnnnnnnnnnnnnnnnnnnnnnnnnnnnnnnnnnnnnnnnnnnnnnnnnnnnnnnnnnnnnnnnnnnnnnnnnnnnnnnnnnnnnnnnnnnnnnnnnnnnnnnnnnnnnnnnnnnnnnnnnnnnnnnnnnnnnnnnnnnnnnnnnnnnnnnnnnnnnnnnnnnnnnnnnnnnnnnnnnnnnnnnnnnnnnnnnnnnnnnnnnnnnnnnnnnnnnnnnnnnnnnnnnnnnnnnnnnnnnnnnnnnnnnnnnnnnnnnnnnnnnnnnnnnnnnnnnnnnnnnnnnnnnnnnnnnnnnnnnnnnnnnnnnnnnnnnnnnnnnnnnnnnnnnnnnnnnnnnnnnnnnnnnnnnnnnnnnnnnnnnnnnnnnnnnnnnnnnnnnnnnnnnnnnnnnnnnnnnnnnnnnnnnnnnnnnnnnnnnnnnnnnnnnnnnnnnnnnnnnnnnnnnnnnnnnnnnnnnnnnnnnnnnnnnnnnnnnnnnnnnnnnnnnnnnnnnnnnnnnnnnnnnnnnnnnnnnnnnnnnnnnnnnnnnnnnnnnnnnnnnnnnnnnnnnnnnnnnnnnnnnnnnnnnnnnnnnnnnnnnnnnnnnnnnnnnnnnnnnnnnnnnnnnnnnnnnnnnnnnnnnnnnnnnnnnnnnnnnnnnnnnnnnnnnnnnnnnnnnnnnnnnnnnnnnnnnnnnnnnnnnnnnnnnnnnnnnnnnnnnnnnnnnnnnnnnnnnnnnnnnnnnnnnnnnnnnnnnnnnnnnnnnnnnnnnnnnnnnnnnnnnnnnnnnnnnnnnnnnnnnnnnnnnnnnnnnnnnnnnnnnnnnnnnnnnnnnnnnnnnnnnnnnnnnnnnnnnnnnnnnnnnnnnnnnnnnnnnnnnnnnnnnnnnnnnnnnnnnnnnnnnnnnnnnnnnnnnnnnnnnnnnnnnnnnnnnnnnnnnnnnnnnnnnnnnnnnnnnnnnnnnnnnnnnnnnnnnnnnnnnnnnnnnnnnnnnnnnnnnnnnnnnnnnnnnnnnnnnnnnnnnnnnnnnnnnnnnnnnnnnnnnnnnnnnnnnnnnnnnnnnnnnnnnnnnnnnnnnnnnnnnnnnnnnnnnnnnnnnnnnnnnnnnnnnnnnnnnnnnnnnnnnnnnnnnnnnnnnnnnnnnnnnnnnnnnnnnnnnnnnnnnnnnnnnnnnnnnnnnnnnnnnnnnnnnnnnnnnnnnnnnnnnnnnnnnnnnnnnnnnnnnnnnnnnnnnnnnnnnnnnnnnnnnnnnnnnnnnnnnnnnnnnnnnnnnnnnnnnnnnnnnnnnnnnnnnnnnnnnnnnnnnnnnnnnnnnnnnnnnnnnnnnnnnnnnnnnnnnnnnnnnnnnnnnnnnnnnnnnnnnnnnnnnnnnnnnnnnnnnnnnnnnnnnnnnnnnnnnnnnnnnnnnnnnnnnnnnnnnnnnnnnnnnnnnnnnnnnnnnnnnnnnnnnnnnnnnnnnnnnnnnnnnnnnnnnnnnnnnnnnnnnnnnnnnnnnnnnnnnnnnnnnnnnnnnnnnnnnnnnnnnnnnnnnnnnnnnnnnnnnnnnnnnnnnnnnnnnnnnnnnnnnnnnnnnnnnnnnnnnnnnnnnnnnnnnnnnnnnnnnnnnnnnnnnnnnnnnnnnnnnnnnnnnnnnnnnnnnnnnnnnnnnnnnnnnnnnnnnnnnnnnnnnnnnnnnnnnnnnnnnnnnnnnnnnnnnnnnnnnnnnnnnnnnnnnnnnnnnnnnnnnnnnnnnnnnnnnnnnnnnnnnnnnnnnnnnnnnnnnnnnnnnnnnnnnnnnnnnnnnnnnnnnnnnnnnnnnnnnnnnnnnnnnnnnnnnnnnnnnnnnnnnnnnnnnnnnnnnnnnnnnnnnnnnnnnnnnnnnnnnnnnnnnnnnnnnnnnnnnnnnnnnnnnnnnnnnnnnnnnnnnnnnnnnnnnnnnnnnnnnnnnnnnnnnnnnnnnnnnnnnnnnnnnnnnnnnnnnnnnnnnnnnnnnnnnnnnnnnnnnnnnnnnnnnnnnnnnnnnnnnnnnnnnnnnnnnnnnnnnnnnnnnnnnnnnnnnnnnnnnnnnnnnnnnnnnnnnnnnnnnnnnnnnnnnnnnnnnnnnnnnnnnnnnnnnnnnnnnnnnnnnnnnnnnnnnnnnnnnnnnnnnnnnnnnnnnnnnnnnnnnnnnnnnnnnnnnnnnnnnnnnnnnnnnnnnnnnnnnnnnnnnnnnnnnnnnnnnnnnnnnnnnnnnnnnnnnnnnnnnnnnnnnnnnnnnnnnnnnnnnnnnnnnnnnnnnnnnnnnnnnnnnnnnnnnnnnnnnnnnnnnnnnnnnnnnnnnnnnnnnnnnnnnnnnnnnnnnnnnnnnnnnnnnnnnnnnnnnnnnnnnnnnnnnnnnnnnnnnnnnnnnnnnnnnnnnnnnnnnnnnnnnnnnnnnnnnnnnnnnnnnnnnnnnnnnnnnnnnnnnnnnnnnnnnnnnnnnnnnnnnnnnnnnnnnnnnnnnnnnnnnnnnnnnnnnnnnnnnnnnnnnnnnnnnnnnnnnnnnnnnnnnnnnnnnnnnnnnnnnnnnnnnnnnnnnnnnnnnnnnnnnnnnnnnnnnnnnnnnnnnnnnnnnnnnnnnnnnnnnnnnnnnnnnnnnnnnnnnnnnnnnnnnnnnnnnnnnnnnnnnnnnnnnnnnnnnnnnnnnnnnnnnnnnnnnnnnnnnnnnnnnnnnnnnnnnnnnnnnnnnnnnnnnnnnnnnnnnnnnnnnnnnnnnnnnnnnnnnnnnnnnnnnnnnnnnnnnnnnnnnnnnnnnnnnnnnnnnnnnnnnnnnnnnnnnnnnnnnnnnnnnnnnnnnnnnnnnnnnnnnnnnnnnnnnnnnnnnnnnnnnnnnnnnnnnnnnnnnnnnnnnnnnnnnnnnnnnnnnnnnnnnnnnnnnnnnnnnnnnnnnnnnnnnnnnnnnnnnnnnnnnnnnnnnnnnnnnnnnnnnnnnnnnnnnnnnnnnnnnnnnnnnnnnnnnnnnnnnnnnnnnnnnnnnnnnnnnnnnnnnnnnnnnnnnnnnnnnnnnnnnnnnnnnnnnnnnnnnnnnnnnnnnnnnnnnnnnnnnnnnnnnnnnnnnnnnnnnnnnnnnnnnnnnnnnnnnnnnnnnnnnnnnnnnnnnnnnnnnnnnnnnnnnnnnnnnnnnnnnnnnnnnnnnnnnnnnnnnnnnnnnnnnnnnnnnnnnnnnnnnnnnnnnnnnnnnnnnnnnnnnnnnnnnnnnnnnnnnnnnnnnnnnnnnnnnnnnnnnnnnnnnnnnnnnnnnnnnnnnnnnnnnnnnnnnnnnnnnnnnnnnnnnnnnnnnnnnnnnnnnnnnnnnnnnnnnnnnnnnnnnnnnnnnnnnnnnnnnnnnnnnnnnnnnnnnnnnnnnnnnnnnnnnnnnnnnnnnnnnnnnnnnnnnnnnnnnnnnnnnnnnnnnnnnnnnnnnnnnnnnnnnnnnnnnnnnnnnnnnnnnnnnnnnnnnnnnnnnnnnnnnnnnnnnnnnnnnnnnnnnnnnnnnnnnnnnnnnnnnnnnnnnnnnnnnnnnnnnnnnnnnnnnnnnnnnnnnnnnnnnnnnnnnnnnnnnnnnnnnnnnnnnnnnnnnnnnnnnnnnnnnnnnnnnnnnnnnnnnnnnnnnnnnnnnnnnnnnnnnnnnnnnnnnnnnnnnnnnnnnnnnnnnnnnnnnnnnnnnnnnnnnnnnnnnnnnnnnnnnnnnnnnnnnnnnnnnnnnnnnnnnnnnnnnnnnnnnnnnnnnnnnnnnnnnnnnnnnnnnnnnnnnnnnnnnnnnnnnnnnnnnnnnnnnnnnnnnnnnnnnnnnnnnnnnnnnnnnnnnnnnnnnnnnnnnnnnnnnnnnnnnnnnnnnnnnnnnnnnnnnnnnnnnnnnnnnnnnnnnnnnnnnnnnnnnnnnnnnnnnnnnnnnnnnnnnnnnnnnnnnnnnnnnnnnnnnnnnnnnnnnnnnnnnnnnnnnnnnnnnnnnnnnnnnnnnnnnnnnnnnnnnnnnnnnnnnnnnnnnnnnnnnnnnnnnnnnnnnnnnnnnnnnnnnnnnnnnnnnnnnnnnnnnnnnnnnnnnnnnnnnnnnnnnnnnnnnnnnnnnnnnnnnnnnnnnnnnnnnnnnnnnnnnnnnnnnnnnnnnnnnnnnnnnnnnnnnnnnnnnnnnnnnnnnnnnnnnnnnnnnnnnnnnnnnnnnnnnnnnnnnnnnnnnnnnnnnnnnnnnnnnnnnnnnnnnnnnnnnnnnnnnnnnnnnnnnnnnnnnnnnnnnnnnnnnnnnnnnnnnnnnnnnnnnnnnnnnnnnnnnnnnnnnnnnnnnnnnnnnnnnnnnnnnnnnnnnnnnnnnnnnnnnnnnnnnnnnnnnnnnnnnnnnnnnnnnnnnnnnnnnnnnnnnnnnnnnnnnnnnnnnnnnnnnnnnnnnnnnnnnnnnnnnnnnnnnnnnnnnnnnnnnnnnnnnnnnnnnnnnnnnnnnnnnnnnnnnnnnnnnnnnnnnnnnnnnnnnnnnnnnnnnnnnnnnnnnnnnnnnnnnnnnnnnnnnnnnnnnnnnnnnnnnnnnnnnnnnnnnnnnnnnnnnnnnnnnnnnnnnnnnnnnnnnnnnnnnnnnnnnnnnnnnnnnnnnnnnnnnnnnnnnnnnnnnnnnnnnnnnnnnnnnnnnnnnnnnnnnnnnnnnnnnnnnnnnnnnnnnnnnnnnnnnnnnnnnnnnnnnnnnnnnnnnnnnnnnnnnnnnnnnnnnnnnnnnnnnnnnnnnnnnnnnnnnnnnnnnnnnnnnnnnnnnnnnnnnnnnnnnnnnnnnnnnnnnnnnnnnnnnnnnnnnnnnnnnnnnnnnnnnnnnnnnnnnnnnnnnnnnnnnnnnnnnnnnnnnnnnnnnnnnnnnnnnnnnnnnnnnnnnnnnnnnnnnnnnnnnnnnnnnnnnnnnnnnnnnnnnnnnnnnnnnnnnnnnnnnnnnnnnnnnnnnnnnnnnnnnnnnnnnnnnnnnnnnnnnnnnnnnnnnnnnnnnnnnnnnnnnnnnnnnnnnnnnnnnnnnnnnnnnnnnnnnnnnnnnnnnnnnnnnnnnnnnnnnnnnnnnnnnnnnnnnnnnnnnnnnnnnnnnnnnnnnnnnnnnnnnnnnnnnnnnnnnnnnnnnnnnnnnnnnnnnnnnnnnnnnnnnnnnnnnnnnnnnnnnnnnnnnnnnnnnnnnnnnnnnnnnnnnnnnnnnnnnnnnnnnnnnnnnnnnnnnnnnnnnnnnnnnnnnnnnnnnnnnnnnnnnnnnnnnnnnnnnnnnnnnnnnnnnnnnnnnnnnnnnnnnnnnnnnnnnnnnnnnnnnnnnnnnnnnnnnnnnnnnnnnnnnnnnnnnnnnnnnnnnnnnnnnnnnnnnnnnnnnnnnnnnnnnnnnnnnnnnnnnnnnnnnnnnnnnnnnnnnnnnnnnnnnnnnnnnnnnnnnnnnnnnnnnnnnnnnnnnnnnnnnnnnnnnnnnnnnnnnnnnnnnnnnnnnnnnnnnnnnnnnnnnnnnnnnnnnnnnnnnnnnnnnnnnnnnnnnnnnnnnnnnnnnnnnnnnnnnnnnnnnnnnnnnnnnnnnnnnnnnnnnnnnnnnnnnnnnnnnnnnnnnnnnnnnnnnnnnnnnnnnnnnnnnnnnnnnnnnnnnnnnnnnnnnnnnnnnnnnnnnnnnnnnnnnnnnnnnnnnnnnnnnnnnnnnnnnnnnnnnnnnnnnnnnnnnnnnnnnnnnnnnnnnnnnnnnnnnnnnnnnnnnnnnnnnnnnnnnnnnnnnnnnnnnnnnnnnnnnnnnnnnnnnnnnnnnnnnnnnnnnnnnnnnnnnnnnnnnnnnnnnnnnnnnnnnnnnnnnnnnnnnnnnnnnnnnnnnnnnnnnnnnnnnnnnnnnnnnnnnnnnnnnnnnnnnnnnnnnnnnnnnnnnnnnnnnnnnnnnnnnnnnnnnnnnnnnnnnnnnnnnnnnnnnnnnnnnnnnnnnnnnnnnnnnnnnnnnnnnnnnnnnnnnnnnnnnnnnnnnnnnnnnnnnnnnnnnnnnnnnnnnnnnnnnnnnnnnnnnnnnnnnnnnnnnnnnnnnnnnnnnnnnnnnnnnnnnnnnnnnnnnnnnnnnnnnnnnnnnnnnnnnnnnnnnnnnnnnnnnnnnnnnnnnnnnnnnnnnnnnnnnnnnnnnnnnnnnnnnnnnnnnnnnnnnnnnnnnnnnnnnnnnnnnnnnnnnnnnnnnnnnnnnnnnnnnnnnnnnnnnnnnnnnnnnnnnnnnnnnnnnnnnnnnnnnnnnnnnnnnnnnnnnnnnnnnnnnnnnnnnnnnnnnnnnnnnnnnnnnnnnnnnnnnnnnnnnnnnnnnnnnnnnnnnnnnnnnnnnnnnnnnnnnnnnnnnnnnnnnnnnnnnnnnnnnnnnnnnnnnnnnnnnnnnnnnnnnnnnnnnnnnnnnnnnnnnnnnnnnnnnnnnnnnnnnnnnnnnnnnnnnnnnnnnnnnnnnnnnnnnnnnnnnnnnnnnnnnnnnnnnnnnnnnnnnnnnnnnnnnnnnnnnnnnnnnnnnnnnnnnnnnnnnnnnnnnnnnnnnnnnnnnnnnnnnnnnnnnnnnnnnnnnnnnnnnnnnnnnnnnnnnnnnnnnnnnnnnnnnnnnnnnnnnnnnnnnnnnnnnnnnnnnnnnnnnnnnnnnnnnnnnnnnnnnnnnnnnnnnnnnnnnnnnnnnnnnnnnnnnnnnnnnnnnnnnnnnnnnnnnnnnnnnnnnnnnnnnnnnnnnnnnnnnnnnnnnnnnnnnnnnnnnnnnnnnnnnnnnnnnnnnnnnnnnnnnnnnnnnnnnnnnnnnnnnnnnnnnnnnnnnnnnnnnnnnnnnnnnnnnnnnnnnnnnnnnnnnnnnnnnnnnnnnnnnnnnnnnnnnnnnnnnnnnnnnnnnnnnnnnnnnnnnnnnnnnnnnnnnnnnnnnnnnnnnnnnnnnnnnnnnnnnnnnnnnnnnnnnnnnnnnnnnnnnnnnnnnnnnnnnnnnnnnnnnnnnnnnnnnnnnnnnnnnnnnnnnnnnnnnnnnnnnnnnnnnnnnnnnnnnnnnnnnnnnnnnnnnnnnnnnnnnnnnnnnnnnnnnnnnnnnnnnnnnnnnnnnnnnnnnnnnnnnnnnnnnnnnnnnnnnnnnnnnnnnnnnnnnnnnnnnnnnnnnnnnnnnnnnnnnnnnnnnnnnnnnnnnnnnnnnnnnnnnnnnnnnnnnnnnnnnnnnnnnnnnnnnnnnnnnnnnnnnnnnnnnnnnnnnnnnnnnnnnnnnnnnnnnnnnnnnnnnnnnnnnnnnnnnnnnnnnnnnnnnnnnnnnnnnnnnnnnnnnnnnnnnnnnnnnnnnnnnnnnnnnnnnnnnnnnnnnnnnnnnnnnnnnnnnnnnnnnnnnnnnnnnnnnnnnnnnnnnnnnnnnnnnnnnnnnnnnnnnnnnnnnnnnnnnnnnnnnnnnnnnnnnnnnnnnnnnnnnnnnnnnnnnnnnnnnnnnnnnnnnnnnnnnnnnnnnnnnnnnnnnnnnnnnnnnnnnnnnnnnnnnnnnnnnnnnnnnnnnnnnnnnnnnnnnnnnnnnnnnnnnnnnnnnnnnnnnnnnnnnnnnnnnnnnnnnnnnnnnnnnnnnnnnnnnnnnnnnnnnnnnnnnnnnnnnnnnnnnnnnnnnnnnnnnnnnnnnnnnnnnnnnnnnnnnnnnnnnnnnnnnnnnnnnnnnnnnnnnnnnnnnnnnnnnnnnnnnnnnnnnnnnnnnnnnnnnnnnnnnnnnnnnnnnnnnnnnnnnnnnnnnnnnnnnnnnnnnnnnnnnnnnnnnnnnnnnnnnnnnnnnnnnnnnnnnnnnnnnnnnnnnnnnnnnnnnnnnnnnnnnnnnnnnnnnnnnnnnnnnnnnnnnnnnnnnnnnnnnnnnnnnnnnnnnnnnnnnnnnnnnnnnnnnnnnnnnnnnnnnnnnnnnnnnnnnnnnnnnnnnnnnnnnnnnnnnnnnnnnnnnnnnnnnnnnnnnnnnnnnnnnnnnnnnnnnnnnnnnnnnnnnnnnnnnnnnnnnnnnnnnnnnnnnnnnnnnnnnnnnnnnnnnnnnnnnnnnnnnnnnnnnnnnnnnnnnnnnnnnnnnnnnnnnnnnnnnnnnnnnnnnnnnnnnnnnnnnnnnnnnnnnnnnnnnnnnnnnnnnnnnnnnnnnnnnnnnnnnnnnnnnnnnnnnnnnnnnnnnnnnnnnnnnnnnnnnnnnnnnnnnnnnnnnnnnnnnnnnnnnnnnnnnnnnnnnnnnnnnnnnnnnnnnnnnnnnnnnnnnnnnnnnnnnnnnnnnnnnnnnnnnnnnnnnnnnnnnnnnnnnnnnnnnnnnnnnnnnnnnnnnnnnnnnnnnnnnnnnnnnnnnnnnnnnnnnnnnnnnnnnnnnnnnnnnnnnnnnnnnnnnnnnnnnnnnnnnnnnnnnnnnnnnnnnnnnnnnnnnnnnnnnnnnnnnnnnnnnnnnnnnnnnnnnnnnnnnnnnnnnnnnnnnnnnnnnnnnnnnnnnnnnnnnnnnnnnnnnnnnnnnnnnnnnnnnnnnnnnnnnnnnnnnnnnnnnnnnnnnnnnnnnnnnnnnnnnnnnnnnnnnnnnnnnnnnnnnnnnnnnnnnnnnnnnnnnnnnnnnnnnnnnnnnnnnnnnnnnnnnnnnnnnnnnnnnnnnnnnnnnnnnnnnnnnnnnnnnnnnnnnnnnnnnnnnnnnnnnnnnnnnnnnnnnnnnnnnnnnnnnnnnnnnnnnnnnnnnnnnnnnnnnnnnnnnnnnnnnnnnnnnnnnnnnnnnnnnnnnnnnnnnnnnnnnnnnnnnnnnnnnnnnnnnnnnnnnnnnnnnnnnnnnnnnnnnnnnnnnnnnnnnnnnnnnnnnnnnnnnnnnnnnnnnnnnnnnnnnnnnnnnnnnnnnnnnnnnnnnnnnnnnnnnnnnnnnnnnnnnnnnnnnnnnnnnnnnnnnnnnnnnnnnnnnnnnnnnnnnnnnnnnnnnnnnnnnnnnnnnnnnnnnnnnnnnnnnnnnnnnnnnnnnnnnnnnnnnnnnnnnnnnnnnnnnnnnnnnnnnnnnnnnnnnnnnnnnnnnnnnnnnnnnnnnnnnnnnnnnnnnnnnnnnnnnnnnnnnnnnnnnnnnnnnnnnnnnnnnnnnnnnnnnnnnnnnnnnnnnnnnnnnnnnnnnnnnnnnnnnnnnnnnnnnnnnnnnnnnnnnnnnnnnnnnnnnnnnnnnnnnnnnnnnnnnnnnnnnnnnnnnnnnnnnnnnnnnnnnnnnnnnnnnnnnnnnnnnnnnnnnnnnnnnnnnnnnnnnnnnnnnnnnnnnnnnnnnnnnnnnnnnnnnnnnnnnnnnnnnnnnnnnnnnnnnnnnnnnnnnnnnnnnnnnnnnnnnnnnnnnnnnnnnnnnnnnnnnnnnnnnnnnnnnnnnnnnnnnnnnnnnnnnnnnnnnnnnnnnnnnnnnnnnnnnnnnnnnnnnnnnnnnnnnnnnnnnnnnnnnnnnnnnnnnnnnnnnnnnnnnnnnnnnnnnnnnnnnnnnnnnnnnnnnnnnnnnnnnnnnnnnnnnnnnnnnnnnnnnnnnnnnnnnnnnnnnnnnnnnnnnnnnnnnnnnnnnnnnnnnnnnnnnnnnnnnnnnnnnnnnnnnnnnnnnnnnnnnnnnnnnnnnnnnnnnnnnnnnnnnnnnnnnnnnnnnnnnnnnnnnnnnnnnnnnnnnnnnnnnnnnnnnnnnnnnnnnnnnnnnnnnnnnnnnnnnnnnnnnnnnnnnnnnnnnnnnnnnnnnnnnnnnnnnnnnnnnnnnnnnnnnnnnnnnnnnnnnnnnnnnnnnnnnnnnnnnnnnnnnnnnnnnnnnnnnnnnnnnnnnnnnnnnnnnnnnnnnnnnnnnnnnnnnnnnnnnnnnnnnnnnnnnnnnnnnnnnnnnnnnnnnnnnnnnnnnnnnnnnnnnnnnnnnnnnnnnnnnnnnnnnnnnnnnnnnnnnnnnnnnnnnnnnnnnnnnnnnnnnnnnnnnnnnnnnnnnnnnnnnnnnnnnnnnnnnnnnnnnnnnnnnnnnnnnnnnnnnnnnnnnnnnnnnnnnnnnnnnnnnnnnnnnnnnnnnnnnnnnnnnnnnnnnnnnnnnnnnnnnnnnnnnnnnnnnnnnnnnnnnnnnnnnnnnnnnnnnnnnnnnnnnnnnnnnnnnnnnnnnnnnnnnnnnnnnnnnnnnnnnnnnnnnnnnnnnnnnnnnnnnnnnnnnnnnnnnnnnnnnnnnnnnnnnnnnnnnnnnnnnnnnnnnnnnnnnnnnnnnnnnnnnnnnnnnnnnnnnnnnnnnnnnnnnnnnnnnnnnnnnnnnnnnnnnnnnnnnnnnnnnnnnnnnnnnnnnnnnnnnnnnnnnnnnnnnnnnnnnnnnnnnnnnnnnnnnnnnnnnnnnnnnnnnnnnnnnnnnnnnnnnnnnnnnnnnnnnnnnnnnnnnnnnnnnnnnnnnnnnnnnnnnnnnnnnnnnnnnnnnnnnnnnnnnnnnnnnnnnnnnnnnnnnnnnnnnnnnnnnnnnnnnnnnnnnnnnnnnnnnnnnnnnnnnnnnnnnnnnnnnnnnnnnnnnnnnnnnnnnnnnnnnnnnnnnnnnnnnnnnnnnnnnnnnnnnnnnnnnnnnnnnnnnnnnnnnnnnnnnnnnnnnnnnnnnnnnnnnnnnnnnnnnnnnnnnnnnnnnnnnnnnnnnnnnnnnnnnnnnnnnnnnnnnnnnnnnnnnnnnnnnnnnnnnnnnnnnnnnnnnnnnnnnnnnnnnnnnnnnnnnnnnnnnnnnnnnnnnnnnnnnnnnnnnnnnnnnnnnnnnnnnnnnnnnnnnnnnnnnnnnnnnnnnnnnnnnnnnnnnnnnnnnnnnnnnnnnnnnnnnnnnnnnnnnnnnnnnnnnnnnnnnnnnnnnnnnnnnnnnnnnnnnnnnnnnnnnnnnnnnnnnnnnnnnnnnnnnnnnnnnnnnnnnnnnnnnnnnnnnnnnnnnnnnnnnnnnnnnnnnnnnnnnnnnnnnnnnnnnnnnnnnnnnnnnnnnnnnnnnnnnnnnnnnnnnnnnnnnnnnnnnnnnnnnnnnnnnnnnnnnnnnnnnnnnnnnnnnnnnnnnnnnnnnnnnnnnnnnnnnnnnnnnnnnnnnnnnnnnnnnnnnnnnnnnnnnnnnnnnnnnnnnnnnnnnnnnnnnnnnnnnnnnnnnnnnnnnnnnnnnnnnnnnnnnnnnnnnnnnnnnnnnnnnnnnnnnnnnnnnnnnnnnnnnnnnnnnnnnnnnnnnnnnnnnnnnnnnnnnnnnnnnnnnnnnnnnnnnnnnnnnnnnnnnnnnnnnnnnnnnnnnnnnnnnnnnnnnnnnnnnnnnnnnnnnnnnnnnnnnnnnnnnnnnnnnnnnnnnnnnnnnnnnnnnnnnnnnnnnnnnnnnnnnnnnnnnnnnnnnnnnnnnnnnnnnnnnnnnnnnnnnnnnnnnnnnnnnnnnnnnnnnnnnnnnnnnnnnnnnnnnnnnnnnnnnnnnnnnnnnnnnnnnnnnnnnnnnnnnnnnnnnnnnnnnnnnnnnnnnnnnnnnnnnnnnnnnnnnnnnnnnnnnnnnnnnnnnnnnnnnnnnnnnnnnnnnnnnnnnnnnnnnnnnnnnnnnnnnnnnnnnnnnnnnnnnnnnnnnnnnnnnnnnnnnnnnnnnnnnnnnnnnnnnnnnnnnnnnnnnnnnnnnnnnnnnnnnnnnnnnnnnnnnnnnnnnnnnnnnnnnnnnnnnnnnnnnnnnnnnnnnnnnnnnnnnnnnnnnnnnnnnnnnnnnnnnnnnnnnnnnnnnnnnnnnnnnnnnnnnnnnnnnnnnnnnnnnnnnnnnnnnnnnnnnnnnnnnnnnnnnnnnnnnnnnnnnnnnnnnnnnnnnnnnnnnnnnnnnnnnnnnnnnnnnnnnnnnnnnnnnnnnnnnnnnnnnnnnnnnnnnnnnnnnnnnnnnnnnnnnnnnnnnnnnnnnnnnnnnnnnnnnnnnnnnnnnnnnnnnnnnnnnnnnnnnnnnnnnnnnnnnnnnnnnnnnnnnnnnnnnnnnnnnnnnnnnnnnnnnnnnnnnnnnnnnnnnnnnnnnnnnnnnnnnnnnnnnnnnnnnnnnnnnnnnnnnnnnnnnnnnnnnnnnnnnnnnnnnnnnnnnnnnnnnnnnnnnnnnnnnnnnnnnnnnnnnnnnnnnnnnnnnnnnnnnnnnnnnnnnnnnnnnnnnnnnnnnnnnnnnnnnnnnnnnnnnnnnnnnnnnnnnnnnnnnnnnnnnnnnnnnnnnnnnnnnnnnnnnnnnnnnnnnnnnnnnnnnnnnnnnnnnnnnnnnnnnnnnnnnnnnnnnnnnnnnnnnnnnnnnnnnnnnnnnnnnnnnnnnnnnnnnnnnnnnnnnnnnnnnnnnnnnnnnnnnnnnnnnnnnnnnnnnnnnnnnnnnnnnnnnnnnnnnnnnnnnnnnnnnnnnnnnnnnnnnnnnnnnnnnnnnnnnnnnnnnnnnnnnnnnnnnnnnnnnnnnnnnnnnnnnnnnnnnnnnnnnnnnnnnnnnnnnnnnnnnnnnnnnnnnnnnnnnnnnnnnnnnnnnnnnnnnnnnnnnnnnnnnnnnnnnnnnnnnnnnnnnnnnnnnnnnnnnnnnnnnnnnnnnnnnnnnnnnnnnnnnnnnnnnnnnnnnnnnnnnnnnnnnnnnnnnnnnnnnnnnnnnnnnnnnnnnnnnnnnnnnnnnnnnnnnnnnnnnnnnnnnnnnnnnnnnnnnnnnnnnnnnnnnnnnnnnnnnnnnnnnnnnnnnnnnnnnnnnnnnnnnnnnnnnnnnnnnnnnnnnnnnnnnnnnnnnnnnnnnnnnnnnnnnnnnnnnnnnnnnnnnnnnnnnnnnnnnnnnnnnnnnnnnnnnnnnnnnnnnnnnnnnnnnnnnnnnnnnnnnnnnnnnnnnnnnnnnnnnnnnnnnnnnnnnnnnnnnnnnnnnnnnnnnnnnnnnnnnnnnnnnnnnnnnnnnnnnnnnnnnnnnnnnnnnnnnnnnnnnnnnnnnnnnnnnnnnnnnnnnnnnnnnnnnnnnnnnnnnnnnnnnnnnnnnnnnnnnnnnnnnnnnnnnnnnnnnnnnnnnnnnnnnnnnnnnnnnnnnnnnnnnnnnnnnnnnnnnnnnnnnnnnnnnnnnnnnnnnnnnnnnnnnnnnnnnnnnnnnnnnnnnnnnnnnnnnnnnnnnnnnnnnnnnnnnnnnnnnnnnnnnnnnnnnnnnnnnnnnnnnnnnnnnnnnnnnnnnnnnnnnnnnnnnnnnnnnnnnnnnnnnnnnnnnnnnnnnnnnnnnnnnnnnnnnnnnnnnnnnnnnnnnnnnnnnnnnnnnnnnnnnnnnnnnnnnnnnnnnnnnnnnnnnnnnnnnnnnnnnnnnnnnnnnnnnnnnnnnnnnnnnnnnnnnnnnnnnnnnnnnnnnnnnnnnnnnnnnnnnnnnnnnnnnnnnnnnnnnnnnnnnnnnnnnnnnnnnnnnnnnnnnnnnnnnnnnnnnnnnnnnnnnnnnnnnnnnnnnnnnnnnnnnnnnnnnnnnnnnnnnnnnnnnnnnnnnnnnnnnnnnnnnnnnnnnnnnnnnnnnnnnnnnnnnnnnnnnnnnnnnnnnnnnnnnnnnnnnnnnnnnnnnnnnnnnnnnnnnnnnnnnnnnnnnnnnnnnnnnnnnnnnnnnnnnnnnnnnnnnnnnnnnnnnnnnnnnnnnnnnnnnnnnnnnnnnnnnnnnnnnnnnnnnnnnnnnnnnnnnnnnnnnnnnnnnnnnnnnnnnnnnnnnnnnnnnnnnnnnnnnnnnnnnnnnnnnnnnnnnnnnnnnnnnnnnnnnnnnnnnnnnnnnnnnnnnnnnnnnnnnnnnnnnnnnnnnnnnnnnnnnnnnnnnnnnnnnnnnnnnnnnnnnnnnnnnnnnnnnnnnnnnnnnnnnnnnnnnnnnnnnnnnnnnnnnnnnnnnnnnnnnnnnnnnnnnnnnnnnnnnnnnnnnnnnnnnnnnnnnnnnnnnnnnnnnnnnnnnnnnnnnnnnnnnnnnnnnnnnnnnnnnnnnnnnnnnnnnnnnnnnnnnnnnnnnnnnnnnnnnnnnnnnnnnnnnnnnnnnnnnnnnnnnnnnnnnnnnnnnnnnnnnnnnnnnnnnnnnnnnnnnnnnnnnnnnnnnnnnnnnnnnnnnnnnnnnnnnnnnnnnnnnnnnnnnnnnnnnnnnnnnnnnnnnnnnnnnnnnnnnnnnnnnnnnnnnnnnnnnnnnnnnnnnnnnnnnnnnnnnnnnnnnnnnnnnnnnnnnnnnnnnnnnnnnnnnnnnnnnnnnnnnnnnnnnnnnnnnnnnnnnnnnnnnnnnnnnnnnnnnnnnnnnnnnnnnnnnnnnnnnnnnnnnnnnnnnnnnnnnnnnnnnnnnnnnnnnnnnnnnnnnnnnnnnnnnnnnnnnnnnnnnnnnnnnnnnnnnnnnnnnnnnnnnnnnnnnnnnnnnnnnnnnnnnnnnnnnnnnnnnnnnnnnnnnnnnnnnnnnnnnnnnnnnnnnnnnnnnnnnnnnnnnnnnnnnnnnnnnnnnnnnnnnnnnnnnnnnnnnnnnnnnnnnnnnnnnnnnnnnnnnnnnnnnnnnnnnnnnnnnnnnnnnnnnnnnnnnnnnnnnnnnnnnnnnnnnnnnnnnnnnnnnnnnnnnnnnnnnnnnnnnnnnnnnnnnnnnnnnnnnnnnnnnnnnnnnnnnnnnnnnnnnnnnnnnnnnnnnnnnnnnnnnnnnnnnnnnnnnnnnnnnnnnnnnnnnnnnnnnnnnnnnnnnnnnnnnnnnnnnnnnnnnnnnnnnnnnnnnnnnnnnnnnnnnnnnnnnnnnnnnnnnnnnnnnnnnnnnnnnnnnnnnnnnnnnnnnnnnnnnnnnnnnnnnnnnnnnnnnnnnnnnnnnnnnnnnnnnnnnnnnnnnnnnnnnnnnnnnnnnnnnnnnnnnnnnnnnnnnnnnnnnnnnnnnnnnnnnnnnnnnnnnnnnnnnnnnnnnnnnnnnnnnnnnnnnnnnnnnnnnnnnnnnnnnnnnnnnnnnnnnnnnnnnnnnnnnnnnnnnnnnnnnnnnnnnnnnnnnnnnnnnnnnnnnnnnnnnnnnnnnnnnnnnnnnnnnnnnnnnnnnnnnnnnnnnnnnnnnnnnnnnnnnnnnnnnnnnnnnnnnnnnnnnnnnnnnnnnnnnnnnnnnnnnnnnnnnnnnnnnnnnnnnnnnnnnnnnnnnnnnnnnnnnnnnnnnnnnnnnnnnnnnnnnnnnnnnnnnnnnnnnnnnnnnnnnnnnnnnnnnnnnnnnnnnnnnnnnnnnnnnnnnnnnnnnnnnnnnnnnnnnnnnnnnnnnnnnnnnnnnnnnnnnnnnnnnnnnnnnnnnnnnnnnnnnnnnnnnnnnnnnnnnnnnnnnnnnnnnnnnnnnnnnnnnnnnnnnnnnnnnnnnnnnnnnnnnnnnnnnnnnnnnnnnnnnnnnnnnnnnnnnnnnnnnnnnnnnnnnnnnnnnnnnnnnnnnnnnnnnnnnnnnnnnnnnnnnnnnnnnnnnnnnnnnnnnnnnnnnnnnnnnnnnnnnnnnnnnnnnnnnnnnnnnnnnnnnnnnnnnnnnnnnnnnnnnnnnnnnnnnnnnnnnnnnnnnnnnnnnnnnnnnnnnnnnnnnnnnnnnnnnnnnnnnnnnnnnnnnnnnnnnnnnnnnnnnnnnnnnnnnnnnnnnnnnnnnnnnnnnnnnnnnnnnnnnnnnnnnnnnnnnnnnnnnnnnnnnnnnnnnnnnnnnnnnnnnnnnnnnnnnnnnnnnnnnnnnnnnnnnnnnnnnnnnnnnnnnnnnnnnnnnnnnnnnnnnnnnnnnnnnnnnnnnnnnnnnnnnnnnnnnnnnnnnnnnnnnnnnnnnnnnnnnnnnnnnnnnnnnnnnnnnnnnnnnnnnnnnnnnnnnnnnnnnnnnnnnnnnnnnnnnnnnnnnnnnnnnnnnnnnnnnnnnnnnnnnnnnnnnnnnnnnnnnnnnnnnnnnnnnnnnnnnnnnnnnnnnnnnnnnnnnnnnnnnnnnnnnnnnnnnnnnnnnnnnnnnnnnnnnnnnnnnnnnnnnnnnnnnnnnnnnnnnnnnnnnnnnnnnnnnnnnnnnnnnnnnnnnnnnnnnnnnnnnnnnnnnnnnnnnnnnnnnnnnnnnnnnnnnnnnnnnnnnnnnnnnnnnnnnnnnnnnnnnnnnnnnnnnnnnnnnnnnnnnnnnnnnnnnnnnnnnnnnnnnnnnnnnnnnnnnnnnnnnnnnnnnnnnnnnnnnnnnnnnnnnnnnnnnnnnnnnnnnnnnnnnnnnnnnnnnnnnnnnnnnnnnnnnnnnnnnnnnnnnnnnnnnnnnnnnnnnnnnnnnnnnnnnnnnnnnnnnnnnnnnnnnnnnnnnnnnnnnnnnnnnnnnnnnnnnnnnnnnnnnnnnnnnnnnnnnnnnnnnnnnnnnnnnnnnnnnnnnnnnnnnnnnnnnnnnnnnnnnnnnnnnnnnnnnnnnnnnnnnnnnnnnnnnnnnnnnnnnnnnnnnnnnnnnnnnnnnnnnnnnnnnnnnnnnnnnnnnnnnnnnnnnnnnnnnnnnnnnnnnnnnnnnnnnnnnnnnnnnnnnnnnnnnnnnnnnnnnnnnnnnnnnnnnnnnnnnnnnnnnnnnnnnnnnnnnnnnnnnnnnnnnnnnnnnnnnnnnnnnnnnnnnnnnnnnnnnnnnnnnnnnnnnnnnnnnnnnnnnnnnnnnnnnnnnnnnnnnnnnnnnnnnnnnnnnnnnnnnnnnnnnnnnnnnnnnnnnnnnnnnnnnnnnnnnnnnnnnnnnnnnnnnnnnnnnnnnnnnnnnnnnnnnnnnnnnnnnnnnnnnnnnnnnnnnnnnnnnnnnnnnnnnnnnnnnnnnnnnnnnnnnnnnnnnnnnnnnnnnnnnnnnnnnnnnnnnnnnnnnnnnnnnnnnnnnnnnnnnnnnnnnnnnnnnnnnnnnnnnnnnnnnnnnnnnnnnnnnnnnnnnnnnnnnnnnnnnnnnnnnnnnnnnnnnnnnnnnnnnnnnnnnnnnnnnnnnnnnnnnnnnnnnnnnnnnnnnnnnnnnnnnnnnnnnnnnnnnnnnnnnnnnnnnnnnnnnnnnnnnnnnnnnnnnnnnnnnnnnnnnnnnnnnnnnnnnnnnnnnnnnnnnnnnnnnnnnnnnnnnnnnnnnnnnnnnnnnnnnnnnnnnnnnnnnnnnnnnnnnnnnnnnnnnnnnnnnnnnnnnnnnnnnnnnnnnnnnnnnnnnnnnnnnnnnnnnnnnnnnnnnnnnnnnnnnnnnnnnnnnnnnnnnnnnnnnnnnnnnnnnnnnnnnnnnnnnnnnnnnnnnnnnnnnnnnnnnnnnnnnnnnnnnnnnnnnnnnnnnnnnnnnnnnnnnnnnnnnnnnnnnnnnnnnnnnnnnnnnnnnnnnnnnnnnnnnnnnnnnnnnnnnnnnnnnnnnnnnnnnnnnnnnnnnnnnnnnnnnnnnnnnnnnnnnnnnnnnnnnnnnnnnnnnnnnnnnnnnnnnnnnnnnnnnnnnnnnnnnnnnnnnnnnnnnnnnnnnnnnnnnnnnnnnnnnnnnnnnnnnnnnnnnnnnnnnnnnnnnnnnnnnnnnnnnnnnnnnnnnnnnnnnnnnnnnnnnnnnnnnnnnnnnnnnnnnnnnnnnnnnnnnnnnnnnnnnnnnnnnnnnnnnnnnnnnnnnnnnnnnnnnnnnnnnnnnnnnnnnnnnnnnnnnnnnnnnnnnnnnnnnnnnnnnnnnnnnnnnnnnnnnnnnnnnnnnnnnnnnnnnnnnnnnnnnnnnnnnnnnnnnnnnnnnnnnnnnnnnnnnnnnnnnnnnnnnnnnnnnnnnnnnnnnnnnnnnnnnnnnnnnnnnnnnnnnnnnnnnnnnnnnnnnnnnnnnnnnnnnnnnnnnnnnnnnnnnnnnnnnnnnnnnnnnnnnnnnnnnnnnnnnnnnnnnnnnnnnnnnnnnnnnnnnnnnnnnnnnnnnnnnnnnnnnnnnnnnnnnnnnnnnnnnnnnnnnnnnnnnnnnnnnnnnnnnnnnnnnnnnnnnnnnnnnnnnnnnnnnnnnnnnnnnnnnnnnnnnnnnnnnnnnnnnnnnnnnnnnnnnnnnnnnnnnnnnnnnnnnnnnnnnnnnnnnnnnnnnnnnnnnnnnnnnnnnnnnnnnnnnnnnnnnnnnnnnnnnnnnnnnnnnnnnnnnnnnnnnnnnnnnnnnnnnnnnnnnnnnnnnnnnnnnnnnnnnnnnnnnnnnnnnnnnnnnnnnnnnnnnnnnnnnnnnnnnnnnnnnnnnnnnnnnnnnnnnnnnnnnnnnnnnnnnnnnnnnnnnnnnnnnnnnnnnnnnnnnnnnnnnnnnnnnnnnnnnnnnnnnnnnnnnnnnnnnnnnnnnnnnnnnnnnnnnnnnnnnnnnnnnnnnnnnnnnnnnnnnnnnnnnnnnnnnnnnnnnnnnnnnnnnnnnnnnnnnnnnnnnnnnnnnnnnnnnnnnnnnnnnnnnnnnnnnnnnnnnnnnnnnnnnnnnnnnnnnnnnnnnnnnnnnnnnnnnnnnnnnnnnnnnnnnnnnnnnnnnnnnnnnnnnnnnnnnnnnnnnnnnnnnnnnnnnnnnnnnnnnnnnnnnnnnnnnnnnnnnnnnnnnnnnnnnnnnnnnnnnnnnnnnnnnnnnnnnnnnnnnnnnnnnnnnnnnnnnnnnnnnnnnnnnnnnnnnnnnnnnnnnnnnnnnnnnnnnnnnnnnnnnnnnnnnnnnnnnnnnnnnnnnnnnnnnnnnnnnnnnnnnnnnnnnnnnnnnnnnnnnnnnnnnnnnnnnnnnnnnnnnnnnnnnnnnnnnnnnnnnnnnnnnnnnnnnnnnnnnnnnnnnnnnnnnnnnnnnnnnnnnnnnnnnnnnnnnnnnnnnnnnnnnnnnnnnnnnnnnnnnnnnnnnnnnnnnnnnnnnnnnnnnnnnnnnnnnnnnnnnnnnnnnnnnnnnnnnnnnnnnnnnnnnnnnnnnnnnnnnnnnnnnnnnnnnnnnnnnnnnnnnnnnnnnnnnnnnnnnnnnnnnnnnnnnnnnnnnnnnnnnnnnnnnnnnnnnnnnnnnnnnnnnnnnnnnnnnnnnnnnnnnnnnnnnnnnnnnnnnnnnnnnnnnnnnnnnnnnnnnnnnnnnnnnnnnnnnnnnnnnnnnnnnnnnnnnnnnnnnnnnnnnnnnnnnnnnnnnnnnnnnnnnnnnnnnnnnnnnnnnnnnnnnnnnnnnnnnnnnnnnnnnnnnnnnnnnnnnnnnnnnnnnnnnnnnnnnnnnnnnnnnnnnnnnnnnnnnnnnnnnnnnnnnnnnnnnnnnnnnnnnnnnnnnnnnnnnnnnnnnnnnnnnnnnnnnnnnnnnnnnnnnnnnnnnnnnnnnnnnnnnnnnnnnnnnnnnnnnnnnnnnnnnnnnnnnnnnnnnnnnnnnnnnnnnnnnnnnnnnnnnnnnnnnnnnnnnnnnnnnnnnnnnnnnnnnnnnnnnnnnnnnnnnnnnnnnnnnnnnnnnnnnnnnnnnnnnnnnnnnnnnnnnnnnnnnnnnnnnnnnnnnnnnnnnnnnnnnnnnnnnnnnnnnnnnnnnnnnnnnnnnnnnnnnnnnnnnnnnnnnnnnnnnnnnnnnnnnnnnnnnnnnnnnnnnnnnnnnnnnnnnnnnnnnnnnnnnnnnnnnnnnnnnnnnnnnnnnnnnnnnnnnnnnnnnnnnnnnnnnnnnnnnnnnnnnnnnnnnnnnnnnnnnnnnnnnnnnnnnnnnnnnnnnnnnnnnnnnnnnnnnnnnnnnnnnnnnnnnnnnnnnnnnnnnnnnnnnnnnnnnnnnnnnnnnnnnnnnnnnnnnnnnnnnnnnnnnnnnnnnnnnnnnnnnnnnnnnnnnnnnnnnnnnnnnnnnnnnnnnnnnnnnnnnnnnnnnnnnnnnnnnnnnnnnnnnnnnnnnnnnnnnnnnnnnnnnnnnnnnnnnnnnnnnnnnnnnnnnnnnnnnnnnnnnnnnnnnnnnnnnnnnnnnnnnnnnnnnnnnnnnnnnnnnnnnnnnnnnnnnnnnnnnnnnnnnnnnnnnnnnnnnnnnnnnnnnnnnnnnnnnnnnnnnnnnnnnnnnnnnnnnnnnnnnnnnnnnnnnnnnnnnnnnnnnnnnnnnnnnnnnnnnnnnnnnnnnnnnnnnnnnnnnnnnnnnnnnnnnnnnnnnnnnnnnnnnnnnnnnnnnnnnnnnnnnnnnnnnnnnnnnnnnnnnnnnnnnnnnnnnnnnnnnnnnnnnnnnnnnnnnnnnnnnnnnnnnnnnnnnnnnnnnnnnnnnnnnnnnnnnnnnnnnnnnnnnnnnnnnnnnnnnnnnnnnnnnnnnnnnnnnnnnnnnnnnnnnnnnnnnnnnnnnnnnnnnnnnnnnnnnnnnnnnnnnnnnnnnnnnnnnnnnnnnnnnnnnnnnnnnnnnnnnnnnnnnnnnnnnnnnnnnnnnnnnnnnnnnnnnnnnnnnnnnnnnnnnnnnnnnnnnnnnnnnnnnnnnnnnnnnnnnnnnnnnnnnnnnnnnnnnnnnnnnnnnnnnnnnnnnnnnnnnnnnnnnnnnnnnnnnnnnnnnnnnnnnnnnnnnnnnnnnnnnnnnnnnnnnnnnnnnnnnnnnnnnnnnnnnnnnnnnnnnnnnnnnnnnnnnnnnnnnnnnnnnnnnnnnnnnnnnnnnnnnnnnnnnnnnnnnnnnnnnnnnnnnnnnnnnnnnnnnnnnnnnnnnnnnnnnnnnnnnnnnnnnnnnnnnnnnnnnnnnnnnnnnnnnnnnnnnnnnnnnnnnnnnnnnnnnnnnnnnnnnnnnnnnnnnnnnnnnnnnnnnnnnnnnnnnnnnnnnnnnnnnnnnnnnnnnnnnnnnnnnnnnnnnnnnnnnnnnnnnnnnnnnnnnnnnnnnnnnnnnnnnnnnnnnnnnnnnnnnnnnnnnnnnnnnnnnnnnnnnnnnnnnnnnnnnnnnnnnnnnnnnnnnnnnnnnnnnnnnnnnnnnnnnnnnnnnnnnnnnnnnnnnnnnnnnnnnnnnnnnnnnnnnnnnnnnnnnnnnnnnnnnnnnnnnnnnnnnnnnnnnnnnnnnnnnnnnnnnnnnnnnnnnnnnnnnnnnnnnnnnnnnnnnnnnnnnnnnnnnnnnnnnnnnnnnnnnnnnnnnnnnnnnnnnnnnnnnnnnnnnnnnnnnnnnnnnnnnnnnnnnnnnnnnnnnnnnnnnnnnnnnnnnnnnnnnnnnnnnnnnnnnnnnnnnnnnnnnnnnnnnnnnnnnnnnnnnnnnnnnnnnnnnnnnnnnnnnnnnnnnnnnnnnnnnnnnnnnnnnnnnnnnnnnnnnnnnnnnnnnnnnnnnnnnnnnnnnnnnnnnnnnnnnnnnnnnnnnnnnnnnnnnnnnnnnnnnnnnnnnnnnnnnnnnnnnnnnnnnnnnnnnnnnnnnnnnnnnnnnnnnnnnnnnnnnnnnnnnnnnnnnnnnnnnnnnnnnnnnnnnnnnnnnnnnnnnnnnnnnnnnnnnnnnnnnnnnnnnnnnnnnnnnnnnnnnnnnnnnnnnnnnnnnnnnnnnnnnnnnnnnnnnnnnnnnnnnnnnnnnnnnnnnnnnnnnnnnnnnnnnnnnnnnnnnnnnnnnnnnnnnnnnnnnnnnnnnnnnnnnnnnnnnnnnnnnnnnnnnnnnnnnnnnnnnnnnnnnnnnnnnnnnnnnnnnnnnnnnnnnnnnnnnnnnnnnnnnnnnnnnnnnnnnnnnnnnnnnnnnnnnnnnnnnnnnnnnnnnnnnnnnnnnnnnnnnnnnnnnnnnnnnnnnnnnnnnnnnnnnnnnnnnnnnnnnnnnnnnnnnnnnnnnnnnnnnnnnnnnnnnnnnnnnnnnnnnnnnnnnnnnnnnnnnnnnnnnnnnnnnnnnnnnnnnnnnnnnnnnnnnnnnnnnnnnnnnnnnnnnnnnnnnnnnnnnnnnnnnnnnnnnnnnnnnnnnnnnnnnnnnnnnnnnnnnnnnnnnnnnnnnnnnnnnnnnnnnnnnnnnnnnnnnnnnnnnnnnnnnnnnnnnnnnnnnnnnnnnnnnnnnnnnnnnnnnnnnnnnnnnnnnnnnnnnnnnnnnnnnnnnnnnnnnnnnnnnnnnnnnnnnnnnnnnnnnnnnnnnnnnnnnnnnnnnnnnnnnnnnnnnnnnnnnnnnnnnnnnnnnnnnnnnnnnnnnnnnnnnnnnnnnnnnnnnnnnnnnnnnnnnnnnnnnnnnnnnnnnnnnnnnnnnnnnnnnnnnnnnnnnnnnnnnnnnnnnnnnnnnnnnnnnnnnnnnnnnnnnnnnnnnnnnnnnnnnnnnnnnnnnnnnnnnnnnnnnnnnnnnnnnnnnnnnnnnnnnnnnnnnnnnnnnnnnnnnnnnnnnnnnnnnnnnnnnnnnnnnnnnnnnnnnnnnnnnnnnnnnnnnnnnnnnnnnnnnnnnnnnnnnnnnnnnnnnnnnnnnnnnnnnnnnnnnnnnnnnnnnnnnnnnnnnnnnnnnnnnnnnnnnnnnnnnnnnnnnnnnnnnnnnnnnnnnnnnnnnnnnnnnnnnnnnnnnnnnnnnnnnnnnnnnnnnnnnnnnnnnnnnnnnnnnnnnnnnnnnnnnnnnnnnnnnnnnnnnnnnnnnnnnnnnnnnnnnnnnnnnnnnnnnnnnnnnnnnnnnnnnnnnnnnnnnnnnnnnnnnnnnnnnnnnnnnnnnnnnnnnnnnnnnnnnnnnnnnnnnnnnnnnnnnnnnnnnnnnnnnnnnnnnnnnnnnnnnnnnnnnnnnnnnnnnnnnnnnnnnnnnnnnnnnnnnnnnnnnnnnnnnnnnnnnnnnnnnnnnnnnnnnnnnnnnnnnnnnnnnnnnnnnnnnnnnnnnnnnnnnnnnnnnnnnnnnnnnnnnnnnnnnnnnnnnnnnnnnnnnnnnnnnnnnnnnnnnnnnnnnnnnnnnnnnnnnnnnnnnnnnnnnnnnnnnnnnnnnnnnnnnnnnnnnnnnnnnnnnnnnnnnnnnnnnnnnnnnnnnnnnnnnnnnnnnnnnnnnnnnnnnnnnnnnnnnnnnnnnnnnnnnnnnnnnnnnnnnnnnnnnnnnnnnnnnnnnnnnnnnnnnnnnnnnnnnnnnnnnnnnnnnnnnnnnnnnnnnnnnnnnnnnnnnnnnnnnnnnnnnnnnnnnnnnnnnnnnnnnnnnnnnnnnnnnnnnnnnnnnnnnnnnnnnnnnnnnnnnnnnnnnnnnnnnnnnnnnnnnnnnnnnnnnnnnnnnnnnnnnnnnnnnnnnnnnnnnnnnnnnnnnnnnnnnnnnnnnnnnnnnnnnnnnnnnnnnnnnnnnnnnnnnnnnnnnnnnnnnnnnnnnnnnnnnnnnnnnnnnnnnnnnnnnnnnnnnnnnnnnnnnnnnnnnnnnnnnnnnnnnnnnnnnnnnnnnnnnnnnnnnnnnnnnnnnnnnnnnnnnnnnnnnnnnnnnnnnnnnnnnnnnnnnnnnnnnnnnnnnnnnnnnnnnnnnnnnnnnnnnnnnnnnnnnnnnnnnnnnnnnnnnnnnnnnnnnnnnnnnnnnnnnnnnnnnnnnnnnnnnnnnnnnnnnnnnnnnnnnnnnnnnnnnnnnnnnnnnnnnnnnnnnnnnnnnnnnnnnnnnnnnnnnnnnnnnnnnnnnnnnnnnnnnnnnnnnnnnnnnnnnnnnnnnnnnnnnnnnnnnnnnnnnnnnnnnnnnnnnnnnnnnnnnnnnnnnnnnnnnnnnnnnnnnnnnnnnnnnnnnnnnnnnnnnnnnnnnnnnnnnnnnnnnnnnnnnnnnnnnnnnnnnnnnnnnnnnnnnnnnnnnnnnnnnnnnnnnnnnnnnnnnnnnnnnnnnnnnnnnnnnnnnnnnnnnnnnnnnnnnnnnnnnnnnnnnnnnnnnnnnnnnnnnnnnnnnnnnnnnnnnnnnnnnnnnnnnnnnnnnnnnnnnnnnnnnnnnnnnnnnnnnnnnnnnnnnnnnnnnnnnnnnnnnnnnnnnnnnnnnnnnnnnnnnnnnnnnnnnnnnnnnnnnnnnnnnnnnnnnnnnnnnnnnnnnnnnnnnnnnnnnnnnnnnnnnnnnnnnnnnnnnnnnnnnnnnnnnnnnnnnnnnnnnnnnnnnnnnnnnnnnnnnnnnnnnnnnnnnnnnnnnnnnnnnnnnnnnnnnnnnnnnnnnnnnnnnnnnnnnnnnnnnnnnnnnnnnnnnnnnnnnnnnnnnnnnnnnnnnnnnnnnnnnnnnnnnnnnnnnnnnnnnnnnnnnnnnnnnnnnnnnnnnnnnnnnnnnnnnnnnnnnnnnnnnnnnnnnnnnnnnnnnnnnnnnnnnnnnnnnnnnnnnnnnnnnnnnnnnnnnnnnnnnnnnnnnnnnnnnnnnnnnnnnnnnnnnnnnnnnnnnnnnnnnnnnnnnnnnnnnnnnnnnnnnnnnnnnnnnnnnnnnnnnnnnnnnnnnnnnnnnnnnnnnnnnnnnnnnnnnnnnnnnnnnnnnnnnnnnnnnnnnnnnnnnnnnnnnnnnnnnnnnnnnnnnnnnnnnnnnnnnnnnnnnnnnnnnnnnnnnnnnnnnnnnnnnnnnnnnnnnnnnnnnnnnnnnnnnnnnnnnnnnnnnnnnnnnnnnnnnnnnnnnnnnnnnnnnnnnnnnnnnnnnnnnnnnnnnnnnnnnnnnnnnnnnnnnnnnnnnnnnnnnnnnnnnnnnnnnnnnnnnnnnnnnnnnnnnnnnnnnnnnnnnnnnnnnnnnnnnnnnnnnnnnnnnnnnnnnnnnnnnnnnnnnnnnnnnnnnnnnnnnnnnnnnnnnnnnnnnnnnnnnnnnnnnnnnnnnnnnnnnnnnnnnnnnnnnnnnnnnnnnnnnnnnnnnnnnnnnnnnnnnnnnnnnnnnnnnnnnnnnnnnnnnnnnnnnnnnnnnnnnnnnnnnnnnnnnnnnnnnnnnnnnnnnnnnnnnnnnnnnnnnnnnnnnnnnnnnnnnnnnnnnnnnnnnnnnnnnnnnnnnnnnnnnnnnnnnnnnnnnnnnnnnnnnnnnnnnnnnnnnnnnnnnnnnnnnnnnnnnnnnnnnnnnnnnnnnnnnnnnnnnnnnnnnnnnnnnnnnnnnnnnnnnnnnnnnnnnnnnnnnnnnnnnnnnnnnnnnnnnnnnnnnnnnnnnnnnnnnnnnnnnnnnnnnnnnnnnnnnnnnnnnnnnnnnnnnnnnnnnnnnnnnnnnnnnnnnnnnnnnnnnnnnnnnnnnnnnnnnnnnnnnnnnnnnnnnnnnnnnnnnnnnnnnnnnnnnnnnnnnnnnnnnnnnnnnnnnnnnnnnnnnnnnnnnnnnnnnnnnnnnnnnnnnnnnnnnnnnnnnnnnnnnnnnnnnnnnnnnnnnnnnnnnnnnnnnnnnnnnnnnnnnnnnnnnnnnnnnnnnnnnnnnnnnnnnnnnnnnnnnnnnnnnnnnnnnnnnnnnnnnnnnnnnnnnnnnnnnnnnnnnnnnnnnnnnnnnnnnnnnnnnnnnnnnnnnnnnnnnnnnnnnnnnnnnnnnnnnnnnnnnnnnnnnnnnnnnnnnnnnnnnnnnnnnnnnnnnnnnnnnnnnnnnnnnnnnnnnnnnnnnnnnnnnnnnnnnnnnnnnnnnnnnnnnnnnnnnnnnnnnnnnnnnnnnnnnnnnnnnnnnnnnnnnnnnnnnnnnnnnnnnnnnnnnnnnnnnnnnnnnnnnnnnnnnnnnnnnnnnnnnnnnnnnnnnnnnnnnnnnnnnnnnnnnnnnnnnnnnnnnnnnnnnnnnnnnnnnnnnnnnnnnnnnnnnnnnnnnnnnnnnnnnnnnnnnnnnnnnnnnnnnnnnnnnnnnnnnnnnnnnnnnnnnnnnnnnnnnnnnnnnnnnnnnnnnnnnnnnnnnnnnnnnnnnnnnnnnnnnnnnnnnnnnnnnnnnnnnnnnnnnnnnnnnnnnnnnnnnnnnnnnnnnnnnnnnnnnnnnnnnnnnnnnnnnnnnnnnnnnnnnnnnnnnnnnnnnnnnnnnnnnnnnnnnnnnnnnnnnnnnnnnnnnnnnnnnnnnnnnnnnnnnnnnnnnnnnnnnnnnnnnnnnnnnnnnnnnnnnnnnnnnnnnnnnnnnnnnnnnnnnnnnnnnnnnnnnnnnnnnnnnnnnnnnnnnnnnnnnnnnnnnnnnnnnnnnnnnnnnnnnnnnnnnnnnnnnnnnnnnnnnnnnnnnnnnnnnnnnnnnnnnnnnnnnnnnnnnnnnnnnnnnnnnnnnnnnnnnnnnnnnnnnnnnnnnnnnnnnnnnnnnnnnnnnnnnnnnnnnnnnnnnnnnnnnnnnnnnnnnnnnnnnnnnnnnnnnnnnnnnnnnnnnnnnnnnnnnnnnnnnnnnnnnnnnnnnnnnnnnnnnnnnnnnnnnnnnnnnnnnnnnnnnnnnnnnnnnnnnnnnnnnnnnnnnnnnnnnnnnnnnnnnnnnnnnnnnnnnnnnnnnnnnnnnnnnnnnnnnnnnnnnnnnnnnnnnnnnnnnnnnnnnnnnnnnnnnnnnnnnnnnnnnnnnnnnnnnnnnnnnnnnnnnnnnnnnnnnnnnnnnnnnnnnnnnnnnnnnnnnnnnnnnnnnnnnnnnnnnnnnnnnnnnnnnnnnnnnnnnnnnnnnnnnnnnnnnnnnnnnnnnnnnnnnnnnnnnnnnnnnnnnnnnnnnnnnnnnnnnnnnnnnnnnnnnnnnnnnnnnnnnnnnnnnnnnnnnnnnnnnnnnnnnnnnnnnnnnnnnnnnnnnnnnnnnnnnnnnnnnnnnnnnnnnnnnnnnnnnnnnnnnnnnnnnnnnnnnnnnnnnnnnnnnnnnnnnnnnnnnnnnnnnnnnnnnnnnnnnnnnnnnnnnnnnnnnnnnnnnnnnnnnnnnnnnnnnnnnnnnnnnnnnnnnnnnnnnnnnnnnnnnnnnnnnnnnnnnnnnnnnnnnnnnnnnnnnnnnnnnnnnnnnnnnnnnnnnnnnnnnnnnnnnnnnnnnnnnnnnnnnnnnnnnnnnnnnnnnnnnnnnnnnnnnnnnnnnnnnnnnnnnnnnnnnnnnnnnnnnnnnnnnnnnnnnnnnnnnnnnnnnnnnnnnnnnnnnnnnnnnnnnnnnnnnnnnnnnnnnnnnnnnnnnnnnnnnnnnnnnnnnnnnnnnnnnnnnnnnnnnnnnnnnnnnnnnnnnnnnnnnnnnnnnnnnnnnnnnnnnnnnnnnnnnnnnnnnnnnnnnnnnnnnnnnnnnnnnnnnnnnnnnnnnnnnnnnnnnnnnnnnnnnnnnnnnnnnnnnnnnnnnnnnnnnnnnnnnnnnnnnnnnnnnnnnnnnnnnnnnnnnnnnnnnnnnnnnnnnnnnnnnnnnnnnnnnnnnnnnnnnnnnnnnnnnnnnnnnnnnnnnnnnnnnnnnnnnnnnnnnnnnnnnnnnnnnnnnnnnnnnnnnnnnnnnnnnnnnnnnnnnnnnnnnnnnnnnnnnnnnnnnnnnnnnnnnnnnnnnnnnnnnnnnnnnnnnnnnnnnnnnnnnnnnnnnnnnnnnnnnnnnnnnnnnnnnnnnnnnnnnnnnnnnnnnnnnnnnnnnnnnnnnnnnnnnnnnnnnnnnnnnnnnnnnnnnnnnnnnnnnnnnnnnnnnnnnnnnnnnnnnnnnnnnnnnnnnnnnnnnnnnnnnnnnnnnnnnnnnnnnnnnnnnnnnnnnnnnnnnnnnnnnnnnnnnnnnnnnnnnnnnnnnnnnnnnnnnnnnnnnnnnnnnnnnnnnnnnnnnnnnnnnnnnnnnnnnnnnnnnnnnnnnnnnnnnnnnnnnnnnnnnnnnnnnnnnnnnnnnnnnnnnnnnnnnnnnnnnnnnnnnnnnnnnnnnnnnnnnnnnnnnnnnnnnnnnnnnnnnnnnnnnnnnnnnnnnnnnnnnnnnnnnnnnnnnnnnnnnnnnnnnnnnnnnnnnnnnnnnnnnnnnnnnnnnnnnnnnnnnnnnnnnnnnnnnnnnnnnnnnnnnnnnnnnnnnnnnnnnnnnnnnnnnnnnnnnnnnnnnnnnnnnnnnnnnnnnnnnnnnnnnnnnnnnnnnnnnnnnnnnnnnnnnnnnnnnnnnnnnnnnnnnnnnnnnnnnnnnnnnnnnnnnnnnnnnnnnnnnnnnnnnnnnnnnnnnnnnnnnnnnnnnnnnnnnnnnnnnnnnnnnnnnnnnnnnnnnnnnnnnnnnnnnnnnnnnnnnnnnnnnnnnnnnnnnnnnnnnnnnnnnnnnnnnnnnnnnnnnnnnnnnnnnnnnnnnnnnnnnnnnnnnnnnnnnnnnnnnnnnnnnnnnnnnnnnnnnnnnnnnnnnnnnnnnnnnnnnnnnnnnnnnnnnnnnnnnnnnnnnnnnnnnnnnnnnnnnnnnnnnnnnnnnnnnnnnnnnnnnnnnnnnnnnnnnnnnnnnnnnnnnnnnnnnnnnnnnnnnnnnnnnnnnnnnnnnnnnnnnnnnnnnnnnnnnnnnnnnnnnnnnnnnnnnnnnnnnnnnnnnnnnnnnnnnnnnnnnnnnnnnnnnnnnnnnnnnnnnnnnnnnnnnnnnnnnnnnnnnnnnnnnnnnnnnnnnnnnnnnnnnnnnnnnnnnnnnnnnnnnnnnnnnnnnnnnnnnnnnnnnnnnnnnnnnnnnnnnnnnnnnnnnnnnnnnnnnnnnnnnnnnnnnnnnnnnnnnnnnnnnnnnnnnnnnnnnnnnnnnnnnnnnnnnnnnnnnnnnnnnnnnnnnnnnnnnnnnnnnnnnnnnnnnnnnnnnnnnnnnnnnnnnnnnnnnnnnnnnnnnnnnnnnnnnnnnnnnnnnnnnnnnnnnnnnnnnnnnnnnnnnnnnnnnnnnnnnnnnnnnnnnnnnnnnnnnnnnnnnnnnnnnnnnnnnnnnnnnnnnnnnnnnnnnnnnnnnnnnnnnnnnnnnnnnnnnnnnnnnnnnnnnnnnnnnnnnnnnnnnnnnnnnnnnnnnnnnnnnnnnnnnnnnnnnnnnnnnnnnnnnnnnnnnnnnnnnnnnnnnnnnnnnnnnnnnnnnnnnnnnnnnnnnnnnnnnnnnnnnnnnnnnnnnnnnnnnnnnnnnnnnnnnnnnnnnnnnnnnnnnnnnnnnnnnnnnnnnnnnnnnnnnnnnnnnnnnnnnnnnnnnnnnnnnnnnnnnnnnnnnnnnnnnnnnnnnnnnnnnnnnnnnnnnnnnnnnnnnnnnnnnnnnnnnnnnnnnnnnnnnnnnnnnnnnnnnnnnnnnnnnnnnnnnnnnnnnnnnnnnnnnnnnnnnnnnnnnnnnnnnnnnnnnnnnnnnnnnnnnnnnnnnnnnnnnnnnnnnnnnnnnnnnnnnnnnnnnnnnnnnnnnnnnnnnnnnnnnnnnnnnnnnnnnnnnnnnnnnnnnnnnnnnnnnnnnnnnnnnnnnnnnnnnnnnnnnnnnnnnnnnnnnnnnnnnnnnnnnnnnnnnnnnnnnnnnnnnnnnnnnnnnnnnnnnnnnnnnnnnnnnnnnnnnnnnnnnnnnnnnnnnnnnnnnnnnnnnnnnnnnnnnnnnnnnnnnnnnnnnnnnnnnnnnnnnnnnnnnnnnnnnnnnnnnnnnnnnnnnnnnnnnnnnnnnnnnnnnnnnnnnnnnnnnnnnnnnnnnnnnnnnnnnnnnnnnnnnnnnnnnnnnnnnnnnnnnnnnnnnnnnnnnnnnnnnnnnnnnnnnnnnnnnnnnnnnnnnnnnnnnnnnnnnnnnnnnnnnnnnnnnnnnnnnnnnnnnnnnnnnnnnnnnnnnnnnnnnnnnnnnnnnnnnnnnnnnnnnnnnnnnnnnnnnnnnnnnnnnnnnnnnnnnnnnnnnnnnnnnnnnnnnnnnnnnnnnnnnnnnnnnnnnnnnnnnnnnnnnnnnnnnnnnnnnnnnnnnnnnnnnnnnnnnnnnnnnnnnnnnnnnnnnnnnnnnnnnnnnnnnnnnnnnnnnnnnnnnnnnnnnnnnnnnnnnnnnnnnnnnnnnnnnnnnnnnnnnnnnnnnnnnnnnnnnnnnnnnnnnnnnnnnnnnnnnnnnnnnnnnnnnnnnnnnnnnnnnnnnnnnnnnnnnnnnnnnnnnnnnnnnnnnnnnnnnnnnnnnnnnnnnnnnnnnnnnnnnnnnnnnnnnnnnnnnnnnnnnnnnnnnnnnnnnnnnnnnnnnnnnnnnnnnnnnnnnnnnnnnnnnnnnnnnnnnnnnnnnnnnnnnnnnnnnnnnnnnnnnnnnnnnnnnnnnnnnnnnnnnnnnnnnnnnnnnnnnnnnnnnnnnnnnnnnnnnnnnnnnnnnnnnnnnnnnnnnnnnnnnnnnnnnnnnnnnnnnnnnnnnnnnnnnnnnnnnnnnnnnnnnnnnnnnnnnnnnnnnnnnnnnnnnnnnnnnnnnnnnnnnnnnnnnnnnnnnnnnnnnnnnnnnnnnnnnnnnnnnnnnnnnnnnnnnnnnnnnnnnnnnnnnnnnnnnnnnnnnnnnnnnnnnnnnnnnnnnnnnnnnnnnnnnnnnnnnnnnnnnnnnnnnnnnnnnnnnnnnnnnnnnnnnnnnnnnnnnnnnnnnnnnnnnnnnnnnnnnnnnnnnnnnnnnnnnnnnnnnnnnnnnnnnnnnnnnnnnnnnnnnnnnnnnnnnnnnnnnnnnnnnnnnnnnnnnnnnnnnnnnnnnnnnnnnnnnnnnnnnnnnnnnnnnnnnnnnnnnnnnnnnnnnnnnnnnnnnnnnnnnnnnnnnnnnnnnnnnnnnnnnnnnnnnnnnnnnnnnnnnnnnnnnnnnnnnnnnnnnnnnnnnnnnnnnnnnnnnnnnnnnnnnnnnnnnnnnnnnnnnnnnnnnnnnnnnnnnnnnnnnnnnnnnnnnnnnnnnnnnnnnnnnnnnnnnnnnnnnnnnnnnnnnnnnnnnnnnnnnnnnnnnnnnnnnnnnnnnnnnnnnnnnnnnnnnnnnnnnnnnnnnnnnnnnnnnnnnnnnnnnnnnnnnnnnnnnnnnnnnnnnnnnnnnnnnnnnnnnnnnnnnnnnnnnnnnnnnnnnnnnnnnnnnnnnnnnnnnnnnnnnnnnnnnnnnnnnnnnnnnnnnnnnnnnnnnnnnnnnnnnnnnnnnnnnnnnnnnnnnnnnnnnnnnnnnnnnnnnnnnnnnnnnnnnnnnnnnnnnnnnnnnnnnnnnnnnnnnnnnnnnnnnnnnnnnnnnnnnnnnnnnnnnnnnnnnnnnnnnnnnnnnnnnnnnnnnnnnnnnnnnnnnnnnnnnnnnnnnnnnnnnnnnnnnnnnnnnnnnnnnnnnnnnnnnnnnnnnnnnnnnnnnnnnnnnnnnnnnnnnnnnnnnnnnnnnnnnnnnnnnnnnnnnnnnnnnnnnnnnnnnnnnnnnnnnnnnnnnnnnnnnnnnnnnnnnnnnnnnnnnnnnnnnnnnnnnnnnnnnnnnnnnnnnnnnnnnnnnnnnnnnnnnnnnnnnnnnnnnnnnnnnnnnnnnnnnnnnnnnnnnnnnnnnnnnnnnnnnnnnnnnnnnnnnnnnnnnnnnnnnnnnnnnnnnnnnnnnnnnnnnnnnnnnnnnnnnnnnnnnnnnnnnnnnnnnnnnnnnnnnnnnnnnnnnnnnnnnnnnnnnnnnnnnnnnnnnnnnnnnnnnnnnnnnnnnnnnnnnnnnnnnnnnnnnnnnnnnnnnnnnnnnnnnnnnnnnnnnnnnnnnnnnnnnnnnnnnnnnnnnnnnnnnnnnnnnnnnnnnnnnnnnnnnnnnnnnnnnnnnnnnnnnnnnnnnnnnnnnnnnnnnnnnnnnnnnnnnnnnnnnnnnnnnnnnnnnnnnnnnnnnnnnnnnnnnnnnnnnnnnnnnnnnnnnnnnnnnnnnnnnnnnnnnnnnnnnnnnnnnnnnnnnnnnnnnnnnnnnnnnnnnnnnnnnnnnnnnnnnnnnnnnnnnnnnnnnnnnnnnnnnnnnnnnnnnnnnnnnnnnnnnnnnnnnnnnnnnnnnnnnnnnnnnnnnnnnnnnnnnnnnnnnnnnnnnnnnnnnnnnnnnnnnnnnnnnnnnnnnnnnnnnnnnnnnnnnnnnnnnnnnnnnnnnnnnnnnnnnnnnnnnnnnnnnnnnnnnnnnnnnnnnnnnnnnnnnnnnnnnnnnnnnnnnnnnnnnnnnnnnnnnnnnnnnnnnnnnnnnnnnnnnnnnnnnnnnnnnnnnnnnnnnnnnnnnnnnnnnnnnnnnnnnnnnnnnnnnnnnnnnnnnnnnnnnnnnnnnnnnnnnnnnnnnnnnnnnnnnnnnnnnnnnnnnnnnnnnnnnnnnnnnnnnnnnnnnnnnnnnnnnnnnnnnnnnnnnnnnnnnnnnnnnnnnnnnnnnnnnnnnnnnnnnnnnnnnnnnnnnnnnnnnnnnnnnnnnnnnnnnnnnnnnnnnnnnnnnnnnnnnnnnnnnnnnnnnnnnnnnnnnnnnnnnnnnnnnnnnnnnnnnnnnnnnnnnnnnnnnnnnnnnnnnnnnnnnnnnnnnnnnnnnnnnnnnnnnnnnnnnnnnnnnnnnnnnnnnnnnnnnnnnnnnnnnnnnnnnnnnnnnnnnnnnnnnnnnnnnnnnnnnnnnnnnnnnnnnnnnnnnnnnnnnnnnnnnnnnnnnnnnnnnnnnnnnnnnnnnnnnnnnnnnnnnnnnnnnnnnnnnnnnnnnnnnnnnnnnnnnnnnnnnnnnnnnnnnnnnnnnnnnnnnnnnnnnnnnnnnnnnnnnnnnnnnnnnnnnnnnnnnnnnnnnnnnnnnnnnnnnnnnnnnnnnnnnnnnnnnnnnnnnnnnnnnnnnnnnnnnnnnnnnnnnnnnnnnnnnnnnnnnnnnnnnnnnnnnnnnnnnnnnnnnnnnnnnnnnnnnnnnnnnnnnnnnnnnnnnnnnnnnnnnnnnnnnnnnnnnnnnnnnnnnnnnnnnnnnnnnnnnnnnnnnnnnnnnnnnnnnnnnnnnnnnnnnnnnnnnnnnnnnnnnnnnnnnnnnnnnnnnnnnnnnnnnnnnnnnnnnnnnnnnnnnnnnnnnnnnnnnnnnnnnnnnnnnnnnnnnnnnnnnnnnnnnnnnnnnnnnnnnnnnnnnnnnnnnnnnnnnnnnnnnnnnnnnnnnnnnnnnnnnnnnnnnnnnnnnnnnnnnnnnnnnnnnnnnnnnnnnnnnnnnnnnnnnnnnnnnnnnnnnnnnnnnnnnnnnnnnnnnnnnnnnnnnnnnnnnnnnnnnnnnnnnnnnnnnnnnnnnnnnnnnnnnnnnnnnnnnnnnnnnnnnnnnnnnnnnnnnnnnnnnnnnnnnnnnnnnnnnnnnnnnnnnnnnnnnnnnnnnnnnnnnnnnnnnnnnnnnnnnnnnnnnnnnnnnnnnnnnnnnnnnnnnnnnnnnnnnnnnnnnnnnnnnnnnnnnnnnnnnnnnnnnnnnnnnnnnnnnnnnnnnnnnnnnnnnnnnnnnnnnnnnnnnnnnnnnnnnnnnnnnnnnnnnnnnnnnnnnnnnnnnnnnnnnnnnnnnnnnnnnnnnnnnnnnnnnnnnnnnnnnnnnnnnnnnnnnnnnnnnnnnnnnnnnnnnnnnnnnnnnnnnnnnnnnnnnnnnnnnnnnnnnnnnnnnnnnnnnnnnnnnnnnnnnnnnnnnnnnnnnnnnnnnnnnnnnnnnnnnnnnnnnnnnnnnnnnnnnnnnnnnnnnnnnnnnnnnnnnnnnnnnnnnnnnnnnnnnnnnnnnnnnnnnnnnnnnnnnnnnnnnnnnnnnnnnnnnnnnnnnnnnnnnnnnnnnnnnnnnnnnnnnnnnnnnnnnnnnnnnnnnnnnnnnnnnnnnnnnnnnnnnnnnnnnnnnnnnnnnnnnnnnnnnnnnnnnnnnnnnnnnnnnnnnnnnnnnnnnnnnnnnnnnnnnnnnnnnnnnnnnnnnnnnnnnnnnnnnnnnnnnnnnnnnnnnnnnnnnnnnnnnnnnnnnnnnnnnnnnnnnnnnnnnnnnnnnnnnnnnnnnnnnnnnnnnnnnnnnnnnnnnnnnnnnnnnnnnnnnnnnnnnnnnnnnnnnnnnnnnnnnnnnnnnnnnnnnnnnnnnnnnnnnnnnnnnnnnnnnnnnnnnnnnnnnnnnnnnnnnnnnnnnnnnnnnnnnnnnnnnnnnnnnnnnnnnnnnnnnnnnnnnnnnnnnnnnnnnnnnnnnnnnnnnnnnnnnnnnnnnnnnnnnnnnnnnnnnnnnnnnnnnnnnnnnnnnnnnnnnnnnnnnnnnnnnnnnnnnnnnnnnnnnnnnnnnnnnnnnnnnnnnnnnnnnnnnnnnnnnnnnnnnnnnnnnnnnnnnnnnnnnnnnnnnnnnnnnnnnnnnnnnnnnnnnnnnnnnnnnnnnnnnnnnnnnnnnnnnnnnnnnnnnnnnnnnnnnnnnnnnnnnnnnnnnnnnnnnnnnnnnnnnnnnnnnnnnnnnnnnnnnnnnnnnnnnnnnnnnnnnnnnnnnnnnnnnnnnnnnnnnnnnnnnnnnnnnnnnnnnnnnnnnnnnnnnnnnnnnnnnnnnnnnnnnnnnnnnnnnnnnnnnnnnnnnnnnnnnnnnnnnnnnnnnnnnnnnnnnnnnnnnnnnnnnnnnnnnnnnnnnnnnnnnnnnnnnnnnnnnnnnnnnnnnnnnnnnnnnnnnnnnnnnnnnnnnnnnnnnnnnnnnnnnnnnnnnnnnnnnnnnnnnnnnnnnnnnnnnnnnnnnnnnnnnnnnnnnnnnnnnnnnnnnnnnnnnnnnnnnnnnnnnnnnnnnnnnnnnnnnnnnnnnnnnnnnnnnnnnnnnnnnnnnnnnnnnnnnnnnnnnnnnnnnnnnnnnnnnnnnnnnnnnnnnnnnnnnnnnnnnnnnnnnnnnnnnnnnnnnnnnnnnnnnnnnnnnnnnnnnnnnnnnnnnnnnnnnnnnnnnnnnnnnnnnnnnnnnnnnnnnnnnnnnnnnnnnnnnnnnnnnnnnnnnnnnnnnnnnnnnnnnnnnnnnnnnnnnnnnnnnnnnnnnnnnnnnnnnnnnnnnnnnnnnnnnnnnnnnnnnnnnnnnnnnnnnnnnnnnnnnnnnnnnnnnnnnnnnnnnnnnnnnnnnnnnnnnnnnnnnnnnnnnnnnnnnnnnnnnnnnnnnnnnnnnnnnnnnnnnnnnnnnnnnnnnnnnnnnnnnnnnnnnnnnnnnnnnnnnnnnnnnnnnnnnnnnnnnnnnnnnnnnnnnnnnnnnnnnnnnnnnnnnnnnnnnnnnnnnnnnnnnnnnnnnnnnnnnnnnnnnnnnnnnnnnnnnnnnnnnnnnnnnnnnnnnnnnnnnnnnnnnnnnnnnnnnnnnnnnnnnnnnnnnnnnnnnnnnnnnnnnnnnnnnnnnnnnnnnnnnnnnnnnnnnnnnnnnnnnnnnnnnnnnnnnnnnnnnnnnnnnnnnnnnnnnnnnnnnnnnnnnnnnnnnnnnnnnnnnnnnnnnnnnnnnnnnnnnnnnnnnnnnnnnnnnnnnnnnnnnnnnnnnnnnnnnnnnnnnnnnnnnnnnnnnnnnnnnnnnnnnnnnnnnnnnnnnnnnnnnnnnnnnnnnnnnnnnnnnnnnnnnnnnnnnnnnnnnnnnnnnnnnnnnnnnnnnnnnnnnnnnnnnnnnnnnnnnnnnnnnnnnnnnnnnnnnnnnnnnnnnnnnnnnnnnnnnnnnnnnnnnnnnnnnnnnnnnnnnnnnnnnnnnnnnnnnnnnnnnnnnnnnnnnnnnnnnnnnnnnnnnnnnnnnnnnnnnnnnnnnnnnnnnnnnnnnnnnnnnnnnnnnnnnnnnnnnnnnnnnnnnnnnnnnnnnnnnnnnnnnnnnnnnnnnnnnnnnnnnnnnnnnnnnnnnnnnnnnnnnnnnnnnnnnnnnnnnnnnnnnnnnnnnnnnnnnnnnnnnnnnnnnnnnnnnnnnnnnnnnnnnnnnnnnnnnnnnnnnnnnnnnnnnnnnnnnnnnnnnnnnnnnnnnnnnnnnnnnnnnnnnnnnnnnnnnnnnnnnnnnnnnnnnnnnnnnnnnnnnnnnnnnnnnnnnnnnnnnnnnnnnnnnnnnnnnnnnnnnnnnnnnnnnnnnnnnnnnnnnnnnnnnnnnnnnnnnnnnnnnnnnnnnnnnnnnnnnnnnnnnnnnnnnnnnnnnnnnnnnnnnnnnnnnnnnnnnnnnnnnnnnnnnnnnnnnnnnnnnnnnnnnnnnnnnnnnnnnnnnnnnnnnnnnnnnnnnnnnnnnnnnnnnnnnnnnnnnnnnnnnnnnnnnnnnnnnnnnnnnnnnnnnnnnnnnnnnnnnnnnnnnnnnnnnnnnnnnnnnnnnnnnnnnnnnnnnnnnnnnnnnnnnnnnnnnnnnnnnnnnnnnnnnnnnnnnnnnnnnnnnnnnnnnnnnnnnnnnnnnnnnnnnnnnnnnnnnnnnnnnnnnnnnnnnnnnnnnnnnnnnnnnnnnnnnnnnnnnnnnnnnnnnnnnnnnnnnnnnnnnnnnnnnnnnnnnnnnnnnnnnnnnnnnnnnnnnnnnnnnnnnnnnnnnnnnnnnnnnnnnnnnnnnnnnnnnnnnnnnnnnnnnnnnnnnnnnnnnnnnnnnnnnnnnnnnnnnnnnnnnnnnnnnnnnnnnnnnnnnnnnnnnnnnnnnnnnnnnnnnnnnnnnnnnnnnnnnnnnnnnnnnnnnnnnnnnnnnnnnnnnnnnnnnnnnnnnnnnnnnnnnnnnnnnnnnnnnnnnnnnnnnnnnnnnnnnnnnnnnnnnnnnnnnnnnnnnnnnnnnnnnnnnnnnnnnnnnnnnnnnnnnnnnnnnnnnnnnnnnnnnnnnnnnnnnnnnnnnnnnnnnnnnnnnnnnnnnnnnnnnnnnnnnnnnnnnnnnnnnnnnnnnnnnnnnnnnnnnnnnnnnnnnnnnnnnnnnnnnnnnnnnnnnnnnnnnnnnnnnnnnnnnnnnnnnnnnnnnnnnnnnnnnnnnnnnnnnnnnnnnnnnnnnnnnnnnnnnnnnnnnnnnnnnnnnnnnnnnnnnnnnnnnnnnnnnnnnnnnnnnnnnnnnnnnnnnnnnnnnnnnnnnnnnnnnnnnnnnnnnnnnnnnnnnnnnnnnnnnnnnnnnnnnnnnnnnnnnnnnnnnnnnnnnnnnnnnnnnnnnnnnnnnnnnnnnnnnnnnnnnnnnnnnnnnnnnnnnnnnnnnnnnnnnnnnnnnnnnnnnnnnnnnnnnnnnnnnnnnnnnnnnnnnnnnnnnnnnnnnnnnnnnnnnnnnnnnnnnnnnnnnnnnnnnnnnnnnnnnnnnnnnnnnnnnnnnnnnnnnnnnnnnnnnnnnnnnnnnnnnnnnnnnnnnnnnnnnnnnnnnnnnnnnnnnnnnnnnnnnnnnnnnnnnnnnnnnnnnnnnnnnnnnnnnnnnnnnnnnnnnnnnnnnnnnnnnnnnnnnnnnnnnnnnnnnnnnnnnnnnnnnnnnnnnnnnnnnnnnnnnnnnnnnnnnnnnnnnnnnnnnnnnnnnnnnnnnnnnnnnnnnnnnnnnnnnnnnnnnnnnnnnnnnnnnnnnnnnnnnnnnnnnnnnnnnnnnnnnnnnnnnnnnnnnnnnnnnnnnnnnnnnnnnnnnnnnnnnnnnnnnnnnnnnnnnnnnnnnnnnnnnnnnnnnnnnnnnnnnnnnnnnnnnnnnnnnnnnnnnnnnnnnnnnnnnnnnnnnnnnnnnnnnnnnnnnnnnnnnnnnnnnnnnnnnnnnnnnnnnnnnnnnnnnnnnnnnnnnnnnnnnnnnnnnnnnnnnnnnnnnnnnnnnnnnnnnnnnnnnnnnnnnnnnnnnnnnnnnnnnnnnnnnnnnnnnnnnnnnnnnnnnnnnnnnnnnnnnnnnnnnnnnnnnnnnnnnnnnnnnnnnnnnnnnnnnnnnnnnnnnnnnnnnnnnnnnnnnnnnnnnnnnnnnnnnnnnnnnnnnnnnnnnnnnnnnnnnnnnnnnnnnnnnnnnnnnnnnnnnnnnnnnnnnnnnnnnnnnnnnnnnnnnnnnnnnnnnnnnnnnnnnnnnnnnnnnnnnnnnnnnnnnnnnnnnnnnnnnnnnnnnnnnnnnnnnnnnnnnnnnnnnnnnnnnnnnnnnnnnnnnnnnnnnnnnnnnnnnnnnnnnnnnnnnnnnnnnnnnnnnnnnnnnnnnnnnnnnnnnnnnnnnnnnnnnnnnnnnnnnnnnnnnnnnnnnnnnnnnnnnnnnnnnnnnnnnnnnnnnnnnnnnnnnnnnnnnnnnnnnnnnnnnnnnnnnnnnnnnnnnnnnnnnnnnnnnnnnnnnnnnnnnnnnnnnnnnnnnnnnnnnnnnnnnnnnnnnnnnnnnnnnnnnnnnnnnnnnnnnnnnnnnnnnnnnnnnnnnnnnnnnnnnnnnnnnnnnnnnnnnnnnnnnnnnnnnnnnnnnnnnnnnnnnnnnnnnnnnnnnnnnnnnnnnnnnnnnnnnnnnnnnnnnnnnnnnnnnnnnnnnnnnnnnnnnnnnnnnnnnnnnnnnnnnnnnnnnnnnnnnnnnnnnnnnnnnnnnnnnnnnnnnnnnnnnnnnnnnnnnnnnnnnnnnnnnnnnnnnnnnnnnnnnnnnnnnnnnnnnnnnnnnnnnnnnnnnnnnnnnnnnnnnnnnnnnnnnnnnnnnnnnnnnnnnnnnnnnnnnnnnnnnnnnnnnnnnnnnnnnnnnnnnnnnnnnnnnnnnnnnnnnnnnnnnnnnnnnnnnnnnnnnnnnnnnnnnnnnnnnnnnnnnnnnnnnnnnnnnnnnnnnnnnnnnnnnnnnnnnnnnnnnnnnnnnnnnnnnnnnnnnnnnnnnnnnnnnnnnnnnnnnnnnnnnnnnnnnnnnnnnnnnnnnnnnnnnnnnnnnnnnnnnnnnnnnnnnnnnnnnnnnnnnnnnnnnnnnnnnnnnnnnnnnnnnnnnnnnnnnnnnnnnnnnnnnnnnnnnnnnnnnnnnnnnnnnnnnnnnnnnnnnnnnnnnnnnnnnnnnnnnnnnnnnnnnnnnnnnnnnnnnnnnnnnnnnnnnnnnnnnnnnnnnnnnnnnnnnnnnnnnnnnnnnnnnnnnnnnnnnnnnnnnnnnnnnnnnnnnnnnnnnnnnnnnnnnnnnnnnnnnnnnnnnnnnnnnnnnnnnnnnnnnnnnnnnnnnnnnnnnnnnnnnnnnnnnnnnnnnnnnnnnnnnnnnnnnnnnnnnnnnnnnnnnnnnnnnnnnnnnnnnnnnnnnnnnnnnnnnnnnnnnnnnnnnnnnnnnnnnnnnnnnnnnnnnnnnnnnnnnnnnnnnnnnnnnnnnnnnnnnnnnnnnnnnnnnnnnnnnnnnnnnnnnnnnnnnnnnnnnnnnnnnnnnnnnnnnnnnnnnnnnnnnnnnnnnnnnnnnnnnnnnnnnnnnnnnnnnnnnnnnnnnnnnnnnnnnnnnnnnnnnnnnnnnnnnnnnnnnnnnnnnnnnnnnnnnnnnnnnnnnnnnnnnnnnnnnnnnnnnnnnnnnnnnnnnnnnnnnnnnnnnnnnnnnnnnnnnnnnnnnnnnnnnnnnnnnnnnnnnnnnnnnnnnnnnnnnnnnnnnnnnnnnnnnnnnnnnnnnnnnnnnnnnnnnnnnnnnnnnnnnnnnnnnnnnnnnnnnnnnnnnnnnnnnnnnnnnnnnnnnnnnnnnnnnnnnnnnnnnnnnnnnnnnnnnnnnnnnnnnnnnnnnnnnnnnnnnnnnnnnnnnnnnnnnnnnnnnnnnnnnnnnnnnnnnnnnnnnnnnnnnnnnnnnnnnnnnnnnnnnnnnnnnnnnnnnnnnnnnnnnnnnnnnnnnnnnnnnnnnnnnnnnnnnnnnnnnnnnnnnnnnnnnnnnnnnnnnnnnnnnnnnnnnnnnnnnnnnnnnnnnnnnnnnnnnnnnnnnnnnnnnnnnnnnnnnnnnnnnnnnnnnnnnnnnnnnnnnnnnnnnnnnnnnnnnnnnnnnnnnnnnnnnnnnnnnnnnnnnnnnnnnnnnnnnnnnnnnnnnnnnnnnnnnnnnnnnnnnnnnnnnnnnnnnnnnnnnnnnnnnnnnnnnnnnnnnnnnnnnnnnnnnnnnnnnnnnnnnnnnnnnnnnnnnnnnnnnnnnnnnnnnnnnnnnnnnnnnnnnnnnnnnnnnnnnnnnnnnnnnnnnnnnnnnnnnnnnnnnnnnnnnnnnnnnnnnnnnnnnnnnnnnnnnnnnnnnnnnnnnnnnnnnnnnnnnnnnnnnnnnnnnnnnnnnnnnnnnnnnnnnnnnnnnnnnnnnnnnnnnnnnnnnnnnnnnnnnnnnnnnnnnnnnnnnnnnnnnnnnnnnnnnnnnnnnnnnnnnnnnnnnnnnnnnnnnnnnnnnnnnnnnnnnnnnnnnnnnnnnnnnnnnnnnnnnnnnnnnnnnnnnnnnnnnnnnnnnnnnnnnnnnnnnnnnnnnnnnnnnnnnnnnnnnnnnnnnnnnnnnnnnnnnnnnnnnnnnnnnnnnnnnnnnnnnnnnnnnnnnnnnnnnnnnnnnnnnnnnnnnnnnnnnnnnnnnnnnnnnnnnnnnnnnnnnnnnnnnnnnnnnnnnnnnnnnnnnnnnnnnnnnnnnnnnnnnnnnnnnnnnnnnnnnnnnnnnnnnnnnnnnnnnnnnnnnnnnnnnnnnnnnnnnnnnnnnnnnnnnnnnnnnnnnnnnnnnnnnnnnnnnnnnnnnnnnnnnnnnnnnnnnnnnnnnnnnnnnnnnnnnnnnnnnnnnnnnnnnnnnnnnnnnnnnnnnnnnnnnnnnnnnnnnnnnnnnnnnnnnnnnnnnnnnnnnnnnnnnnnnnnnnnnnnnnnnnnnnnnnnnnnnnnnnnnnnnnnnnnnnnnnnnnnnnnnnnnnnnnnnnnnnnnnnnnnnnnnnnnnnnnnnnnnnnnnnnnnnnnnnnnnnnnnnnnnnnnnnnnnnnnnnnnnnnnnnnnnnnnnnnnnnnnnnnnnnnnnnnnnnnnnnnnnnnnnnnnnnnnnnnnnnnnnnnnnnnnnnnnnnnnnnnnnnnnnnnnnnnnnnnnnnnnnnnnnnnnnnnnnnnnnnnnnnnnnnnnnnnnnnnnnnnnnnnnnnnnnnnnnnnnnnnnnnnnnnnnnnnnnnnnnnnnnnnnnnnnnnnnnnnnnnnnnnnnnnnnnnnnnnnnnnnnnnnnnnnnnnnnnnnnnnnnnnnnnnnnnnnnnnnnnnnnnnnnnnnnnnnnnnnnnnnnnnnnnnnnnnnnnnnnnnnnnnnnnnnnnnnnnnnnnnnnnnnnnnnnnnnnnnnnnnnnnnnnnnnnnnnnnnnnnnnnnnnnnnnnnnnnnnnnnnnnnnnnnnnnnnnnnnnnnnnnnnnnnnnnnnnnnnnnnnnnnnnnnnnnnnnnnnnnnnnnnnnnnnnnnnnnnnnnnnnnnnnnnnnnnnnnnnnnnnnnnnnnnnnnnnnnnnnnnnnnnnnnnnnnnnnnnnnnnnnnnnnnnnnnnnnnnnnnnnnnnnnnnnnnnnnnnnnnnnnnnnnnnnnnnnnnnnnnnnnnnnnnnnnnnnnnnnnnnnnnnnnnnnnnnnnnnnnnnnnnnnnnnnnnnnnnnnnnnnnnnnnnnnnnnnnnnnnnnnnnnnnnnnnnnnnnnnnnnnnnnnnnnnnnnnnnnnnnnnnnnnnnnnnnnnnnnnnnnnnnnnnnnnnnnnnnnnnnnnnnnnnnnnnnnnnnnnnnnnnnnnnnnnnnnnnnnnnnnnnnnnnnnnnnnnnnnnnnnnnnnnnnnnnnnnnnnnnnnnnnnnnnnnnnnnnnnnnnnnnnnnnnnnnnnnnnnnnnnnnnnnnnnnnnnnnnnnnnnnnnnnnnnnnnnnnnnnnnnnnnnnnnnnnnnnnnnnnnnnnnnnnnnnnnnnnnnnnnnnnnnnnnnnnnnnnnnnnnnnnnnnnnnnnnnnnnnnnnnnnnnnnnnnnnnnnnnnnnnnnnnnnnnnnnnnnnnnnnnnnnnnnnnnnnnnnnnnnnnnnnnnnnnnnnnnnnnnnnnnnnnnnnnnnnnnnnnnnnnnnnnnnnnnnnnnnnnnnnnnnnnnnnnnnnnnnnnnnnnnnnnnnnnnnnnnnnnnnnnnnnnnnnnnnnnnnnnnnnnnnnnnnnnnnnnnnnnnnnnnnnnnnnnnnnnnnnnnnnnnnnnnnnnnnnnnnnnnnnnnnnnnnnnnnnnnnnnnnnnnnnnnnnnnnnnnnnnnnnnnnnnnnnnnnnnnnnnnnnnnnnnnnnnnnnnnnnnnnnnnnnnnnnnnnnnnnnnnnnnnnnnnnnnnnnnnnnnnnnnnnnnnnnnnnnnnnnnnnnnnnnnnnnnnnnnnnnnnnnnnnnnnnnnnnnnnnnnnnnnnnnnnnnnnnnnnnnnnnnnnnnnnnnnnnnnnnnnnnnnnnnnnnnnnnnnnnnnnnnnnnnnnnnnnnnnnnnnnnnnnnnnnnnnnnnnnnnnnnnnnnnnnnnnnnnnnnnnnnnnnnnnnnnnnnnnnnnnnnnnnnnnnnnnnnnnnnnnnnnnnnnnnnnnnnnnnnnnnnnnnnnnnnnnnnnnnnnnnnnnnnnnnnnnnnnnnnnnnnnnnnnnnnnnnnnnnnnnnnnnnnnnnnnnnnnnnnnnnnnnnnnnnnnnnnnnnnnnnnnnnnnnnnnnnnnnnnnnnnnnnnnnnnnnnnnnnnnnnnnnnnnnnnnnnnnnnnnnnnnnnnnnnnnnnnnnnnnnnnnnnnnnnnnnnnnnnnnnnnnnnnnnnnnnnnnnnnnnnnnnnnnnnnnnnnnnnnnnnnnnnnnnnnnnnnnnnnnnnnnnnnnnnnnnnnnnnnnnnnnnnnnnnnnnnnnnnnnnnnnnnnnnnnnnnnnnnnnnnnnnnnnnnnnnnnnnnnnnnnnnnnnnnnnnnnnnnnnnnnnnnnnnnnnnnnnnnnnnnnnnnnnnnnnnnnnnnnnnnnnnnnnnnnnnnnnnnnnnnnnnnnnnnnnnnnnnnnnnnnnnnnnnnnnnnnnnnnnnnnnnnnnnnnnnnnnnnnnnnnnnnnnnnnnnnnnnnnnnnnnnnnnnnnnnnnnnnnnnnnnnnnnnnnnnnnnnnnnnnnnnnnnnnnnnnnnnnnnnnnnnnnnnnnnnnnnnnnnnnnnnnnnnnnnnnnnnnnnnnnnnnnnnnnnnnnnnnnnnnnnnnnnnnnnnnnnnnnnnnnnnnnnnnnnnnnnnnnnnnnnnnnnnnnnnnnnnnnnnnnnnnnnnnnnnnnnnnnnnnnnnnnnnnnnnnnnnnnnnnnnnnnnnnnnnnnnnnnnnnnnnnnnnnnnnnnnnnnnnnnnnnnnnnnnnnnnnnnnnnnnnnnnnnnnnnnnnnnnnnnnnnnnnnnnnnnnnnnnnnnnnnnnnnnnnnnnnnnnnnnnnnnnnnnnnnnnnnnnnnnnnnnnnnnnnnnnnnnnnnnnnnnnnnnnnnnnnnnnnnnnnnnnnnnnnnnnnnnnnnnnnnnnnnnnnnnnnnnnnnnnnnnnnnnnnnnnnnnnnnnnnnnnnnnnnnnnnnnnnnnnnnnnnnnnnnnnnnnnnnnnnnnnnnnnnnnnnnnnnnnnnnnnnnnnnnnnnnnnnnnnnnnnnnnnnnnnnnnnnnnnnnnnnnnnnnnnnnnnnnnnnnnnnnnnnnnnnnnnnnnnnnnnnnnnnnnnnnnnnnnnnnnnnnnnnnnnnnnnnnnnnnnnnnnnnnnnnnnnnnnnnnnnnnnnnnnnnnnnnnnnnnnnnnnnnnnnnnnnnnnnnnnnnnnnnnnnnnnnnnnnnnnnnnnnnnnnnnnnnnnnnnnnnnnnnnnnnnnnnnnnnnnnnnnnnnnnnnnnnnnnnnnnnnnnnnnnnnnnnnnnnnnnnnnnnnnnnnnnnnnnnnnnnnnnnnnnnnnnnnnnnnnnnnnnnnnnnnnnnnnnnnnnnnnnnnnnnnnnnnnnnnnnnnnnnnnnnnnnnnnnnnnnnnnnnnnnnnnnnnnnnnnnnnnnnnnnnnnnnnnnnnnnnnnnnnnnnnnnnnnnnnnnnnnnnnnnnnnnnnnnnnnnnnnnnnnnnnnnnnnnnnnnnnnnnnnnnnnnnnnnnnnnnnnnnnnnnnnnnnnnnnnnnnnnnnnnnnnnnnnnnnnnnnnnnnnnnnnnnnnnnnnnnnnnnnnnnnnnnnnnnnnnnnnnnnnnnnnnnnnnnnnnnnnnnnnnnnnnnnnnnnnnnnnnnnnnnnnnnnnnnnnnnnnnnnnnnnnnnnnnnnnnnnnnnnnnnnnnnnnnnnnnnnnnnnnnnnnnnnnnnnnnnnnnnnnnnnnnnnnnnnnnnnnnnnnnnnnnnnnnnnnnnnnnnnnnnnnnnnnnnnnnnnnnnnnnnnnnnnnnnnnnnnnnnnnnnnnnnnnnnnnnnnnnnnnnnnnnnnnnnnnnnnnnnnnnnnnnnnnnnnnnnnnnnnnnnnnnnnnnnnnnnnnnnnnnnnnnnnnnnnnnnnnnnnnnnnnnnnnnnnnnnnnnnnnnnnnnnnnnnnnnnnnnnnnnnnnnnnnnnnnnnnnnnnnnnnnnnnnnnnnnnnnnnnnnnnnnnnnnnnnnnnnnnnnnnnnnnnnnnnnnnnnnnnnnnnnnnnnnnnnnnnnnnnnnnnnnnnnnnnnnnnnnnnnnnnnnnnnnnnnnnnnnnnnnnnnnnnnnnnnnnnnnnnnnnnnnnnnnnnnnnnnnnnnnnnnnnnnnnnnnnnnnnnnnnnnnnnnnnnnnnnnnnnnnnnnnnnnnnnnnnnnnnnnnnnnnnnnnnnnnnnnnnnnnnnnnnnnnnnnnnnnnnnnnnnnnnnnnnnnnnnnnnnnnnnnnnnnnnnnnnnnnnnnnnnnnnnnnnnnnnnnnnnnnnnnnnnnnnnnnnnnnnnnnnnnnnnnnnnnnnnnnnnnnnnnnnnnnnnnnnnnnnnnnnnnnnnnnnnnnnnnnnnnnnnnnnnnnnnnnnnnnnnnnnnnnnnnnnnnnnnnnnnnnnnnnnnnnnnnnnnnnnnnnnnnnnnnnnnnnnnnnnnnnnnnnnnnnnnnnnnnnnnnnnnnnnnnnnnnnnnnnnnnnnnnnnnnnnnnnnnnnnnnnnnnnnnnnnnnnnnnnnnnnnnnnnnnnnnnnnnnnnnnnnnnnnnnnnnnnnnnnnnnnnnnnnnnnnnnnnnnnnnnnnnnnnnnnnnnnnnnnnnnnnnnnnnnnnnnnnnnnnnnnnnnnnnnnnnnnnnnnnnnnnnnnnnnnnnnnnnnnnnnnnnnnnnnnnnnnnnnnnnnnnnnnnnnnnnnnnnnnnnnnnnnnnnnnnnnnnnnnnnnnnnnnnnnnnnnnnnnnnnnnnnnnnnnnnnnnnnnnnnnnnnnnnnnnnnnnnnnnnnnnnnnnnnnnnnnnnnnnnnnnnnnnnnnnnnnnnnnnnnnnnnnnnnnnnnnnnnnnnnnnnnnnnnnnnnnnnnnnnnnnnnnnnnnnnnnnnnnnnnnnnnnnnnnnnnnnnnnnnnnnnnnnnnnnnnnnnnnnnnnnnnnnnnnnnnnnnnnnnnnnnnnnnnnnnnnnnnnnnnnnnnnnnnnnnnnnnnnnnnnnnnnnnnnnnnnnnnnnnnnnnnnnnnnnnnnnnnnnnnnnnnnnnnnnnnnnnnnnnnnnnnnnnnnnnnnnnnnnnnnnnnnnnnnnnnnnnnnnnnnnnnnnnnnnnnnnnnnnnnnnnnnnnnnnnnnnnnnnnnnnnnnnnnnnnnnnnnnnnnnnnnnnnnnnnnnnnnnnnnnnnnnnnnnnnnnnnnnnnnnnnnnnnnnnnnnnnnnnnnnnnnnnnnnnnnnnnnnnnnnnnnnnnnnnnnnnnnnnnnnnnnnnnnnnnnnnnnnnnnnnnnnnnnnnnnnnnnnnnnnnnnnnnnnnnnnnnnnnnnnnnnnnnnnnnnnnnnnnnnnnnnnnnnnnnnnnnnnnnnnnnnnnnnnnnnnnnnnnnnnnnnnnnnnnnnnnnnnnnnnnnnnnnnnnnnnnnnnnnnnnnnnnnnnnnnnnnnnnnnnnnnnnnnnnnnnnnnnnnnnnnnnnnnnnnnnnnnnnnnnnnnnnnnnnnnnnnnnnnnnnnnnnnnnnnnnnnnnnnnnnnnnnnnnnnnnnnnnnnnnnnnnnnnnnnnnnnnnnnnnnnnnnnnnnnnnnnnnnnnnnnnnnnnnnnnnnnnnnnnnnnnnnnnnnnnnnnnnnnnnnnnnnnnnnnnnnnnnnnnnnnnnnnnnnnnnnnnnnnnnnnnnnnnnnnnnnnnnnnnnnnnnnnnnnnnnnnnnnnnnnnnnnnnnnnnnnnnnnnnnnnnnnnnnnnnnnnnnnnnnnnnnnnnnnnnnnnnnnnnnnnnnnnnnnnnnnnnnnnnnnnnnnnnnnnnnnnnnnnnnnnnnnnnnnnnnnnnnnnnnnnnnnnnnnnnnnnnnnnnnnnnnnnnnnnnnnnnnnnnnnnnnnnnnnnnnnnnnnnnnnnnnnnnnnnnnnnnnnnnnnnnnnnnnnnnnnnnnnnnnnnnnnnnnnnnnnnnnnnnnnnnnnnnnnnnnnnnnnnnnnnnnnnnnnnnnnnnnnnnnnnnnnnnnnnnnnnnnnnnnnnnnnnnnnnnnnnnnnnnnnnnnnnnnnnnnnnnnnnnnnnnnnnnnnnnnnnnnnnnnnnnnnnnnnnnnnnnnnnnnnnnnnnnnnnnnnnnnnnnnnnnnnnnnnnnnnnnnnnnnnnnnnnnnnnnnnnnnnnnnnnnnnnnnnnnnnnnnnnnnnnnnnnnnnnnnnnnnnnnnnnnnnnnnnnnnnnnnnnnnnnnnnnnnnnnnnnnnnnnnnnnnnnnnnnnnnnnnnnnnnnnnnnnnnnnnnnnnnnnnnnnnnnnnnnnnnnnnnnnnnnnnnnnnnnnnnnnnnnnnnnnnnnnnnnnnnnnnnnnnnnnnnnnnnnnnnnnnnnnnnnnnnnnnnnnnnnnnnnnnnnnnnnnnnnnnnnnnnnnnnnnnnnnnnnnnnnnnnnnnnnnnnnnnnnnnnnnnnnnnnnnnnnnnnnnnnnnnnnnnnnnnnnnnnnnnnnnnnnnnnnnnnnnnnnnnnnnnnnnnnnnnnnnnnnnnnnnnnnnnnnnnnnnnnnnnnnnnnnnnnnnnnnnnnnnnnnnnnnnnnnnnnnnnnnnnnnnnnnnnnnnnnnnnnnnnnnnnnnnnnnnnnnnnnnnnnnnnnnnnnnnnnnnnnnnnnnnnnnnnnnnnnnnnnnnnnnnnnnnnnnnnnnnnnnnnnnnnnnnnnnnnnnnnnnnnnnnnnnnnnnnnnnnnnnnnnnnnnnnnnnnnnnnnnnnnnnnnnnnnnnnnnnnnnnnnnnnnnnnnnnnnnnnnnnnnnnnnnnnnnnnnnnnnnnnnnnnnnnnnnnnnnnnnnnnnnnnnnnnnnnnnnnnnnnnnnnnnnnnnnnnnnnnnnnnnnnnnnnnnnnnnnnnnnnnnnnnnnnnnnnnnnnnnnnnnnnnnnnnnnnnnnnnnnnnnnnnnnnnnnnnnnnnnnnnnnnnnnnnnnnnnnnnnnnnnnnnnnnnnnnnnnnnnnnnnnnnnnnnnnnnnnnnnnnnnnnnnnnnnnnnnnnnnnnnnnnnnnnnnnnnnnnnnnnnnnnnnnnnnnnnnnnnnnnnnnnnnnnnnnnnnnnnnnnnnnnnnnnnnnnnnnnnnnnnnnnnnnnnnnnnnnnnnnnnnnnnnnnnnnnnnnnnnnnnnnnnnnnnnnnnnnnnnnnnnnnnnnnnnnnnnnnnnnnnnnnnnnnnnnnnnnnnnnnnnnnnnnnnnnnnnnnnnnnnnnnnnnnnnnnnnnnnnnnnnnnnnnnnnnnnnnnnnnnnnnnnnnnnnnnnnnnnnnnnnnnnnnnnnnnnnnnnnnnnnnnnnnnnnnnnnnnnnnnnnnnnnnnnnnnnnnnnnnnnnnnnnnnnnnnnnnnnnnnnnnnnnnnnnnnnnnnnnnnnnnnnnnnnnnnnnnnnnnnnnnnnnnnnnnnnnnnnnnnnnnnnnnnnnnnnnnnnnnnnnnnnnnnnnnnnnnnnnnnnnnnnnnnnnnnnnnnnnnnnnnnnnnnnnnnnnnnnnnnnnnnnnnnnnnnnnnnnnnnnnnnnnnnnnnnnnnnnnnnnnnnnnnnnnnnnnnnnnnnnnnnnnnnnnnnnnnnnnnnnnnnnnnnnnnnnnnnnnnnnnnnnnnnnnnnnnnnnnnnnnnnnnnnnnnnnnnnnnnnnnnnnnnnnnnnnnnnnnnnnnnnnnnnnnnnnnnnnnnnnnnnnnnnnnnnnnnnnnnnnnnnnnnnnnnnnnnnnnnnnnnnnnnnnnnnnnnnnnnnnnnnnnnnnnnnnnnnnnnnnnnnnnnnnnnnnnnnnnnnnnnnnnnnnnnnnnnnnnnnnnnnnnnnnnnnnnnnnnnnnnnnnnnnnnnnnnnnnnnnnnnnnnnnnnnnnnnnnnnnnnnnnnnnnnnnnnnnnnnnnnnnnnnnnnnnnnnnnnnnnnnnnnnnnnnnnnnnnnnnnnnnnnnnnnnnnnnnnnnnnnnnnnnnnnnnnnnnnnnnnnnnnnnnnnnnnnnnnnnnnnnnnnnnnnnnnnnnnnnnnnnnnnnnnnnnnnnnnnnnnnnnnnnnnnnnnnnnnnnnnnnnnnnnnnnnnnnnnnnnnnnnnnnnnnnnnnnnnnnnnnnnnnnnnnnnnnnnnnnnnnnnnnnnnnnnnnnnnnnnnnnnnnnnnnnnnnnnnnnnnnnnnnnnnnnnnnnnnnnnnnnnnnnnnnnnnnnnnnnnnnnnnnnnnnnnnnnnnnnnnnnnnnnnnnnnnnnnnnnnnnnnnnnnnnnnnnnnnnnnnnnnnnnnnnnnnnnnnnnnnnnnnnnnnnnnnnnnnnnnnnnnnnnnnnnnnnnnnnnnnnnnnnnnnnnnnnnnnnnnnnnnnnnnnnnnnnnnnnnnnnnnnnnnnnnnnnnnnnnnnnnnnnnnnnnnnnnnnnnnnnnnnnnnnnnnnnnnnnnnnnnnnnnnnnnnnnnnnnnnnnnnnnnnnnnnnnnnnnnnnnnnnnnnnnnnnnnnnnnnnnnnnnnnnnnnnnnnnnnnnnnnnnnnnnnnnnnnnnnnnnnnnnnnnnnnnnnnnnnnnnnnnnnnnnnnnnnnnnnnnnnnnnnnnnnnnnnnnnnnnnnnnnnnnnnnnnnnnnnnnnnnnnnnnnnnnnnnnnnnnnnnnnnnnnnnnnnnnnnnnnnnnnnnnnnnnnnnnnnnnnnnnnnnnnnnnnnnnnnnnnnnnnnnnnnnnnnnnnnnnnnnnnnnnnnnnnnnnnnnnnnnnnnnnnnnnnnnnnnnnnnnnnnnnnnnnnnnnnnnnnnnnnnnnnnnnnnnnnnnnnnnnnnnnnnnnnnnnnnnnnnnnnnnnnnnnnnnnnnnnnnnnnnnnnnnnnnnnnnnnnnnnnnnnnnnnnnnnnnnnnnnnnnnnnnnnnnnnnnnnnnnnnnnnnnnnnnnnnnnnnnnnnnnnnnnnnnnnnnnnnnnnnnnnnnnnnnnnnnnnnnnnnnnnnnnnnnnnnnnnnnnnnnnnnnnnnnnnnnnnnnnnnnnnnnnnnnnnnnnnnnnnnnnnnnnnnnnnnnnnnnnnnnnnnnnnnnnnnnnnnnnnnnnnnnnnnnnnnnnnnnnnnnnnnnnnnnnnnnnnnnnnnnnnnnnnnnnnnnnnnnnnnnnnnnnnnnnnnnnnnnnnnnnnnnnnnnnnnnnnnnnnnnnnnnnnnnnnnnnnnnnnnnnnnnnnnnnnnnnnnnnnnnnnnnnnnnnnnnnnnnnnnnnnnnnnnnnnnnnnnnnnnnnnnnnnnnnnnnnnnnnnnnnnnnnnnnnnnnnnnnnnnnnnnnnnnnnnnnnnnnnnnnnnnnnnnnnnnnnnnnnnnnnnnnnnnnnnnnnnnnnnnnnnnnnnnnnnnnnnnnnnnnnnnnnnnnnnnnnnnnnnnnnnnnnnnnnnnnnnnnnnnnnnnnnnnnnnnnnnnnnnnnnnnnnnnnnnnnnnnnnnnnnnnnnnnnnnnnnnnnnnnnnnnnnnnnnnnnnnnnnnnnnnnnnnnnnnnnnnnnnnnnnnnnnnnnnnnnnnnnnnnnnnnnnnnnnnnnnnnnnnnnnnnnnnnnnnnnnnnnnnnnnnnnnnnnnnnnnnnnnnnnnnnnnnnnnnnnnnnnnnnnnnnnnnnnnnnnnnnnnnnnnnnnnnnnnnnnnnnnnnnnnnnnnnnnnnnnnnnnnnnnnnnnnnnnnnnnnnnnnnnnnnnnnnnnnnnnnnnnnnnnnnnnnnnnnnnnnnnnnnnnnnnnnnnnnnnnnnnnnnnnnnnnnnnnnnnnnnnnnnnnnnnnnnnnnnnnnnnnnnnnnnnnnnnnnnnnnnnnnnnnnnnnnnnnnnnnnnnnnnnnnnnnnnnnnnnnnnnnnnnnnnnnnnnnnnnnnnnnnnnnnnnnnnnnnnnnnnnnnnnnnnnnnnnnnnnnnnnnnnnnnnnnnnnnnnnnnnnnnnnnnnnnnnnnnnnnnnnnnnnnnnnnnnnnnnnnnnnnnnnnnnnnnnnnnnnnnnnnnnnnnnnnnnnnnnnnnnnnnnnnnnnnnnnnnnnnnnnnnnnnnnnnnnnnnnnnnnnnnnnnnnnnnnnnnnnnnnnnnnnnnnnnnnnnnnnnnnnnnnnnnnnnnnnnnnnnnnnnnnnnnnnnnnnnnnnnnnnnnnnnnnnnnnnnnnnnnnnnnnnnnnnnnnnnnnnnnnnnnnnnnnnnnnnnnnnnnnnnnnnnnnnnnnnnnnnnnnnnnnnnnnnnnnnnnnnnnnnnnnnnnnnnnnnnnnnnnnnnnnnnnnnnnnnnnnnnnnnnnnnnnnnnnnnnnnnnnnnnnnnnnnnnnnnnnnnnnnnnnnnnnnnnnnnnnnnnnnnnnnnnnnnnnnnnnnnnnnnnnnnnnnnnnnnnnnnnnnnnnnnnnnnnnnnnnnnnnnnnnnnnnnnnnnnnnnnnnnnnnnnnnnnnnnnnnnnnnnnnnnnnnnnnnnnnnnnnnnnnnnnnnnnnnnnnnnnnnnnnnnnnnnnnnnnnnnnnnnnnnnnnnnnnnnnnnnnnnnnnnnnnnnnnnnnnnnnnnnnnnnnnnnnnnnnnnnnnnnnnnnnnnnnnnnnnnnnnnnnnnnnnnnnnnnnnnnnnnnnnnnnnnnnnnnnnnnnnnnnnnnnnnnnnnnnnnnnnnnnnnnnnnnnnnnnnnnnnnnnnnnnnnnnnnnnnnnnnnnnnnnnnnnnnnnnnnnnnnnnnnnnnnnnnnnnnnnnnnnnnnnnnnnnnnnnnnnnnnnnnnnnnnnnnnnnnnnnnnnnnnnnnnnnnnnnnnnnnnnnnnnnnnnnnnnnnnnnnnnnnnnnnnnnnnnnnnnnnnnnnnnnnnnnnnnnnnnnnnnnnnnnnnnnnnnnnnnnnnnnnnnnnnnnnnnnnnnnnnnnnnnnnnnnnnnnnnnnnnnnnnnnnnnnnnnnnnnnnnnnnnnnnnnnnnnnnnnnnnnnnnnnnnnnnnnnnnnnnnnnnnnnnnnnnnnnnnnnnnnnnnnnnnnnnnnnnnnnnnnnnnnnnnnnnnnnnnnnnnnnnnnnnnnnnnnnnnnnnnnnnnnnnnnnnnnnnnnnnnnnnnnnnnnnnnnnnnnnnnnnnnnnnnnnnnnnnnnnnnnnnnnnnnnnnnnnnnnnnnnnnnnnnnnnnnnnnnnnnnnnnnnnnnnnnnnnnnnnnnnnnnnnnnnnnnnnnnnnnnnnnnnnnnnnnnnnnnnnnnnnnnnnnnnnnnnnnnnnnnnnnnnnnnnnnnnnnnnnnnnnnnnnnnnnnnnnnnnnnnnnnnnnnnnnnnnnnnnnnnnnnnnnnnnnnnnnnnnnnnnnnnnnnnnnnnnnnnnnnnnnnnnnnnnnnnnnnnnnnnnnnnnnnnnnnnnnnnnnnnnnnnnnnnnnnnnnnnnnnnnnnnnnnnnnnnnnnnnnnnnnnnnnnnnnnnnnnnnnnnnnnnnnnnnnnnnnnnnnnnnnnnnnnnnnnnnnnnnnnnnnnnnnnnnnnnnnnnnnnnnnnnnnnnnnnnnnnnnnnnnnnnnnnnnnnnnnnnnnnnnnnnnnnnnnnnnnnnnnnnnnnnnnnnnnnnnnnnnnnnnnnnnnnnnnnnnnnnnnnnnnnnnnnnnnnnnnnnnnnnnnnnnnnnnnnnnnnnnnnnnnnnnnnnnnnnnnnnnnnnnnnnnnnnnnnnnnnnnnnnnnnnnnnnnnnnnnnnnnnnnnnnnnnnnnnnnnnnnnnnnnnnnnnnnnnnnnnnnnnnnnnnnnnnnnnnnnnnnnnnnnnnnnnnnnnnnnnnnnnnnnnnnnnnnnnnnnnnnnnnnnnnnnnnnnnnnnnnnnnnnnnnnnnnnnnnnnnnnnnnnnnnnnnnnnnnnnnnnnnnnnnnnnnnnnnnnnnnnnnnnnnnnnnnnnnnnnnnnnnnnnnnnnnnnnnnnnnnnnnnnnnnnnnnnnnnnnnnnnnnnnnnnnnnnnnnnnnnnnnnnnnnnnnnnnnnnnnnnnnnnnnnnnnnnnnnnnnnnnnnnnnnnnnnnnnnnnnnnnnnnnnnnnnnnnnnnnnnnnnnnnnnnnnnnnnnnnnnnnnnnnnnnnnnnnnnnnnnnnnnnnnnnnnnnnnnnnnnnnnnnnnnnnnnnnnnnnnnnnnnnnnnnnnnnnnnnnnnnnnnnnnnnnnnnnnnnnnnnnnnnnnnnnnnnnnnnnnnnnnnnnnnnnnnnnnnnnnnnnnnnnnnnnnnnnnnnnnnnnnnnnnnnnnnnnnnnnnnnnnnnnnnnnnnnnnnnnnnnnnnnnnnnnnnnnnnnnnnnnnnnnnnnnnnnnnnnnnnnnnnnnnnnnnnnnnnnnnnnnnnnnnnnnnnnnnnnnnnnnnnnnnnnnnnnnnnnnnnnnnnnnnnnnnnnnnnnnnnnnnnnnnnnnnnnnnnnnnnnnnnnnnnnnnnnnnnnnnnnnnnnnnnnnnnnnnnnnnnnnnnnnnnnnnnnnnnnnnnnnnnnnnnnnnnnnnnnnnnnnnnnnnnnnnnnnnnnnnnnnnnnnnnnnnnnnnnnnnnnnnnnnnnnnnnnnnnnnnnnnnnnnnnnnnnnnnnnnnnnnnnnnnnnnnnnnnnnnnnnnnnnnnnnnnnnnnnnnnnnnnnnnnnnnnnnnnnnnnnnnnnnnnnnnnnnnnnnnnnnnnnnnnnnnnnnnnnnnnnnnnnnnnnnnnnnnnnnnnnnnnnnnnnnnnnnnnnnnnnnnnnnnnnnnnnnnnnnnnnnnnnnnnnnnnnnnnnnnnnnnnnnnnnnnnnnnnnnnnnnnnnnnnnnnnnnnnnnnnnnnnnnnnnnnnnnnnnnnnnnnnnnnnnnnnnnnnnnnnnnnnnnnnnnnnnnnnnnnnnnnnnnnnnnnnnnnnnnnnnnnnnnnnnnnnnnnnnnnnnnnnnnnnnnnnnnnnnnnnnnnnnnnnnnnnnnnnnnnnnnnnnnnnnnnnnnnnnnnnnnnnnnnnnnnnnnnnnnnnnnnnnnnnnnnnnnnnnnnnnnnnnnnnnnnnnnnnnnnnnnnnnnnnnnnnnnnnnnnnnnnnnnnnnnnnnnnnnnnnnnnnnnnnnnnnnnnnnnnnnnnnnnnnnnnnnnnnnnnnnnnnnnnnnnnnnnnnnnnnnnnnnnnnnnnnnnnnnnnnnnnnnnnnnnnnnnnnnnnnnnnnnnnnnnnnnnnnnnnnnnnnnnnnnnnnnnnnnnnnnnnnnnnnnnnnnnnnnnnnnnnnnnnnnnnnnnnnnnnnnnnnnnnnnnnnnnnnnnnnnnnnnnnnnnnnnnnnnnnnnnnnnnnnnnnnnnnnnnnnnnnnnnnnnnnnnnnnnnnnnnnnnnnnnnnnnnnnnnnnnnnnnnnnnnnnnnnnnnnnnnnnnnnnnnnnnnnnnnnnnnnnnnnnnnnnnnnnnnnnnnnnnnnnnnnnnnnnnnnnnnnnnnnnnnnnnnnnnnnnnnnnnnnnnnnnnnnnnnnnnnnnnnnnnnnnnnnnnnnnnnnnnnnnnnnnnnnnnnnnnnnnnnnnnnnnnnnnnnnnnnnnnnnnnnnnnnnnnnnnnnnnnnnnnnnnnnnnnnnnnnnnnnnnnnnnnnnnnnnnnnnnnnnnnnnnnnnnnnnnnnnnnnnnnnnnnnnnnnnnnnnnnnnnnnnnnnnnnnnnnnnnnnnnnnnnnnnnnnnnnnnnnnnnnnnnnnnnnnnnnnnnnnnnnnnnnnnnnnnnnnnnnnnnnnnnnnnnnnnnnnnnnnnnnnnnnnnnnnnnnnnnnnnnnnnnnnnnnnnnnnnnnnnnnnnnnnnnnnnnnnnnnnnnnnnnnnnnnnnnnnnnnnnnnnnnnnnnnnnnnnnnnnnnnnnnnnnnnnnnnnnnnnnnnnnnnnnnnnnnnnnnnnnnnnnnnnnnnnnnnnnnnnnnnnnnnnnnnnnnnnnnnnnnnnnnnnnnnnnnnnnnnnnnnnnnnnnnnnnnnnnnnnnnnnnnnnnnnnnnnnnnnnnnnnnnnnnnnnnnnnnnnnnnnnnnnnnnnnnnnnnnnnnnnnnnnnnnnnnnnnnnnnnnnnnnnnnnnnnnnnnnnnnnnnnnnnnnnnnnnnnnnnnnnnnnnnnnnnnnnnnnnnnnnnnnnnnnnnnnnnnnnnnnnnnnnnnnnnnnnnnnnnnnnnnnnnnnnnnnnnnnnnnnnnnnnnnnnnnnnnnnnnnnnnnnnnnnnnnnnnnnnnnnnnnnnnnnnnnnnnnnnnnnnnnnnnnnnnnnnnnnnnnnnnnnnnnnnnnnnnnnnnnnnnnnnnnnnnnnnnnnnnnnnnnnnnnnnnnnnnnnnnnnnnnnnnnnnnnnnnnnnnnnnnnnnnnnnnnnnnnnnnnnnnnnnnnnnnnnnnnnnnnnnnnnnnnnnnnnnnnnnnnnnnnnnnnnnnnnnnnnnnnnnnnnnnnnnnnnnnnnnnnnnnnnnnnnnnnnnnnnnnnnnnnnnnnnnnnnnnnnnnnnnnnnnnnnnnnnnnnnnnnnnnnnnnnnnnnnnnnnnnnnnnnnnnnnnnnnnnnnnnnnnnnnnnnnnnnnnnnnnnnnnnnnnnnnnnnnnnnnnnnnnnnnnnnnnnnnnnnnnnnnnnnnnnnnnnnnnnnnnnnnnnnnnnnnnnnnnnnnnnnnnnnnnnnnnnnnnnnnnnnnnnnnnnnnnnnnnnnnnnnnnnnnnnnnnnnnnnnnnnnnnnnnnnnnnnnnnnnnnnnnnnnnnnnnnnnnnnnnnnnnnnnnnnnnnnnnnnnnnnnnnnnnnnnnnnnnnnnnnnnnnnnnnnnnnnnnnnnnnnnnnnnnnnnnnnnnnnnnnnnnnnnnnnnnnnnnnnnnnnnnnnnnnnnnnnnnnnnnnnnnnnnnnnnnnnnnnnnnnnnnnnnnnnnnnnnnnnnnnnnnnnnnnnnnnnnnnnnnnnnnnnnnnnnnnnnnnnnnnnnnnnnnnnnnnnnnnnnnnnnnnnnnnnnnnnnnnnnnnnnnnnnnnnnnnnnnnnnnnnnnnnnnnnnnnnnnnnnnnnnnnnnnnnnnnnnnnnnnnnnnnnnnnnnnnnnnnnnnnnnnnnnnnnnnnnnnnnnnnnnnnnnnnnnnnnnnnnnnnnnnnnnnnnnnnnnnnnnnnnnnnnnnnnnnnnnnnnnnnnnnnnnnnnnnnnnnnnnnnnnnnnnnnnnnnnnnnnnnnnnnnnnnnnnnnnnnnnnnnnnnnnnnnnnnnnnnnnnnnnnnnnnnnnnnnnnnnnnnnnnnnnnnnnnnnnnnnnnnnnnnnnnnnnnnnnnnnnnnnnnnnnnnnnnnnnnnnnnnnnnnnnnnnnnnnnnnnnnnnnnnnnnnnnnnnnnnnnnnnnnnnnnnnnnnnnnnnnnnnnnnnnnnnnnnnnnnnnnnnnnnnnnnnnnnnnnnnnnnnnnnnnnnnnnnnnnnnnnnnnnnnnnnnnnnnnnnnnnnnnnnnnnnnnnnnnnnnnnnnnnnnnnnnnnnnnnnnnnnnnnnnnnnnnnnnnnnnnnnnnnnnnnnnnnnnnnnnnnnnnnnnnnnnnnnnnnnnnnnnnnnnnnnnnnnnnnnnnnnnnnnnnnnnnnnnnnnnnnnnnnnnnnnnnnnnnnnnnnnnnnnnnnnnnnnnnnnnnnnnnnnnnnnnnnnnnnnnnnnnnnnnnnnnnnnnnnnnnnnnnnnnnnnnnnnnnnnnnnnnnnnnnnnnnnnnnnnnnnnnnnnnnnnnnnnnnnnnnnnnnnnnnnnnnnnnnnnnnnnnnnnnnnnnnnnnnnnnnnnnnnnnnnnnnnnnnnnnnnnnnnnnnnnnnnnnnnnnnnnnnnnnnnnnnnnnnnnnnnnnnnnnnnnnnnnnnnnnnnnnnnnnnnnnnnnnnnnnnnnnnnnnnnnnnnnnnnnnnnnnnnnnnnnnnnnnnnnnnnnnnnnnnnnnnnnnnnnnnnnnnnnnnnnnnnnnnnnnnnnnnnnnnnnnnnnnnnnnnnnnnnnnnnnnnnnnnnnnnnnnnnnnnnnnnnnnnnnnnnnnnnnnnnnnnnnnnnnnnnnnnnnnnnnnnnnnnnnnnnnnnnnnnnnnnnnnnnnnnnnnnnnnnnnnnnnnnnnnnnnnnnnnnnnnnnnnnnnnnnnnnnnnnnnnnnnnnnnnnnnnnnnnnnnnnnnnnnnnnnnnnnnnnnnnnnnnnnnnnnnnnnnnnnnnnnnnnnnnnnnnnnnnnnnnnnnnnnnnnnnnnnnnnnnnnnnnnnnnnnnnnnnnnnnnnnnnnnnnnnnnnnnnnnnnnnnnnnnnnnnnnnnnnnnnnnnnnnnnnnnnnnnnnnnnnnnnnnnnnnnnnnnnnnnnnnnnnnnnnnnnnnnnnnnnnnnnnnnnnnnnnnnnnnnnnnnnnnnnnnnnnnnnnnnnnnnnnnnnnnnnnnnnnnnnnnnnnnnnnnnnnnnnnnnnnnnnnnnnnnnnnnnnnnnnnnnnnnnnnnnnnnnnnnnnnnnnnnnnnnnnnnnnnnnnnnnnnnnnnnnnnnnnnnnnnnnnnnnnnnnnnnnnnnnnnnnnnnnnnnnnnnnnnnnnnnnnnnnnnnnnnnnnnnnnnnnnnnnnnnnnnnnnnnnnnnnnnnnnnnnnnnnnnnnnnnnnnnnnnnnnnnnnnnnnnnnnnnnnnnnnnnnnnnnnnnnnnnnnnnnnnnnnnnnnnnnnnnnnnnnnnnnnnnnnnnnnnnnnnnnnnnnnnnnnnnnnnnnnnnnnnnnnnnnnnnnnnnnnnnnnnnnnnnnnnnnnnnnnnnnnnnnnnnnnnnnnnnnnnnnnnnnnnnnnnnnnnnnnnnnnnnnnnnnnnnnnnnnnnnnnnnnnnnnnnnnnnnnnnnnnnnnnnnnnnnnnnnnnnnnnnnnnnnnnnnnnnnnnnnnnnnnnnnnnnnnnnnnnnnnnnnnnnnnnnnnnnnnnnnnnnnnnnnnnnnnnnnnnnnnnnnnnnnnnnnnnnnnnnnnnnnnnnnnnnnnnnnnnnnnnnnnnnnnnnnnnnnnnnnnnnnnnnnnnnnnnnnnnnnnnnnnnnnnnnnnnnnnnnnnnnnnnnnnnnnnnnnnnnnnnnnnnnnnnnnnnnnnnnnnnnnnnnnnnnnnnnnnnnnnnnnnnnnnnnnnnnnnnnnnnnnnnnnnnnnnnnnnnnnnnnnnnnnnnnnnnnnnnnnnnnnnnnnnnnnnnnnnnnnnnnnnnnnnnnnnnnnnnnnnnnnnnnnnnnnnnnnnnnnnnnnnnnnnnnnnnnnnnnnnnnnnnnnnnnnnnnnnnnnnnnnnnnnnnnnnnnnnnnnnnnnnnnnnnnnnnnnnnnnnnnnnnnnnnnnnnnnnnnnnnnnnnnnnnnnnnnnnnnnnnnnnnnnnnnnnnnnnnnnnnnnnnnnnnnnnnnnnnnnnnnnnnnnnnnnnnnnnnnnnnnnnnnnnnnnnnnnnnnnnnnnnnnnnnnnnnnnnnnnnnnnnnnnnnnnnnnnnnnnnnnnnnnnnnnnnnnnnnnnnnnnnnnnnnnnnnnnnnnnnnnnnnnnnnnnnnnnnnnnnnnnnnnnnnnnnnnnnnnnnnnnnnnnnnnnnnnnnnnnnnnnnnnnnnnnnnnnnnnnnnnnnnnnnnnnnnnnnnnnnnnnnnnnnnnnnnnnnnnnnnnnnnnnnnnnnnnnnnnnnnnnnnnnnnnnnnnnnnnnnnnnnnnnnnnnnnnnnnnnnnnnnnnnnnnnnnnnnnnnnnnnnnnnnnnnnnnnnnnnnnnnnnnnnnnnnnnnnnnnnnnnnnnnnnnnnnnnnnnnnnnnnnnnnnnnnnnnnnnnnnnnnnnnnnnnnnnnnnnnnnnnnnnnnnnnnnnnnnnnnnnnnnnnnnnnnnnnnnnnnnnnnnnnnnnnnnnnnnnnnnnnnnnnnnnnnnnnnnnnnnnnnnnnnnnnnnnnnnnnnnnnnnnnnnnnnnnnnnnnnnnnnnnnnnnnnnnnnnnnnnnnnnnnnnnnnnnnnnnnnnnnnnnnnnnnnnnnnnnnnnnnnnnnnnnnnnnnnnnnnnnnnnnnnnnnnnnnnnnnnnnnnnnnnnnnnnnnnnnnnnnnnnnnnnnnnnnnnnnnnnnnnnnnnnnnnnnnnnnnnnnnnnnnnnnnnnnnnnnnnnnnnnnnnnnnnnnnnnnnnnnnnnnnnnnnnnnnnnnnnnnnnnnnnnnnnnnnnnnnnnnnnnnnnnnnnnnnnnnnnnnnnnnnnnnnnnnnnnnnnnnnnnnnnnnnnnnnnnnnnnnnnnnnnnnnnnnnnnnnnnnnnnnnnnnnnnnnnnnnnnnnnnnnnnnnnnnnnnnnnnnnnnnnnnnnnnnnnnnnnnnnnnnnnnnnnnnnnnnnnnnnnnnnnnnnnnnnnnnnnnnnnnnnnnnnnnnnnnnnnnnnnnnnnnnnnnnnnnnnnnnnnnnnnnnnnnnnnnnnnnnnnnnnnnnnnnnnnnnnnnnnnnnnnnnnnnnnnnnnnnnnnnnnnnnnnnnnnnnnnnnnnnnnnnnnnnnnnnnnnnnnnnnnnnnnnnnnnnnnnnnnnnnnnnnnnnnnnnnnnnnnnnnnnnnnnnnnnnnnnnnnnnnnnnnnnnnnnnnnnnnnnnnnnnnnnnnnnnnnnnnnnnnnnnnnnnnnnnnnnnnnnnnnnnnnnnnnnnnnnnnnnnnnnnnnnnnnnnnnnnnnnnnnnnnnnnnnnnnnnnnnnnnnnnnnnnnnnnnnnnnnnnnnnnnnnnnnnnnnnnnnnnnnnnnnnnnnnnnnnnnnnnnnnnnnnnnnnnnnnnnnnnnnnnnnnnnnnnnnnnnnnnnnnnnnnnnnnnnnnnnnnnnnnnnnnnnnnnnnnnnnnnnnnnnnnnnnnnnnnnnnnnnnnnnnnnnnnnnnnnnnnnnnnnnnnnnnnnnnnnnnnnnnnnnnnnnnnnnnnnnnnnnnnnnnnnnnnnnnnnnnnnnnnnnnnnnnnnnnnnnnnnnnnnnnnnnnnnnnnnnnnnnnnnnnnnnnnnnnnnnnnnnnnnnnnnnnnnnnnnnnnnnnnnnnnnnnnnnnnnnnnnnnnnnnnnnnnnnnnnnnnnnnnnnnnnnnnnnnnnnnnnnnnnnnnnnnnnnnnnnnnnnnnnnnnnnnnnnnnnnnnnnnnnnnnnnnnnnnnnnnnnnnnnnnnnnnnnnnnnnnnnnnnnnnnnnnnnnnnnnnnnnnnnnnnnnnnnnnnnnnnnnnnnnnnnnnnnnnnnnnnnnnnnnnnnnnnnnnnnnnnnnnnnnnnnnnnnnnnnnnnnnnnnnnnnnnnnnnnnnnnnnnnnnnnnnnnnnnnnnnnnnnnnnnnnnnnnnnnnnnnnnnnnnnnnnnnnnnnnnnnnnnnnnnnnnnnnnnnnnnnnnnnnnnnnnnnnnnnnnnnnnnnnnnnnnnnnnnnnnnnnnnnnnnnnnnnnnnnnnnnnnnnnnnnnnnnnnnnnnnnnnnnnnnnnnnnnnnnnnnnnnnnnnnnnnnnnnnnnnnnnnnnnnnnnnnnnnnnnnnnnnnnnnnnnnnnnnnnnnnnnnnnnnnnnnnnnnnnnnnnnnnnnnnnnnnnnnnnnnnnnnnnnnnnnnnnnnnnnnnnnnnnnnnnnnnnnnnnnnnnnnnnnnnnnnnnnnnnnnnnnnnnnnnnnnnnnnnnnnnnnnnnnnnnnnnnnnnnnnnnnnnnnnnnnnnnnnnnnnnnnnnnnnnnnnnnnnnnnnnnnnnnnnnnnnnnnnnnnnnnnnnnnnnnnnnnnnnnnnnnnnnnnnnnnnnnnnnnnnnnnnnnnnnnnnnnnnnnnnnnnnnnnnnnnnnnnnnnnnnnnnnnnnnnnnnnnnnnnnnnnnnnnnnnnnnnnnnnnnnnnnnnnnnnnnnnnnnnnnnnnnnnnnnnnnnnnnnnnnnnnnnnnnnnnnnnnnnnnnnnnnnnnnnnnnnnnnnnnnnnnnnnnnnnnnnnnnnnnnnnnnnnnnnnnnnnnnnnnnnnnnnnnnnnnnnnnnnnnnnnnnnnnnnnnnnnnnnnnnnnnnnnnnnnnnnnnnnnnnnnnnnnnnnnnnnnnnnnnnnnnnnnnnnnnnnnnnnnnnnnnnnnnnnnnnnnnnnnnnnnnnnnnnnnnnnnnnnnnnnnnnnnnnnnnnnnnnnnnnnnnnnnnnnnnnnnnnnnnnnnnnnnnnnnnnnnnnnnnnnnnnnnnnnnnnnnnnnnnnnnnnnnnnnnnnnnnnnnnnnnnnnnnnnnnnnnnnnnnnnnnnnnnnnnnnnnnnnnnnnnnnnnnnnnnnnnnnnnnnnnnnnnnnnnnnnnnnnnnnnnnnnnnnnnnnnnnnnnnnnnnnnnnnnnnnnnnnnnnnnnnnnnnnnnnnnnnnnnnnnnnnnnnnnnnnnnnnnnnnnnnnnnnnnnnnnnnnnnnnnnnnnnnnnnnnnnnnnnnnnnnnnnnnnnnnnnnnnnnnnnnnnnnnnnnnnnnnnnnnnnnnnnnnnnnnnnnnnnnnnnnnnnnnnnnnnnnnnnnnnnnnnnnnnnnnnnnnnnnnnnnnnnnnnnnnnnnnnnnnnnnnnnnnnnnnnnnnnnnnnnnnnnnnnnnnnnnnnnnnnnnnnnnnnnnnnnnnnnnnnnnnnnnnnnnnnnnnnnnnnnnnnnnnnnnnnnnnnnnnnnnnnnnnnnnnnnnnnnnnnnnnnnnnnnnnnnnnnnnnnnnnnnnnnnnnnnnnnnnnnnnnnnnnnnnnnnnnnnnnnnnnnnnnnnnnnnnnnnnnnnnnnnnnnnnnnnnnnnnnnnnnnnnnnnnnnnnnnnnnnnnnnnnnnnnnnnnnnnnnnnnnnnnnnnnnnnnnnnnnnnnnnnnnnnnnnnnnnnnnnnnnnnnnnnnnnnnnnnnnnnnnnnnnnnnnnnnnnnnnnnnnnnnnnnnnnnnnnnnnnnnnnnnnnnnnnnnnnnnnnnnnnnnnnnnnnnnnnnnnnnnnnnnnnnnnnnnnnnnnnnnnnnnnnnnnnnnnnnnnnnnnnnnnnnnnnnnnnnnnnnnnnnnnnnnnnnnnnnnnnnnnnnnnnnnnnnnnnnnnnnnnnnnnnnnnnnnnnnnnnnnnnnnnnnnnnnnnnnnnnnnnnnnnnnnnnnnnnnnnnnnnnnnnnnnnnnnnnnnnnnnnnnnnnnnnnnnnnnnnnnnnnnnnnnnnnnnnnnnnnnnnnnnnnnnnnnnnnnnnnnnnnnnnnnnnnnnnnnnnnnnnnnnnnnnnnnnnnnnnnnnnnnnnnnnnnnnnnnnnnnnnnnnnnnnnnnnnnnnnnnnnnnnnnnnnnnnnnnnnnnnnnnnnnnnnnnnnnnnnnnnnnnnnnnnnnnnnnnnnnnnnnnnnnnnnnnnnnnnnnnnnnnnnnnnnnnnnnnnnnnnnnnnnnnnnnnnnnnnnnnnnnnnnnnnnnnnnnnnnnnnnnnnnnnnnnnnnnnnnnnnnnnnnnnnnnnnnnnnnnnnnnnnnnnnnnnnnnnnnnnnnnnnnnnnnnnnnnnnnnnnnnnnnnnnnnnnnnnnnnnnnnnnnnnnnnnnnnnnnnnnnnnnnnnnnnnnnnnnnnnnnnnnnnnnnnnnnnnnnnnnnnnnnnnnnnnnnnnnnnnnnnnnnnnnnnnnnnnnnnnnnnnnnnnnnnnnnnnnnnnnnnnnnnnnnnnnnnnnnnnnnnnnnnnnnnnnnnnnnnnnnnnnnnnnnnnnnnnnnnnnnnnnnnnnnnnnnnnnnnnnnnnnnnnnnnnnnnnnnnnnnnnnnnnnnnnnnnnnnnnnnnnnnnnnnnnnnnnnnnnnnnnnnnnnnnnnnnnnnnnnnnnnnnnnnnnnnnnnnnnnnnnnnnnnnnnnnnnnnnnnnnnnnnnnnnnnnnnnnnnnnnnnnnnnnnnnnnnnnnnnnnnnnnnnnnnnnnnnnnnnnnnnnnnnnnnnnnnnnnnnnnnnnnnnnnnnnnnnnnnnnnnnnnnnnnnnnnnnnnnnnnnnnnnnnnnnnnnnnnnnnnnnnnnnnnnnnnnnnnnnnnnnnnnnnnnnnnnnnnnnnnnnnnnnnnnnnnnnnnnnnnnnnnnnnnnnnnnnnnnnnnnnnnnnnnnnnnnnnnnnnnnnnnnnnnnnnnnnnnnnnnnnnnnnnnnnnnnnnnnnnnnnnnnnnnnnnnnnnnnnnnnnnnnnnnnnnnnnnnnnnnnnnnnnnnnnnnnnnnnnnnnnnnnnnnnnnnnnnnnnnnnnnnnnnnnnnnnnnnnnnnnnnnnnnnnnnnnnnnnnnnnnnnnnnnnnnnnnnnnnnnnnnnnnnnnnnnnnnnnnnnnnnnnnnnnnnnnnnnnnnnnnnnnnnnnnnnnnnnnnnnnnnnnnnnnnnnnnnnnnnnnnnnnnnnnnnnnnnnnnnnnnnnnnnnnnnnnnnnnnnnnnnnnnnnnnnnnnnnnnnnnnnnnnnnnnnnnnnnnnnnnnnnnnnnnnnnnnnnnnnnnnnnnnnnnnnnnnnnnnnnnnnnnnnnnnnnnnnnnnnnnnnnnnnnnnnnnnnnnnnnnnnnnnnnnnnnnnnnnnnnnnnnnnnnnnnnnnnnnnnnnnnnnnnnnnnnnnnnnnnnnnnnnnnnnnnnnnnnnnnnnnnnnnnnnnnnnnnnnnnnnnnnnnnnnnnnnnnnnnnnnnnnnnnnnnnnnnnnnnnnnnnnnnnnnnnnnnnnnnnnnnnnnnnnnnnnnnnnnnnnnnnnnnnnnnnnnnnnnnnnnnnnnnnnnnnnnnnnnnnnnnnnnnnnnnnnnnnnnnnnnnnnnnnnnnnnnnnnnnnnnnnnnnnnnnnnnnnnnnnnnnnnnnnnnnnnnnnnnnnnnnnnnnnnnnnnnnnnnnnnnnnnnnnnnnnnnnnnnnnnnnnnnnnnnnnnnnnnnnnnnnnnnnnnnnnnnnnnnnnnnnnnnnnnnnnnnnnnnnnnnnnnnnnnnnnnnnnnnnnnnnnnnnnnnnnnnnnnnnnnnnnnnnnnnnnnnnnnnnnnnnnnnnnnnnnnnnnnnnnnnnnnnnnnnnnnnnnnnnnnnnnnnnnnnnnnnnnnnnnnnnnnnnnnnnnnnnnnnnnnnnnnnnnnnnnnnnnnnnnnnnnnnnnnnnnnnnnnnnnnnnnnnnnnnnnnnnnnnnnnnnnnnnnnnnnnnnnnnnnnnnnnnnnnnnnnnnnnnnnnnnnnnnnnnnnnnnnnnnnnnnnnnnnnnnnnnnnnnnnnnnnnnnnnnnnnnnnnnnnnnnnnnnnnnnnnnnnnnnnnnnnnnnnnnnnnnnnnnnnnnnnnnnnnnnnnnnnnnnnnnnnnnnnnnnnnnnnnnnnnnnnnnnnnnnnnnnnnnnnnnnnnnnnnnnnnnnnnnnnnnnnnnnnnnnnnnnnnnnnnnnnnnnnnnnnnnnnnnnnnnnnnnnnnnnnnnnnnnnnnnnnnnnnnnnnnnnnnnnnnnnnnnnnnnnnnnnnnnnnnnnnnnnnnnnnnnnnnnnnnnnnnnnnnnnnnnnnnnnnnnnnnnnnnnnnnnnnnnnnnnnnnnnnnnnnnnnnnnnnnnnnnnnnnnnnnnnnnnnnnnnnnnnnnnnnnnnnnnnnnnnnnnnnnnnnnnnnnnnnnnnnnnnnnnnnnnnnnnnnnnnnnnnnnnnnnnnnnnnnnnnnnnnnnnnnnnnnnnnnnnnnnnnnnnnnnnnnnnnnnnnnnnnnnnnnnnnnnnnnnnnnnnnnnnnnnnnnnnnnnnnnnnnnnnnnnnnnnnnnnnnnnnnnnnnnnnnnnnnnnnnnnnnnnnnnnnnnnnnnnnnnnnnnnnnnnnnnnnnnnnnnnnnnnnnnnnnnnnnnnnnnnnnnnnnnnnnnnnnnnnnnnnnnnnnnnnnnnnnnnnnnnnnnnnnnnnnnnnnnnnnnnnnnnnnnnnnnnnnnnnnnnnnnnnnnnnnnnnnnnnnnnnnnnnnnnnnnnnnnnnnnnnnnnnnnnnnnnnnnnnnnnnnnnnnnnnnnnnnnnnnnnnnnnnnnnnnnnnnnnnnnnnnnnnnnnnnnnnnnnnnnnnnnnnnnnnnnnnnnnnnnnnnnnnnnnnnnnnnnnnnnnnnnnnnnnnnnnnnnnnnnnnnnnnnnnnnnnnnnnnnnnnnnnnnnnnnnnnnnnnnnnnnnnnnnnnnnnnnnnnnnnnnnnnnnnnnnnnnnnnnnnnnnnnnnnnnnnnnnnnnnnnnnnnnnnnnnnnnnnnnnnnnnnnnnnnnnnnnnnnnnnnnnnnnnnnnnnnnnnnnnnnnnnnnnnnnnnnnnnnnnnnnnnnnnnnnnnnnnnnnnnnnnnnnnnnnnnnnnnnnnnnnnnnnnnnnnnnnnnnnnnnnnnnnnnnnnnnnnnnnnnnnnnnnnnnnnnnnnnnnnnnnnnnnnnnnnnnnnnnnnnnnnnnnnnnnnnnnnnnnnnnnnnnnnnnnnnnnnnnnnnnnnnnnnnnnnnnnnnnnnnnnnnnnnnnnnnnnnnnnnnnnnnnnnnnnnnnnnnnnnnnnnnnnnnnnnnnnnnnnnnnnnnnnnnnnnnnnnnnnnnnnnnnnnnnnnnnnnnnnnnnnnnnnnnnnnnnnnnnnnnnnnnnnnnnnnnnnnnnnnnnnnnnnnnnnnnnnnnnnnnnnnnnnnnnnnnnnnnnnnnnnnnnnnnnnnnnnnnnnnnnnnnnnnnnnnnnnnnnnnnnnnnnnnnnnnnnnnnnnnnnnnnnnnnnnnnnnnnnnnnnnnnnnnnnnnnnnnnnnnnnnnnnnnnnnnnnnnnnnnnnnnnnnnnnnnnnnnnnnnnnnnnnnnnnnnnnnnnnnnnnnnnnnnnnnnnnnnnnnnnnnnnnnnnnnnnnnnnnnnnnnnnnnnnnnnnnnnnnnnnnnnnnnnnnnnnnnnnnnnnnnnnnnnnnnnnnnnnnnnnnnnnnnnnnnnnnnnnnnnnnnnnnnnnnnnnnnnnnnnnnnnnnnnnnnnnnnnnnnnnnnnnnnnnnnnnnnnnnnnnnnnnnnnnnnnnnnnnnnnnnnnnnnnnnnnnnnnnnnnnnnnnnnnnnnnnnnnnnnnnnnnnnnnnnnnnnnnnnnnnnnnnnnnnnnnnnnnnnnnnnnnnnnnnnnnnnnnnnnnnnnnnnnnnnnnnnnnnnnnnnnnnnnnnnnnnnnnnnnnnnnnnnnnnnnnnnnnnnnnnnnnnnnnnnnnnnnnnnnnnnnnnnnnnnnnnnnnnnnnnnnnnnnnnnnnnnnnnnnnnnnnnnnnnnnnnnnnnnnnnnnnnnnnnnnnnnnnnnnnnnnnnnnnnnnnnnnnnnnnnnnnnnnnnnnnnnnnnnnnnnnnnnnnnnnnnnnnnnnnnnnnnnnnnnnnnnnnnnnnnnnnnnnnnnnnnnnnnnnnnnnnnnnnnnnnnnnnnnnnnnnnnnnnnnnnnnnnnnnnnnnnnnnnnnnnnnnnnnnnnnnnnnnnnnnnnnnnnnnnnnnnnnnnnnnnnnnnnnnnnnnnnnnnnnnnnnnnnnnnnnnnnnnnnnnnnnnnnnnnnnnnnnnnnnnnnnnnnnnnnnnnnnnnnnnnnnnnnnnnnnnnnnnnnnnnnnnnnnnnnnnnnnnnnnnnnnnnnnnnnnnnnnnnnnnnnnnnnnnnnnnnnnnnnnnnnnnnnnnnnnnnnnnnnnnnnnnnnnnnnnnnnnnnnnnnnnnnnnnnnnnnnnnnnnnnnnnnnnnnnnnnnnnnnnnnnnnnnnnnnnnnnnnnnnnnnnnnnnnnnnnnnnnnnnnnnnnnnnnnnnnnnnnnnnnnnnnnnnnnnnnnnnnnnnnnnnnnnnnnnnnnnnnnnnnnnnnnnnnnnnnnnnnnnnnnnnnnnnnnnnnnnnnnnnnnnnnnnnnnnnnnnnnnnnnnnnnnnnnnnnnnnnnnnnnnnnnnnnnnnnnnnnnnnnnnnnnnnnnnnnnnnnnnnnnnnnnnnnnnnnnnnnnnnnnnnnnnnnnnnnnnnnnnnnnnnnnnnnnnnnnnnnnnnnnnnnnnnnnnnnnnnnnnnnnnnnnnnnnnnnnnnnnnnnnnnnnnnnnnnnnnnnnnnnnnnnnnnnnnnnnnnnnnnnnnnnnnnnnnnnnnnnnnnnnnnnnnnnnnnnnnnnnnnnnnnnnnnnnnnnnnnnnnnnnnnnnnnnnnnnnnnnnnnnnnnnnnnnnnnnnnnnnnnnnnnnnnnnnnnnnnnnnnnnnnnnnnnnnnnnnnnnnnnnnnnnnnnnnnnnnnnnnnnnnnnnnnnnnnnnnnnnnnnnnnnnnnnnnnnnnnnnnnnnnnnnnnnnnnnnnnnnnnnnnnnnnnnnnnnnnnnnnnnnnnnnnnnnnnnnnnnnnnnnnnnnnnnnnnnnnnnnnnnnnnnnnnnnnnnnnnnnnnnnnnnnnnnnnnnnnnnnnnnnnnnnnnnnnnnnnnnnnnnnnnnnnnnnnnnnnnnnnnnnnnnnnnnnnnnnnnnnnnnnnnnnnnnnnnnnnnnnnnnnnnnnnnnnnnnnnnnnnnnnnnnnnnnnnnnnnnnnnnnnnnnnnnnnnnnnnnnnnnnnnnnnnnnnnnnnnnnnnnnnnnnnnnnnnnnnnnnnnnnnnnnnnnnnnnnnnnnnnnnnnnnnnnnnnnnnnnnnnnnnnnnnnnnnnnnnnnnnnnnnnnnnnnnnnnnnnnnnnnnnnnnnnnnnnnnnnnnnnnnnnnnnnnnnnnnnnnnnnnnnnnnnnnnnnnnnnnnnnnnnnnnnnnnnnnnnnnnnnnnnnnnnnnnnnnnnnnnnnnnnnnnnnnnnnnnnnnnnnnnnnnnnnnnnnnnnnnnnnnnnnnnnnnnnnnnnnnnnnnnnnnnnnnnnnnnnnnnnnnnnnnnnnnnnnnnnnnnnnnnnnnnnnnnnnnnnnnnnnnnnnnnnnnnnnnnnnnnnnnnnnnnnnnnnnnnnnnnnnnnnnnnnnnnnnnnnnnnnnnnnnnnnnnnnnnnnnnnnnnnnnnnnnnnnnnnnnnnnnnnnnnnnnnnnnnnnnnnnnnnnnnnnnnnnnnnnnnnnnnnnnnnnnnnnnnnnnnnnnnnnnnnnnnnnnnnnnnnnnnnnnnnnnnnnnnnnnnnnnnnnnnnnnnnnnnnnnnnnnnnnnnnnnnnnnnnnnnnnnnnnnnnnnnnnnnnnnnnnnnnnnnnnnnnnnnnnnnnnnnnnnnnnnnnnnnnnnnnnnnnnnnnnnnnnnnnnnnnnnnnnnnnnnnnnnnnnnnnnnnnnnnnnnnnnnnnnnnnnnnnnnnnnnnnnnnnnnnnnnnnnnnnnnnnnnnnnnnnnnnnnnnnnnnnnnnnnnnnnnnnnnnnnnnnnnnnnnnnnnnnnnnnnnnnnnnnnnnnnnnnnnnnnnnnnnnnnnnnnnnnnnnnnnnnnnnnnnnnnnnnnnnnnnnnnnnnnnnnnnnnnnnnnnnnnnnnnnnnnnnnnnnnnnnnnnnnnnnnnnnnnnnnnnnnnnnnnnnnnnnnnnnnnnnnnnnnnnnnnnnnnnnnnnnnnnnnnnnnnnnnnnnnnnnnnnnnnnnnnnnnnnnnnnnnnnnnnnnnnnnnnnnnnnnnnnnnnnnnnnnnnnnnnnnnnnnnnnnnnnnnnnnnnnnnnnnnnnnnnnnnnnnnnnnnnnnnnnnnnnnnnnnnnnnnnnnnnnnnnnnnnnnnnnnnnnnnnnnnnnnnnnnnnnnnnnnnnnnnnnnnnnnnnnnnnnnnnnnnnnnnnnnnnnnnnnnnnnnnnnnnnnnnnnnnnnnnnnnnnnnnnnnnnnnnnnnnnnnnnnnnnnnnnnnnnnnnnnnnnnnnnnnnnnnnnnnnnnnnnnnnnnnnnnnnnnnnnnnnnnnnnnnnnnnnnnnnnnnnnnnnnnnnnnnnnnnnnnnnnnnnnnnnnnnnnnnnnnnnnnnnnnnnnnnnnnnnnnnnnnnnnnnnnnnnnnnnnnnnnnnnnnnnnnnnnnnnnnnnnnnnnnnnnnnnnnnnnnnnnnnnnnnnnnnnnnnnnnnnnnnnnnnnnnnnnnnnnnnnnnnnnnnnnnnnnnnnnnnnnnnnnnnnnnnnnnnnnnnnnnnnnnnnnnnnnnnnnnnnnnnnnnnnnnnnnnnnnnnnnnnnnnnnnnnnnnnnnnnnnnnnnnnnnnnnnnnnnnnnnnnnnnnnnnnnnnnnnnnnnnnnnnnnnnnnnnnnnnnnnnnnnnnnnnnnnnnnnnnnnnnnnnnnnnnnnnnnnnnnnnnnnnnnnnnnnnnnnnnnnnnnnnnnnnnnnnnnnnnnnnnnnnnnnnnnnnnnnnnnnnnnnnnnnnnnnnnnnnnnnnnnnnnnnnnnnnnnnnnnnnnnnnnnnnnnnnnnnnnnnnnnnnnnnnnnnnnnnnnnnnnnnnnnnnnnnnnnnnnnnnnnnnnnnnnnnnnnnnnnnnnnnnnnnnnnnnnnnnnnnnnnnnnnnnnnnnnnnnnnnnnnnnnnnnnnnnnnnnnnnnnnnnnnnnnnnnnnnnnnnnnnnnnnnnnnnnnnnnnnnnnnnnnnnnnnnnnnnnnnnnnnnnnnnnnnnnnnnnnnnnnnnnnnnnnnnnnnnnnnnnnnnnnnnnnnnnnnnnnnnnnnnnnnnnnnnnnnnnnnnnnnnnnnnnnnnnnnnnnnnnnnnnnnnnnnnnnnnnnnnnnnnnnnnnnnnnnnnnnnnnnnnnnnnnnnnnnnnnnnnnnnnnnnnnnnnnnnnnnnnnnnnnnnnnnnnnnnnnnnnnnnnnnnnnnnnnnnnnnnnnnnnnnnnnnnnnnnnnnnnnnnnnnnnnnnnnnnnnnnnnnnnnnnnnnnnnnnnnnnnnnnnnnnnnnnnnnnnnnnnnnnnnnnnnnnnnnnnnnnnnnnnnnnnnnnnnnnnnnnnnnnnnnnnnnnnnnnnnnnnnnnnnnnnnnnnnnnnnnnnnnnnnnnnnnnnnnnnnnnnnnnnnnnnnnnnnnnnnnnnnnnnnnnnnnnnnnnnnnnnnnnnnnnnnnnnnnnnnnnnnnnnnnnnnnnnnnnnnnnnnnnnnnnnnnnnnnnnnnnnnnnnnnnnnnnnnnnnnnnnnnnnnnnnnnnnnnnnnnnnnnnnnnnnnnnnnnnnnnnnnnnnnnnnnnnnnnnnnnnnnnnnnnnnnnnnnnnnnnnnnnnnnnnnnnnnnnnnnnnnnnnnnnnnnnnnnnnnnnnnnnnnnnnnnnnnnnnnnnnnnnnnnnnnnnnnnnnnnnnnnnnnnnnnnnnnnnnnnnnnnnnnnnnnnnnnnnnnnnnnnnnnnnnnnnnnnnnnnnnnnnnnnnnnnnnnnnnnnnnnnnnnnnnnnnnnnnnnnnnnnnnnnnnnnnnnnnnnnnnnnnnnnnnnnnnnnnnnnnnnnnnnnnnnnnnnnnnnnnnnnnnnnnnnnnnnnnnnnnnnnnnnnnnnnnnnnnnnnnnnnnnnnnnnnnnnnnnnnnnnnnnnnnnnnnnnnnnnnnnnnnnnnnnnnnnnnnnnnnnnnnnnnnnnnnnnnnnnnnnnnnnnnnnnnnnnnnnnnnnnnnnnnnnnnnnnnnnnnnnnnnnnnnnnnnnnnnnnnnnnnnnnnnnnnnnnnnnnnnnnnnnnnnnnnnnnnnnnnnnnnnnnnnnnnnnnnnnnnnnnnnnnnnnnnnnnnnnnnnnnnnnnnnnnnnnnnnnnnnnnnnnnnnnnnnnnnnnnnnnnnnnnnnnnnnnnnnnnnnnnnnnnnnnnnnnnnnnnnnnnnnnnnnnnnnnnnnnnnnnnnnnnnnnnnnnnnnnnnnnnnnnnnnnnnnnnnnnnnnnnnnnnnnnnnnnnnnnnnnnnnnnnnnnnnnnnnnnnnnnnnnnnnnnnnnnnnnnnnnnnnnnnnnnnnnnnnnnnnnnnnnnnnnnnnnnnnnnnnnnnnnnnnnnnnnnnnnnnnnnnnnnnnnnnnnnnnnnnnnnnnnnnnnnnnnnnnnnnnnnnnnnnnnnnnnnnnnnnnnnnnnnnnnnnnnnnnnnnnnnnnnnnnnnnnnnnnnnnnnnnnnnnnnnnnnnnnnnnnnnnnnnnnnnnnnnnnnnnnnnnnnnnnnnnnnnnnnnnnnnnnnnnnnnnnnnnnnnnnnnnnnnnnnnnnnnnnnnnnnnnnnnnnnnnnnnnnnnnnnnnnnnnnnnnnnnnnnnnnnnnnnnnnnnnnnnnnnnnnnnnnnnnnnnnnnnnnnnnnnnnnnnnnnnnnnnnnnnnnnnnnnnnnnnnnnnnnnnnnnnnnnnnnnnnnnnnnnnnnnnnnnnnnnnnnnnnnnnnnnnnnnnnnnnnnnnnnnnnnnnnnnnnnnnnnnnnnnnnnnnnnnnnnnnnnnnnnnnnnnnnnnnnnnnnnnnnnnnnnnnnnnnnnnnnnnnnnnnnnnnnnnnnnnnnnnnnnnnnnnnnnnnnnnnnnnnnnnnnnnnnnnnnnnnnnnnnnnnnnnnnnnnnnnnnnnnnnnnnnnnnnnnnnnnnnnnnnnnnnnnnnnnnnnnnnnnnnnnnnnnnnnnnnnnnnnnnnnnnnnnnnnnnnnnnnnnnnnnnnnnnnnnnnnnnnnnnnnnnnnnnnnnnnnnnnnnnnnnnnnnnnnnnnnnnnnnnnnnnnnnnnnnnnnnnnnnnnnnnnnnnnnnnnnnnnnnnnnnnnnnnnnnnnnnnnnnnnnnnnnnnnnnnnnnnnnnnnnnnnnnnnnnnnnnnnnnnnnnnnnnnnnnnnnnnnnnnnnnnnnnnnnnnnnnnnnnnnnnnnnnnnnnnnnnnnnnnnnnnnnnnnnnnnnnnnnnnnnnnnnnnnnnnnnnnnnnnnnnnnnnnnnnnnnnnnnnnnnnnnnnnnnnnnnnnnnnnnnnnnnnnnnnnnnnnnnnnnnnnnnnnnnnnnnnnnnnnnnnnnnnnnnnnnnnnnnnnnnnnnnnnnnnnnnnnnnnnnnnnnnnnnnnnnnnnnnnnnnnnnnnnnnnnnnnnnnnnnnnnnnnnnnnnnnnnnnnnnnnnnnnnnnnnnnnnnnnnnnnnnnnnnnnnnnnnnnnnnnnnnnnnnnnnnnnnnnnnnnnnnnnnnnnnnnnnnnnnnnnnnnnnnnnnnnnnnnnnnnnnnnnnnnnnnnnnnnnnnnnnnnnnnnnnnnnnnnnnnnnnnnnnnnnnnnnnnnnnnnnnnnnnnnnnnnnnnnnnnnnnnnnnnnnnnnnnnnnnnnnnnnnnnnnnnnnnnnnnnnnnnnnnnnnnnnnnnnnnnnnnnnnnnnnnnnnnnnnnnnnnnnnnnnnnnnnnnnnnnnnnnnnnnnnnnnnnnnnnnnnnnnnnnnnnnnnnnnnnnnnnnnnnnnnnnnnnnnnnnnnnnnnnnnnnnnnnnnnnnnnnnnnnnnnnnnnnnnnnnnnnnnnnnnnnnnnnnnnnnnnnnnnnnnnnnnnnnnnnnnnnnnnnnnnnnnnnnnnnnnnnnnnnnnnnnnnnnnnnnnnnnnnnnnnnnnnnnnnnnnnnnnnnnnnnnnnnnnnnnnnnnnnnnnnnnnnnnnnnnnnnnnnnnnnnnnnnnnnnnnnnnnnnnnnnnnnnnnnnnnnnnnnnnnnnnnnnnnnnnnnnnnnnnnnnnnnnnnnnnnnnnnnnnnnnnnnnnnnnnnnnnnnnnnnnnnnnnnnnnnnnnnnnnnnnnnnnnnnnnnnnnnnnnnnnnnnnnnnnnnnnnnnnnnnnnnnnnnnnnnnnnnnnnnnnnnnnnnnnnnnnnnnnnnnnnnnnnnnnnnnnnnnnnnnnnnnnnnnnnnnnnnnnnnnnnnnnnnnnnnnnnnnnnnnnnnnnnnnnnnnnnnnnnnnnnnnnnnnnnnnnnnnnnnnnnnnnnnnnnnnnnnnnnnnnnnnnnnnnnnnnnnnnnnnnnnnnnnnnnnnnnnnnnnnnnnnnnnnnnnnnnnnnnnnnnnnnnnnnnnnnnnnnnnnnnnnnnnnnnnnnnnnnnnnnnnnnnnnnnnnnnnnnnnnnnnnnnnnnnnnnnnnnnnnnnnnnnnnnnnnnnnnnnnnnnnnnnnnnnnnnnnnnnnnnnnnnnnnnnnnnnnnnnnnnnnnnnnnnnnnnnnnnnnnnnnnnnnnnnnnnnnnnnnnnnnnnnnnnnnnnnnnnnnnnnnnnnnnnnnnnnnnnnnnnnnnnnnnnnnnnnnnnnnnnnnnnnnnnnnnnnnnnnnnnnnnnnnnnnnnnnnnnnnnnnnnnnnnnnnnnnnnnnnnnnnnnnnnnnnnnnnnnnnnnnnnnnnnnnnnnnnnnnnnnnnnnnnnnnnnnnnnnnnnnnnnnnnnnnnnnnnnnnnnnnnnnnnnnnnnnnnnnnnnnnnnnnnnnnnnnnnnnnnnnnnnnnnnnnnnnnnnnnnnnnnnnnnnnnnnnnnnnnnnnnnnnnnnnnnnnnnnnnnnnnnnnnnnnnnnnnnnnnnnnnnnnnnnnnnnnnnnnnnnnnnnnnnnnnnnnnnnnnnnnnnnnnnnnnnnnnnnnnnnnnnnnnnnnnnnnnnnnnnnnnnnnnnnnnnnnnnnnnnnnnnnnnnnnnnnnnnnnnnnnnnnnnnnnnnnnnnnnnnnnnnnnnnnnnnnnnnnnnnnnnnnnnnnnnnnnnnnnnnnnnnnnnnnnnnnnnnnnnnnnnnnnnnnnnnnnnnnnnnnnnnnnnnnnnnnnnnnnnnnnnnnnnnnnnnnnnnnnnnnnnnnnnnnnnnnnnnnnnnnnnnnnnnnnnnnnnnnnnnnnnnnnnnnnnnnnnnnnnnnnnnnnnnnnnnnnnnnnnnnnnnnnnnnnnnnnnnnnnnnnnnnnnnnnnnnnnnnnnnnnnnnnnnnnnnnnnnnnnnnnnnnnnnnnnnnnnnnnnnnnnnnnnnnnnnnnnnnnnnnnnnnnnnnnnnnnnnnnnnnnnnnnnnnnnnnnnnnnnnnnnnnnnnnnnnnnnnnnnnnnnnnnnnnnnnnnnnnnnnnnnnnnnnnnnnnnnnnnnnnnnnnnnnnnnnnnnnnnnnnnnnnnnnnnnnnnnnnnnnnnnnnnnnnnnnnnnnnnnnnnnnnnnnnnnnnnnnnnnnnnnnnnnnnnnnnnnnnnnnnnnnnnnnnnnnnnnnnnnnnnnnnnnnnnnnnnnnnnnnnnnnnnnnnnnnnnnnnnnnnnnnnnnnnnnnnnnnnnnnnnnnnnnnnnnnnnnnnnnnnnnnnnnnnnnnnnnnnnnnnnnnnnnnnnnnnnnnnnnnnnnnnnnnnnnnnnnnnnnnnnnnnnnnnnnnnnnnnnnnnnnnnnnnnnnnnnnnnnnnnnnnnnnnnnnnnnnnnnnnnnnnnnnnnnnnnnnnnnnnnnnnnnnnnnnnnnnnnnnnnnnnnnnnnnnnnnnnnnnnnnnnnnnnnnnnnnnnnnnnnnnnnnnnnnnnnnnnnnnnnnnnnnnnnnnnnnnnnnnnnnnnnnnnnnnnnnnnnnnnnnnnnnnnnnnnnnnnnnnnnnnnnnnnnnnnnnnnnnnnnnnnnnnnnnnnnnnnnnnnnnnnnnnnnnnnnnnnnnnnnnnnnnnnnnnnnnnnnnnnnnnnnnnnnnnnnnnnnnnnnnnnnnnnnnnnnnnnnnnnnnnnnnnnnnnnnnnnnnnnnnnnnnnnnnnnnnnnnnnnnnnnnnnnnnnnnnnnnnnnnnnnnnnnnnnnnnnnnnnnnnnnnnnnnnnnnnnnnnnnnnnnnnnnnnnnnnnnnnnnnnnnnnnnnnnnnnnnnnnnnnnnnnnnnnnnnnnnnnnnnnnnnnnnnnnnnnnnnnnnnnnnnnnnnnnnnnnnnnnnnnnnnnnnnnnnnnnnnnnnnnnnnnnnnnnnnnnnnnnnnnnnnnnnnnnnnnnnnnnnnnnnnnnnnnnnnnnnnnnnnnnnnnnnnnnnnnnnnnnnnnnnnnnnnnnnnnnnnnnnnnnnnnnnnnnnnnnnnnnnnnnnnnnnnnnnnnnnnnnnnnnnnnnnnnnnnnnnnnnnnnnnnnnnnnnnnnnnnnnnnnnnnnnnnnnnnnnnnnnnnnnnnnnnnnnnnnnnnnnnnnnnnnnnnnnnnnnnnnnnnnnnnnnnnnnnnnnnnnnnnnnnnnnnnnnnnnnnnnnnnnnnnnnnnnnnnnnnnnnnnnnnnnnnnnnnnnnnnnnnnnnnnnnnnnnnnnnnnnnnnnnnnnnnnnnnnnnnnnnnnnnnnnnnnnnnnnnnnnnnnnnnnnnnnnnnnnnnnnnnnnnnnnnnnnnnnnnnnnnnnnnnnnnnnnnnnnnnnnnnnnnnnnnnnnnnnnnnnnnnnnnnnnnnnnnnnnnnnnnnnnnnnnnnnnnnnnnnnnnnnnnnnnnnnnnnnnnnnnnnnnnnnnnnnnnnnnnnnnnnnnnnnnnnnnnnnnnnnnnnnnnnnnnnnnnnnnnnnnnnnnnnnnnnnnnnnnnnnnnnnnnnnnnnnnnnnnnnnnnnnnnnnnnnnnnnnnnnnnnnnnnnnnnnnnnnnnnnnnnnnnnnnnnnnnnnnnnnnnnnnnnnnnnnnnnnnnnnnnnnnnnnnnnnnnnnnnnnnnnnnnnnnnnnnnnnnnnnnnnnnnnnnnnnnnnnnnnnnnnnnnnnnnnnnnnnnnnnnnnnnnnnnnnnnnnnnnnnnnnnnnnnnnnnnnnnnnnnnnnnnnnnnnnnnnnnnnnnnnnnnnnnnnnnnnnnnnnnnnnnnnnnnnnnnnnnnnnnnnnnnnnnnnnnnnnnnnnnnnnnnnnnnnnnnnnnnnnnnnnnnnnnnnnnnnnnnnnnnnnnnnnnnnnnnnnnnnnnnnnnnnnnnnnnnnnnnnnnnnnnnnnnnnnnnnnnnnnnnnnnnnnnnnnnnnnnnnnnnnnnnnnnnnnnnnnnnnnnnnnnnnnnnnnnnnnnnnnnnnnnnnnnnnnnnnnnnnnnnnnnnnnnnnnnnnnnnnnnnnnnnnnnnnnnnnnnnnnnnnnnnnnnnnnnnnnnnnnnnnnnnnnnnnnnnnnnnnnnnnnnnnnnnnnnnnnnnnnnnnnnnnnnnnnnnnnnnnnnnnnnnnnnnnnnnnnnnnnnnnnnnnnnnnnnnnnnnnnnnnnnnnnnnnnnnnnnnnnnnnnnnnnnnnnnnnnnnnnnnnnnnnnnnnnnnnnnnnnnnnnnnnnnnnnnnnnnnnnnnnnnnnnnnnnnnnnnnnnnnnnnnnnnnnnnnnnnnnnnnnnnnnnnnnnnnnnnnnnnnnnnnnnnnnnnnnnnnnnnnnnnnnnnnnnnnnnnnnnnnnnnnnnnnnnnnnnnnnnnnnnnnnnnnnnnnnnnnnnnnnnnnnnnnnnnnnnnnnnnnnnnnnnnnnnnnnnnnnnnnnnnnnnnnnnnnnnnnnnnnnnnnnnnnnnnnnnnnnnnnnnnnnnnnnnnnnnnnnnnnnnnnnnnnnnnnnnnnnnnnnnnnnnnnnnnnnnnnnnnnnnnnnnnnnnnnnnnnnnnnnnnnnnnnnnnnnnnnnnnnnnnnnnnnnnnnnnnnnnnnnnnnnnnnnnnnnnnnnnnnnnnnnnnnnnnnnnnnnnnnnnnnnnnnnnnnnnnnnnnnnnnnnnnnnnnnnnnnnnnnnnnnnnnnnnnnnnnnnnnnnnnnnnnnnnnnnnnnnnnnnnnnnnnnnnnnnnnnnnnnnnnnnnnnnnnnnnnnnnnnnnnnnnnnnnnnnnnnnnnnnnnnnnnnnnnnnnnnnnnnnnnnnnnnnnnnnnnnnnnnnnnnnnnnnnnnnnnnnnnnnnnnnnnnnnnnnnnnnnnnnnnnnnnnnnnnnnnnnnnnnnnnnnnnnnnnnnnnnnnnnnnnnnnnnnnnnnnnnnnnnnnnnnnnnnnnnnnnnnnnnnnnnnnnnnnnnnnnnnnnnnnnnnnnnnnnnnnnnnnnnnnnnnnnnnnnnnnnnnnnnnnnnnnnnnnnnnnnnnnnnnnnnnnnnnnnnnnnnnnnnnnnnnnnnnnnnnnnnnnnnnnnnnnnnnnnnnnnnnnnnnnnnnnnnnnnnnnnnnnnnnnnnnnnnnnnnnnnnnnnnnnnnnnnnnnnnnnnnnnnnnnnnnnnnnnnnnnnnnnnnnnnnnnnnnnnnnnnnnnnnnnnnnnnnnnnnnnnnnnnnnnnnnnnnnnnnnnnnnnnnnnnnnnnnnnnnnnnnnnnnnnnnnnnnnnnnnnnnnnnnnnnnnnnnnnnnnnnnnnnnnnnnnnnnnnnnnnnnnnnnnnnnnnnnnnnnnnnnnnnnnnnnnnnnnnnnnnnnnnnnnnnnnnnnnnnnnnnnnnnnnnnnnnnnnnnnnnnnnnnnnnnnnnnnnnnnnnnnnnnnnnnnnnnnnnnnnnnnnnnnnnnnnnnnnnnnnnnnnnnnnnnnnnnnnnnnnnnnnnnnnnnnnnnnnnnnnnnnnnnnnnnnnnnnnnnnnnnnnnnnnnnnnnnnnnnnnnnnnnnnnnnnnnnnnnnnnnnnnnnnnnnnnnnnnnnnnnnnnnnnnnnnnnnnnnnnnnnnnnnnnnnnnnnnnnnnnnnnnnnnnnnnnnnnnnnnnnnnnnnnnnnnnnnnnnnnnnnnnnnnnnnnnnnnnnnnnnnnnnnnnnnnnnnnnnnnnnnnnnnnnnnnnnnnnnnnnnnnnnnnnnnnnnnnnnnnnnnnnnnnnnnnnnnnnnnnnnnnnnnnnnnnnnnnnnnnnnnnnnnnnnnnnnnnnnnnnnnnnnnnnnnnnnnnnnnnnnnnnnnnnnnnnnnnnnnnnnnnnnnnnnnnnnnnnnnnnnnnnnnnnnnnnnnnnnnnnnnnnnnnnnnnnnnnnnnnnnnnnnnnnnnnnnnnnnnnnnnnnnnnnnnnnnnnnnnnnnnnnnnnnnnnnnnnnnnnnnnnnnnnnnnnnnnnnnnnnnnnnnnnnnnnnnnnnnnnnnnnnnnnnnnnnnnnnnnnnnnnnnnnnnnnnnnnnnnnnnnnnnnnnnnnnnnnnnnnnnnnnnnnnnnnnnnnnnnnnnnnnnnnnnnnnnnnnnnnnnnnnnnnnnnnnnnnnnnnnnnnnnnnnnnnnnnnnnnnnnnnnnnnnnnnnnnnnnnnnnnnnnnnnnnnnnnnnnnnnnnnnnnnnnnnnnnnnnnnnnnnnnnnnnnnnnnnnnnnnnnnnnnnnnnnnnnnnnnnnnnnnnnnnnnnnnnnnnnnnnnnnnnnnnnnnnnnnnnnnnnnnnnnnnnnnnnnnnnnnnnnnnnnnnnnnnnnnnnnnnnnnnnnnnnnnnnnnnnnnnnnnnnnnnnnnnnnnnnnnnnnnnnnnnnnnnnnnnnnnnnnnnnnnnnnnnnnnnnnnnnnnnnnnnnnnnnnnnnnnnnnnnnnnnnnnnnnnnnnnnnnnnnnnnnnnnnnnnnnnnnnnnnnnnnnnnnnnnnnnnnnnnnnnnnnnnnnnnnnnnnnnnnnnnnnnnnnnnnnnnnnnnnnnnnnnnnnnnnnnnnnnnnnnnnnnnnnnnnnnnnnnnnnnnnnnnnnnnnnnnnnnnnnnnnnnnnnnnnnnnnnnnnnnnnnnnnnnnnnnnnnnnnnnnnnnnnnnnnnnnnnnnnnnnnnnnnnnnnnnnnnnnnnnnnnnnnnnnnnnnnnnnnnnnnnnnnnnnnnnnnnnnnnnnnnnnnnnnnnnnnnnnnnnnnnnnnnnnnnnnnnnnnnnnnnnnnnnnnnnnnnnnnnnnnnnnnnnnnnnnnnnnnnnnnnnnnnnnnnnnnnnnnnnnnnnnnnnnnnnnnnnnnnnnnnnnnnnnnnnnnnnnnnnnnnnnnnnnnnnnnnnnnnnnnnnnnnnnnnnnnnnnnnnnnnnnnnnnnnnnnnnnnnnnnnnnnnnnnnnnnnnnnnnnnnnnnnnnnnnnnnnnnnnnnnnnnnnnnnnnnnnnnnnnnnnnnnnnnnnnnnnnnnnnnnnnnnnnnnnnnnnnnnnnnnnnnnnnnnnnnnnnnnnnnnnnnnnnnnnnnnnnnnnnnnnnnnnnnnnnnnnnnnnnnnnnnnnnnnnnnnnnnnnnnnnnnnnnnnnnnnnnnnnnnnnnnnnnnnnnnnnnnnnnnnnnnnnnnnnnnnnnnnnnnnnnnnnnnnnnnnnnnnnnnnnnnnnnnnnnnnnnnnnnnnnnnnnnnnnnnnnnnnnnnnnnnnnnnnnnnnnnnnnnnnnnnnnnnnnnnnnnnnnnnnnnnnnnnnnnnnnnnnnnnnnnnnnnnnnnnnnnnnnnnnnnnnnnnnnnnnnnnnnnnnnnnnnnnnnnnnnnnnnnnnnnnnnnnnnnnnnnnnnnnnnnnnnnnnnnnnnnnnnnnnnnnnnnnnnnnnnnnnnnnnnnnnnnnnnnnnnnnnnnnnnnnnnnnnnnnnnnnnnnnnnnnnnnnnnnnnnnnnnnnnnnnnnnnnnnnnnnnnnnnnnnnnnnnnnnnnnnnnnnnnnnnnnnnnnnnnnnnnnnnnnnnnnnnnnnnnnnnnnnnnnnnnnnnnnnnnnnnnnnnnnnnnnnnnnnnnnnnnnnnnnnnnnnnnnnnnnnnnnnnnnnnnnnnnnnnnnnnnnnnnnnnnnnnnnnnnnnnnnnnnnnnnnnnnnnnnnnnnnnnnnnnnnnnnnnnnnnnnnnnnnnnnnnnnnnnnnnnnnnnnnnnnnnnnnnnnnnnnnnnnnnnnnnnnnnnnnnnnnnnnnnnnnnnnnnnnnnnnnnnnnnnnnnnnnnnnnnnnnnnnnnnnnnnnnnnnnnnnnnnnnnnnnnnnnnnnnnnnnnnnnnnnnnnnnnnnnnnnnnnnnnnnnnnnnnnnnnnnnnnnnnnnnnnnnnnnnnnnnnnnnnnnnnnnnnnnnnnnnnnnnnnnnnnnnnnnnnnnnnnnnnnnnnnnnnnnnnnnnnnnnnnnnnnnnnnnnnnnnnnnnnnnnnnnnnnnnnnnnnnnnnnnnnnnnnnnnnnnnnnnnnnnnnnnnnnnnnnnnnnnnnnnnnnnnnnnnnnnnnnnnnnnnnnnnnnnnnnnnnnnnnnnnnnnnnnnnnnnnnnnnnnnnnnnnnnnnnnnnnnnnnnnnnnnnnnnnnnnnnnnnnnnnnnnnnnnnnnnnnnnnnnnnnnnnnnnnnnnnnnnnnnnnnnnnnnnnnnnnnnnnnnnnnnnnnnnnnnnnnnnnnnnnnnnnnnnnnnnnnnnnnnnnnnnnnnnnnnnnnnnnnnnnnnnnnnnnnnnnnnnnnnnnnnnnnnnnnnnnnnnnnnnnnnnnnnnnnnnnnnnnnnnnnnnnnnnnnnnnnnnnnnnnnnnnnnnnnnnnnnnnnnnnnnnnnnnnnnnnnnnnnnnnnnnnnnnnnnnnnnnnnnnnnnnnnnnnnnnnnnnnnnnnnnnnnnnnnnnnnnnnnnnnnnnnnnnnnnnnnnnnnnnnnnnnnnnnnnnnnnnnnnnnnnnnnnnnnnnnnnnnnnnnnnnnnnnnnnnnnnnnnnnnnnnnnnnnnnnnnnnnnnnnnnnnnnnnnnnnnnnnnnnnnnnnnnnnnnnnnnnnnnnnnnnnnnnnnnnnnnnnnnnnnnnnnnnnnnnnnnnnnnnnnnnnnnnnnnnnnnnnnnnnnnnnnnnnnnnnnnnnnnnnnnnnnnnnnnnnnnnnnnnnnnnnnnnnnnnnnnnnnnnnnnnnnnnnnnnnnnnnnnnnnnnnnnnnnnnnnnnnnnnnnnnnnnnnnnnnnnnnnnnnnnnnnnnnnnnnnnnnnnnnnnnnnnnnnnnnnnnnnnnnnnnnnnnnnnnnnnnnnnnnnnnnnnnnnnnnnnnnnnnnnnnnnnnnnnnnnnnnnnnnnnnnnnnnnnnnnnnnnnnnnnnnnnnnnnnnnnnnnnnnnnnnnnnnnnnnnnnnnnnnnnnnnnnnnnnnnnnnnnnnnnnnnnnnnnnnnnnnnnnnnnnnnnnnnnnnnnnnnnnnnnnnnnnnnnnnnnnnnnnnnnnnnnnnnnnnnnnnnnnnnnnnnnnnnnnnnnnnnnnnnnnnnnnnnnnnnnnnnnnnnnnnnnnnnnnnnnnnnnnnnnnnnnnnnnnnnnnnnnnnnnnnnnnnnnnnnnnnnnnnnnnnnnnnnnnnnnnnnnnnnnnnnnnnnnnnnnnnnnnnnnnnnnnnnnnnnnnnnnnnnnnnnnnnnnnnnnnnnnnnnnnnnnnnnnnnnnnnnnnnnnnnnnnnnnnnnnnnnnnnnnnnnnnnnnnnnnnnnnnnnnnnnnnnnnnnnnnnnnnnnnnnnnnnnnnnnnnnnnnnnnnnnnnnnnnnnnnnnnnnnnnnnnnnnnnnnnnnnnnnnnnnnnnnnnnnnnnnnnnnnnnnnnnnnnnnnnnnnnnnnnnnnnnnnnnnnnnnnnnnnnnnnnnnnnnnnnnnnnnnnnnnnnnnnnnnnnnnnnnnnnnnnnnnnnnnnnnnnnnnnnnnnnnnnnnnnnnnnnnnnnnnnnnnnnnnnnnnnnnnnnnnnnnnnnnnnnnnnnnnnnnnnnnnnnnnnnnnnnnnnnnnnnnnnnnnnnnnnnnnnnnnnnnnnnnnnnnnnnnnnnnnnnnnnnnnnnnnnnnnnnnnnnnnnnnnnnnnnnnnnnnnnnnnnnnnnnnnnnnnnnnnnnnnnnnnnnnnnnnnnnnnnnnnnnnnnnnnnnnnnnnnnnnnnnnnnnnnnnnnnnnnnnnnnnnnnnnnnnnnnnnnnnnnnnnnnnnnnnnnnnnnnnnnnnnnnnnnnnnnnnnnnnnnnnnnnnnnnnnnnnnnnnnnnnnnnnnnnnnnnnnnnnnnnnnnnnnnnnnnnnnnnnnnnnnnnnnnnnnnnnnnnnnnnnnnnnnnnnnnnnnnnnnnnnnnnnnnnnnnnnnnnnnnnnnnnnnnnnnnnnnnnnnnnnnnnnnnnnnnnnnnnnnnnnnnnnnnnnnnnnnnnnnnnnnnnnnnnnnnnnnnnnnnnnnnnnnnnnnnnnnnnnnnnnnnnnnnnnnnnnnnnnnnnnnnnnnnnnnnnnnnnnnnnnnnnnnnnnnnnnnnnnnnnnnnnnnnnnnnnnnnnnnnnnnnnnnnnnnnnnnnnnnnnnnnnnnnnnnnnnnnnnnnnnnnnnnnnnnnnnnnnnnnnnnnnnnnnnnnnnnnnnnnnnnnnnnnnnnnnnnnnnnnnnnnnnnnnnnnnnnnnnnnnnnnnnnnnnnnnnnnnnnnnnnnnnnnnnnnnnnnnnnnnnnnnnnnnnnnnnnnnnnnnnnnnnnnnnnnnnnnnnnnnnnnnnnnnnnnnnnnnnnnnnnnnnnnnnnnnnnnnnnnnnnnnnnnnnnnnnnnnnnnnnnnnnnnnnnnnnnnnnnnnnnnnnnnnnnnnnnnnnnnnnnnnnnnnnnnnnnnnnnnnnnnnnnnnnnnnnnnnnnnnnnnnnnnnnnnnnnnnnnnnnnnnnnnnnnnnnnnnnnnnnnnnnnnnnnnnnnnnnnnnnnnnnnnnnnnnnnnnnnnnnnnnnnnnnnnnnnnnnnnnnnnnnnnnnnnnnnnnnnnnnnnnnnnnnnnnnnnnnnnnnnnnnnnnnnnnnnnnnnnnnnnnnnnnnnnnnnnnnnnnnnnnnnnnnnnnnnnnnnnnnnnnnnnnnnnnnnnnnnnnnnnnnnnnnnnnnnnnnnnnnnnnnnnnnnnnnnnnnnnnnnnnnnnnnnnnnnnnnnnnnnnnnnnnnnnnnnnnnnnnnnnnnnnnnnnnnnnnnnnnnnnnnnnnnnnnnnnnnnnnnnnnnnnnnnnnnnnnnnnnnnnnnnnnnnnnnnnnnnnnnnnnnnnnnnnnnnnnnnnnnnnnnnnnnnnnnnnnnnnnnnnnnnnnnnnnnnnnnnnnnnnnnnnnnnnnnnnnnnnnnnnnnnnnnnnnnnnnnnnnnnnnnnnnnnnnnnnnnnnnnnnnnnnnnnnnnnnnnnnnnnnnnnnnnnnnnnnnnnnnnnnnnnnnnnnnnnnnnnnnnnnnnnnnnnnnnnnnnnnnnnnnnnnnnnnnnnnnnnnnnnnnnnnnnnnnnnnnnnnnnnnnnnnnnnnnnnnnnnnnnnnnnnnnnnnnnnnnnnnnnnnnnnnnnnnnnnnnnnnnnnnnnnnnnnnnnnnnnnnnnnnnnnnnnnnnnnnnnnnnnnnnnnnnnnnnnnnnnnnnnnnnnnnnnnnnnnnnnnnnnnnnnnnnnnnnnnnnnnnnnnnnnnnnnnnnnnnnnnnnnnnnnnnnnnnnnnnnnnnnnnnnnnnnnnnnnnnnnnnnnnnnnnnnnnnnnnnnnnnnnnnnnnnnnnnnnnnnnnnnnnnnnnnnnnnnnnnnnnnnnnnnnnnnnnnnnnnnnnnnnnnnnnnnnnnnnnnnnnnnnnnnnnnnnnnnnnnnnnnnnnnnnnnnnnnnnnnnnnnnnnnnnnnnnnnnnnnnnnnnnnnnnnnnnnnnnnnnnnnnnnnnnnnnnnnnnnnnnnnnnnnnnnnnnnnnnnnnnnnnnnnnnnnnnnnnnnnnnnnnnnnnnnnnnnnnnnnnnnnnnnnnnnnnnnnnnnnnnnnnnnnnnnnnnnngcgttgaatataatgaccgtgggccgaaccaggacattctatcatgaaacggccgcgaggggagggaacgggcttggagatagggaagggactcgtggcggccgtcgccgtggcgccgggcctcgcactcctgtggtggttctacaacaaggactacctcgaaccggaaccgctctccctggtcttctccgcctttttcagggggatgctcttcgttttccccgccggcctcgtggagaaggtcatcagcggccccctttccttctcgccgctggtgacgtccttcttcggcgtagccctcatcgaggagggctgtaagtggctggcgctcaagaggtacatcctgtcgagcgaatgcgacgagtgctacgacggcatcgtctacgggacaagcgtggccctggggttcgccaccatggagaacctcttctacgtggtgggctccatcaatccctgggccgtggccgggtggagggccctcgtttcggtgccccttcacgccctctgcggcctcgccatgggctacgaggcggcccgccagaagatgaccgccgggcctcccttcgtcctcgcgaagatactcaccatccccgtcatcgcccacggggcgttcaactacctgctgctgacgaacaccctcggcgggttcatggcggccacctggatcgtagcggccatgtggatcggcggtttcaggatgatccaccggtcccgcacctgctcgtgacggaggagccacgcccttgaaaaagccctccatgaaggacatcttttccgggaaaggtctgctctcgcagcggttccccggtttcgagcaccggccccagcaggaggccctggcggaaagggtcatggccagcctcgattccggtgggggcggtgtcctgctggccgaggcccctaccgggacgggcaagacccatgccctcctcgtgccggccgtctactggtgcctcgaggacgaccgaaaaattctcttcctcacctcgggcatccccctgcaggaacagatcgtaaaaagggacctccccgacctctgcgactgcctgggcgtggagggcctctcctacggcctcatcaagggaaaggccaactacctctgcaggctccggggcaaggagatgagcgagagggaactgctggcccacctcgagccggacctcgtccttgaactcgtcgcctggatggaaaagaccgagacgggcgacttctccgaactggccctcccgccggggcaccccgtcatatccgtcctgtcggccgcatcggacgcgtgccggggcaacggctgccccttcagggagagctgcttcctccgcagggttctgcagcaggcccaggagtggaacatcatcgtcgccaactaccacctcttcttctcctactccgcctccaccgggaggggattcccggtgccctgcgacgccatcctctgcgacgaggcccaccggctcaccgaggccgcccggtcggccgcctcgctgcgggccaccggggaggagtgggccagggtcatggacttcgccaaggcccgcgtcttccccaggatggactgggtctccgaccacgaccgccagcggctggccctcctggccgacgaggtgaaaaaggagtctgaaaggctcttccacctctggaagaaggaggtccccgcgggccggatattcaccgacgaagccggcccccccgacggccccggcccgctccagggcctcgccggggagattctcgaggccgccggtgagccacccgagaagaacggcgccgacgacagggagtcggcggccctccttcaccagtggagggacagcgtggcggacctgtcgcaccgcaccgcctggtgcgccagggtggaccgcttcccgctctgggcctactggtgggacggccggagcatcaacagctcgcctaccttctgcggcgacctcataagcgactggttcttcgccaagcccctggaggccctggtggctgtgtcggcgaccatggccataggggaggacttctccttctgggagcaggagacggggctgcaggccaccgagaggctcgtcctcgactcgcccttcgacctggacgagcagatgtccatctgggtcgtcgacctgggcctcgccgtgaccgacgacggctacgacgacctcgtcgccaggatcgccgaacagctctgcgacgacaacgacgggagcaccctggtcctgctgagctctctgaggctcctccgggccgtatcggagcgtctgaggtcgaaggagcacccctaccgcgtcctcgagcagggcgaactcccccggagcgaactgctgaggctcttccgccaggacctatcctcggtcctcgtagggagcgtctccttccgcgagggcatcgacgtccccggcgaggggctgacccaggtcatcatcgaccggatacccttcccgcaccctgccgaccccgtgctggtcaccaggaagatcctcgagggccccgacatgttcttcgacatcgtcctccctcgggccaaactgctgctgaagcaggccgccggcaggctcatcaggagcaaaagcgaccgcggcagggtggttatccttgacgggcgcgtcctctccaagaggggctggaagataaccgacgccctccccggcgtgaagtacaagagggtggaagtggaattgggcaagaagtagtgaggggcggacggcaagggacaataaatccctgaccgccgacacccctgcacggctacgcttcctgacagtcttcacatcctctcaccccaggccctcctttatcaacttccaccgaacaggaagtcgaacgagaaaatgtagggaaccttggatagtccgacgaaaaaatgctggatttattgaaaagtccgacgaaaaaatgtaacatgttttccggggggtggcctcatggatcgtaagatcatgcaaaacctggttaagtggaaaaacaaggcgaagaggaagccgctcatcatgcagggagccaggcaggtagggaaaacctggatcctgaaacatttcggtgagaagcatttcaaaagggttgcatatatcaacttcgacaacaacccccgaatggaagaggtgtttaagggagacttcaacattcagcggttgctggatgctttcaggatagagaccggtaccaggatcgacgctgaaaccctgttggtgttcgatgaagtccaggaagtgccgaaagccattcaatccttgaagtattttcatgaagaaagaccggaattaccgatcgctgccgcagggtcgctgctgggcctggcccatcatagcgccatctcttttccggtaggcaaagtggagctcctggacctgtatcccatgacttttccggaatttctccaggccaaggaggaaggggatctcctttccacgctggaaaattgcgacttcgaaatgatgaaggtattcaaggacaggtatgctacattgctcggacaatacttcttcgtcggtggaatgccggaagccgtagtgacctttgtggagacaggggactatagggaggtcaggtcctatcagaaggatcttttaagactttatgaacaggatttttccaaacatatcattcccaatacgacggagagggcccgactcgtctgggggagtatcctttcccagctttcaaaagaaaacagcaagttcatttacgggcatatcaggccagggtcccggtcaaaggattatgaggatgctatccagtggctggtggactgcggtctcgtgataaaagtgtcacggatatcaaaaccgggaatccctctggccgcgtaccgggacatctcggccttcaaactgtttattcacgacgtcgggctgttgacagccatgggagacgtcgatatcaaggttctcctcgaaggagagcgaatatacagggaattcaagggcagcctggcggagcagtacgtgttggtgcagttgttggccgacctggggatccatcccttttattactccgcggaaaagtcgaccggagaagttgacttcgtcatccagcgaaagggtagtattgtaccgatagaagtgaaatcgtcggtcaacctccagggcaagagcctgaaatatttcacaagaaaattcgggattgagcgggccctacggttttcaatggccgatcacagggaagaatcatgggtgaccaacataccccttttcgccgtctcctgtgtgcgaaaagtgcttgagcggtgatccggccacgctcacattatttgcattgaaacaataaccagcgcaccttttgcacggatccctcgaaccggccatcttgaggcaaagcgacgatctgcctgttcttgtcccgtttcctgtttaccgtcggcgcacttgatctcttgcaccccaggggacgcaggggaagaacaagaacttgagaggtcaggtaaggaaaaagccggcgcaaggggctggcataatggacaaaattgggaaatgatttattataaggccattgcccttctcaaagatcagataaaaatggctactcccaccagacggtcagttcgatcttaaccaaacacttcagcaacccacacaaaaagggccgaagaacatagggacaggattggttcaaaagactgtgattttccccttggggatcctatcggcgatgatgccctggaatgtgggtattcctaatttccgggtgcgattgctttctgatccaacaggaaaacaagccttcgggcgaaaagactttacggagagcggaaatactgcggcggtccaaacctttgcctgccccgattggcctttgaggcttgttgcgagggatccgccgacctcattataaggaggggagctgtatggatctaacgggaacacagggtactttcaacttacttgaagagaaatggatccccgttctttacgtcgatgggaaaaccgaccggctcgggatcattgagacactgaaagaagccgggcgaatccggcagatcgccgccagcaatcccatggacagggtggcgctcccgcgctttttgatggcggtgctcctgtggtgcaaagaaaacgccaagtcttccctggcagaactggaagaaaggggtgcggacattccgggggactggttggtcaagttggaggaacacagagccgccttcgatcttttgggcgatggagagaggttctaccaggataaaactctccccgacggactgctgaaggcgaagcaaaaaaagtgggacgatcatcaaagaagggccaaaaagaaaaaggaccccaaaacccggccgacgggacttgatcatgaagattttcgtcccattggtgatttgttgatcgaattccctactgaaaccaagattgcccacttcagccatgtacgagataaggaatatggcctgtgcccggcgtgctgtgcccttggtatcattcggttcagcacttgggcaaacgcctacggcggtggttgttatactgcggcggtcaacggccctgcgcctgcctatgttataaaagagggtagaacactgcaacagactttccttttgaactgtcccgagactttttctttaaaccgaaacccaccttggatatgcaatgccccgcctggtgaaacccaacttgacatcgtaacagtatttgcgtggcgttcgcgcagactctggctagccgatccagaaggtgaaaaagggcgttgttcctattgtgccgaggaggcctatcttattcgcgaacacgtcttcacgggtaattggaaacctcccttcaaaacaagtggcaacgaaaaaaagttctggttactcgacccacacctggtccttgtcgaaaaaacgcagagcggcgggagagatgatgccgtatcggccgagaggcatgcgttacggaagggcaagcccgaccagttgaaacaaacaacccttggcttcccttcgcccggcgcgaaagtcgcaacccgtagccgtttttggcggcgtgctttatcagcggggctgatgtcgaagactagtggacatcaagggattcggactatcatcgctggcccggcggcaaacaaaggactctaccaggacgctgccagtatcaaccttccggatgactgtcggatcgaagtgattgaaacagtggaagaagcactgcgtaaaatgaacggtcttttgcgctctattagtcccggcactgatcgtaaacatcctgagcgtatggctttcctcgatgcgttatcaccctcgctggaggcgagattgaaacgggagttgtgcgggtgtccggatacaaaggaggttttaaaggacgaattgctccctgttgttcttaacattatttcggcgacaactatcgggtcaccccttcgtcggcgcgaggccatgaataaagcccgagagtcgctgagaagagggatcgacagcctggttggccgatcagagcgcctttccggcacgggcgcgcccgggtcggtcccaggcgaacctaagagtgacgaacagaagggggactctctatgagccagaccgctgaatacatcaagaggctttcctccctgcaggagggcgacctctcccggcttcgcagtcttcaggggagaggacttgacgccacgctccagggattcgatctcttcaccggtctttggtggccgctgagggcgaaaagccccgccactccacgccgggagccgtcgtggctcgttgccaaactatacggagctttcaacgtcccccacgtagggcccgaaacaagcacggggcaccctttgcctgaagtcctggcccgctgcgaacccgcagagggtaatggctccgggcgcttcagaacccggttcgataacctgctttgctcgtccctttcctccctggagccgcctttgcgttgggccctgggagaggtggccagggccgttgccggccgcgtacctcatgcgcgggatgtcaagggcctggactgggtgcagctcctcgacgatctctcgatctgggaccggggtgtggaacaccgccgcggacgtgatgtccgcgacctatgggcggaaatgtatctgaaggtgatcgagaaaaaaaggaggaggacataaaaatgctgatcgagatccacatgatccagaaccacagtccggcgaacctgaacagggatgacctcggcgctcccaaaacctgtatcttcggaggcgccacccgggcccgcatttccagccagtgtcttaaacgcagcattcgccgcagcgatgagttcgccgccgcgttggagaaggccggaggagtaaggacccggaggctggcggatctgctggcgcgcatcgcttatgccggggacttcgacctggtgcctcgggaactgatcgaacttttcaaagagcggccttctaaagatgaacgcctgagggaactcgaaaaattggctgcagaagctttgcaattgggcggcgtgaaaccgaaaaaaaagggaaaggggaagaaaaaggaaaaggccaagagcgaagacgacgtcgacgtcgaagccgatgacgatgacgatgacgatgacgatgacgaggaaaagaaagcagaggaactctccaagatgctcctcttcctttccaccgataccatcaaggaaatggcgaaggatctgaaagaagcgacggacagcaagaaactggcagaaaagttcaagcaatacatcgccgagaagcccagtgtacccgacatcgccttgaacggccgcatgacggaagtcgcgaaaaacagtcttttcagcgacttgaacttcaccgttgaggcggccttgtccgcgggccatgccctctccacccatgccgtcgtgaacgaggtggactacttcaccgccgccgacgacatacccggtcaggacgccggcgccgcccacgtcaatgaggctttgttcaactcggcctgtttctacaaacacttcgtgatcgacttcgagcagttgagggagaacttgggcggcgacaccgacctggcctgcacgaccgtccggtccttcctcgatgccgcggctaaagctcaccccagcggaaaacagcactccttcgcggcctttaacccccccgaggggatcctggtcgaggtaaaaagcaagacagccactcccgtcagctacgccaacgccttcgccgatcccgtgccggaagggtcccagcccggcctgatccgtgacagcatcgacaggcttggccagtatgtaggcgacctggttgaaggctacggcatcgaggccgaacgtttctggttctcacccaaccggcggcaccgccttgcctgggtcgataagggcttgaaagagcacgaacaagtacgtccggtagtcggcgactccaacgagttcggccagttcggcgaactgctggaccgggtcatgaaagaagtggaggaggcagcgagcgacggggaggccgccaaatgacggaagccaatacgttgtttctccgccttgaaggcccgctgcaggcttggggcgatacgtccaagttcgtcatccgccgcaccatggaggcgcctaccaagtccggcgtgctggggctggtctgctgcgccatgggcctgtctcggcaggcggcgcgggagagcctgccacgcctgaacagccttgccatgggcgtgcgcgtcgaccggcggggcgtcaggtggtgggattaccagactgtgggggcggaggtcgggatggcgaccgccggggggagcctgaagaccggcgcccaggggacgctcgtgacccgccgggagtacctggccgacgccagcttcctcgtttgcctacagggtgacatcgggttgatccaggaggtcgccgaggccctatcatctccgaagcggcccgtttacctcggccgtaaatcctgcccgccctccgcccctgtccttgcgaggccggcccgaagtggctcgtgggagaatccttcccgccacggcagcctggagggagccctgcagtccgtcccatggaacccgcggagtacggccgactcacagccgccggacggaaaggtggaagtgcttctggactggcggcctactccggaaagcgatgccgcccccaacgatgcggaagtttggtatgacgtgcccctatgcttcgacccgccggtacacgaaccgcggttccttctgcggggcgtcgtctcccccgcggtaggagagcccctccagccgccccaccctgccaaaccgcgcccgcgggcggactacaccaaaattgaataccgcaagcgccgtcaagagagaattcaagccgatgccgggctgtgcgtcttctgcaaatcccccggcccgcgaatgaccgtccagcacgtcacctatcgaagggcggggggtgacgaaaccctggaggacctgcgttccctttgcggcctgtgccatgatgccgtcaccatgctcgaatatggcctgggaatggggctggaccgcattgaccccgaggacccccgctggcgcggcctcatccttcagaaacgggaggagatcatccgcttccgatccctggagactcggcgccggcgtcttgcttccgaggaggttgaatagccgtgtacctatcgtgcctattgatcgacactggcgaaaatcccgaccgccctcgcccagggagattatggcttcggaaccgttatcgcgtgcatcagcgcctctgcatggcctttccctcccgatccaggaaaggggaggatgctgacttccttcatccctacaagcccgtggatttcggagaagggcaagtcggcgtggagcgcgccccggattcggggtttcttttccgcatcgaccctctcctcggcgggagggccgcgatcatcgttcagtccgccgtggaacccgactggggctacgcctttcataatgctggttacctcctggcggcgcctcctgaggtgaaaccctttgggccgcgcttttcgaaagaccaatgtttaaggtttcgccttgaggcgaacccgaccaggcggctaagcgaacgatcacaggacgcaagaggggaatctgtcgggaagcgtgtgcctgtcccgaccgaccggctcttggactggcttgaccgtcatgccgactcgggaggattctcaatcgatcaggaggttacgacccttcagctggggtacgtctatatgaacaaaaacggcaagggccagcgtctgcgttcggttctctacaacggcctcctcgaggtcactgaccccgatctttttcatcgggccttgatccgcggtatcggttcaggcaaggccttcgggtttggtcttttatcggtggctccgggtcctcccaaaggccaagggtgacggaaatgagagtccaggacctccgggtactgccgaagctaagagacggctggagtcatttgtacgtcgagcattgccgtgttgaccaggacgctaaagcgatagcccttcatgatgccgaaggaaaagtacctgttccctgcgccaacctggctttgctgatggttgggcctggcgtatcgatcactcatgcagccgtctcggtcctagccgatcatggctgcctgattgcctggtgcggagaggagggggtgcgtttttacgccgtgggaatgggcgaaacccgcagctccaggaattttctgcaccaggccatgctatgggccgatgagggtcttcggttgaaagtggttcataggatgtatcaaatgcgattctcagaaaaattcggccccgatctgaccctgcggcagatccgaggaatggaaggcgccagggtgcgtgatgcctatgcgcgggcggccagggagaccggcgtcggatggaccgggaggaattaccagcgggataaatggagcagggccgatcccgtcaaccgtgccctgtcgacagccaacgcctgcctatacgggatatgccacgcggctatcgtgtcggcgggtttttcaacggccctcggatttattcacacgggaaagatgctgtcctttgtttatgacatagccgacctttataaagcggagatatccattccagttgcctttagtgcagccgttgaagggcccgatggcctggagaggcgtgttcgtttggcctgtcgggacaaatttgtatcctcccggttgttggaaagaatgatccctgatattcagaacattcttatgatcccgaaaagcggaaacgcggatgaagcttcacgttttgatctggatgcctcttctccgggcggattatgggatcccgccgaaaaggaagtggctggcggactggatcattctcaacagatgacgtgagaggagcaagcgatgctggtcttgatccttgaacgggtaccgcccggtttgagaggagaattgacccggtggttgcttgaaccgaaagcaggggtttttgtcggcagggtatcagccctggttcgggaaaagctatgggacaaagcctgttcggaggctcgagggggtgggtgcctgatgctccacagcagtgacaatgaacagggtttccagataaaaagttggggggagacaacccgcgctatcgaagacttcgaggggctttttcttgtaaggatcccataaacagaggattttttaagtattgtccccacgcgtgtgggggtgaaccgttaacagccgagttgaacacacaccttttgttattgtccccacgcgtgtgggggtgaaccgttctccgggaagaagcggggcgagccggtggtattgtccccacgcgtgtgggggtgaaccggtcatgccgaaattgacgcttcgggatcttgaattgtccccacgcgtgtgggggtgaaccgaccaccgcctccctaggatcggggctgaggtaattgtccccacgcgtgtgggggtgaaccgaatgccttgatggagtcaccgatgacttcagtaattgtccccacgcgtgtgggggtgaacctccccgagccccaaaaacccgatatgaccattcattgtccccacgcgtgtgggggtgaaccgaaggcgagcctgggtatagaaatcctccccgtcattgtccccacgcgtgtgggggtgaaccggttagggtggcaatggaggctgggatacaggcattgtccccacgcgtgtgggggtgaaccgtcaacatttttctgccttacacggaactcggcattgtccccacgcgtgtgggggtgaaccgtccgggaatgacctgctcaatgccagggctatattgtccccacgcgtgtgggggtgaaccggccgagcccggaggccgaacccggaggccgagattgtccccacgcgtgtgggggtgaaccggcaaaggttgccgcaaacggcacgacgatgacattgtccccacgcgtgtgggggtgaaccggagatgcctattgaggaggccagggccttgggattgtccccacgcgtgtgggggtgaaccgaaccccttggggtgttctccgaggaggaggtaattgtccccacgcgtgtgggggtgaaccggtcatgacatggataccagcagacgatatgacattgtccccacgcgtgtgggggtgaaccgtggcggggaatagaggactttgcctacggcccattgtccccacgcgtgtgggggtgaaccggttgacgggctcgactgaaaaatttaaggccgattgtccccacgcgtgtgggggtgaaccggtggcaagggtgtattttacgatgcgtgggtcattgtccccacgcgtgtgggggtgaaccggggtcttattcctctgcccgccaggggcacctaattgtccccacgcgtgtgggggtgaacctcggaggcggtatggatgatgacacgggcaaccctattgtccccacgcgtgtgggggtgaaccagcacctttccgccggacttttcgacgctttgtcattgtccccacgcgtgtgggggtgaaccgggacaaccgtggacgctattgtcattgagcaaattgtccccacgcgtgtgggggtgaaccgtggacgagtccattgaggacacaatctgcgacattgtccccacgcgtgtgggggtgaaccgggaggcaagtttgagcgttggctcccgttcacattgtccccacgcgtgtgggggtgaaccgttcaatgattatgttcttcctcacttcgatccattgtccccacgcgtgtgggggtgaaccgtagtaatgatcgtcaaggcgcggacgctcgacattgtccccacgcgtgtgggggtgaaccgagagaatccggtatgagaaacgcgttataaccattgtccccacgcgtgtgggggtgaaccggt

SEQ ID NO: 1013 - DNA, 105636 bp, Artificial Sequence
  Synthetic Oligonucleotide
  misc_feature (1)..(92671): n is a, c, g, or t
nnnnnnnnnnnnnnnnnnnnnnnnnnnnnnnnnnnnnnnnnnnnnnnnnnnnnnnnnnnnnnnnnnnnnnnnnnnnnnnnnnnnnnnnnnnnnnnnnnnnnnnnnnnnnnnnnnnnnnnnnnnnnnnnnnnnnnnnnnnnnnnnnnnnnnnnnnnnnnnnnnnnnnnnnnnnnnnnnnnnnnnnnnnnnnnnnnnnnnnnnnnnnnnnnnnnnnnnnnnnnnnnnnnnnnnnnnnnnnnnnnnnnnnnnnnnnnnnnnnnnnnnnnnnnnnnnnnnnnnnnnnnnnnnnnnnnnnnnnnnnnnnnnnnnnnnnnnnnnnnnnnnnnnnnnnnnnnnnnnnnnnnnnnnnnnnnnnnnnnnnnnnnnnnnnnnnnnnnnnnnnnnnnnnnnnnnnnnnnnnnnnnnnnnnnnnnnnnnnnnnnnnnnnnnnnnnnnnnnnnnnnnnnnnnnnnnnnnnnnnnnnnnnnnnnnnnnnnnnnnnnnnnnnnnnnnnnnnnnnnnnnnnnnnnnnnnnnnnnnnnnnnnnnnnnnnnnnnnnnnnnnnnnnnnnnnnnnnnnnnnnnnnnnnnnnnnnnnnnnnnnnnnnnnnnnnnnnnnnnnnnnnnnnnnnnnnnnnnnnnnnnnnnnnnnnnnnnnnnnnnnnnnnnnnnnnnnnnnnnnnnnnnnnnnnnnnnnnnnnnnnnnnnnnnnnnnnnnnnnnnnnnnnnnnnnnnnnnnnnnnnnnnnnnnnnnnnnnnnnnnnnnnnnnnnnnnnnnnnnnnnnnnnnnnnnnnnnnnnnnnnnnnnnnnnnnnnnnnnnnnnnnnnnnnnnnnnnnnnnnnnnnnnnnnnnnnnnnnnnnnnnnnnnnnnnnnnnnnnnnnnnnnnnnnnnnnnnnnnnnnnnnnnnnnnnnnnnnnnnnnnnnnnnnnnnnnnnnnnnnnnnnnnnnnnnnnnnnnnnnnnnnnnnnnnnnnnnnnnnnnnnnnnnnnnnnnnnnnnnnnnnnnnnnnnnnnnnnnnnnnnnnnnnnnnnnnnnnnnnnnnnnnnnnnnnnnnnnnnnnnnnnnnnnnnnnnnnnnnnnnnnnnnnnnnnnnnnnnnnnnnnnnnnnnnnnnnnnnnnnnnnnnnnnnnnnnnnnnnnnnnnnnnnnnnnnnnnnnnnnnnnnnnnnnnnnnnnnnnnnnnnnnnnnnnnnnnnnnnnnnnnnnnnnnnnnnnnnnnnnnnnnnnnnnnnnnnnnnnnnnnnnnnnnnnnnnnnnnnnnnnnnnnnnnnnnnnnnnnnnnnnnnnnnnnnnnnnnnnnnnnnnnnnnnnnnnnnnnnnnnnnnnnnnnnnnnnnnnnnnnnnnnnnnnnnnnnnnnnnnnnnnnnnnnnnnnnnnnnnnnnnnnnnnnnnnnnnnnnnnnnnnnnnnnnnnnnnnnnnnnnnnnnnnnnnnnnnnnnnnnnnnnnnnnnnnnnnnnnnnnnnnnnnnnnnnnnnnnnnnnnnnnnnnnnnnnnnnnnnnnnnnnnnnnnnnnnnnnnnnnnnnnnnnnnnnnnnnnnnnnnnnnnnnnnnnnnnnnnnnnnnnnnnnnnnnnnnnnnnnnnnnnnnnnnnnnnnnnnnnnnnnnnnnnnnnnnnnnnnnnnnnnnnnnnnnnnnnnnnnnnnnnnnnnnnnnnnnnnnnnnnnnnnnnnnnnnnnnnnnnnnnnnnnnnnnnnnnnnnnnnnnnnnnnnnnnnnnnnnnnnnnnnnnnnnnnnnnnnnnnnnnnnnnnnnnnnnnnnnnnnnnnnnnnnnnnnnnnnnnnnnnnnnnnnnnnnnnnnnnnnnnnnnnnnnnnnnnnnnnnnnnnnnnnnnnnnnnnnnnnnnnnnnnnnnnnnnnnnnnnnnnnnnnnnnnnnnnnnnnnnnnnnnnnnnnnnnnnnnnnnnnnnnnnnnnnnnnnnnnnnnnnnnnnnnnnnnnnnnnnnnnnnnnnnnnnnnnnnnnnnnnnnnnnnnnnnnnnnnnnnnnnnnnnnnnnnnnnnnnnnnnnnnnnnnnnnnnnnnnnnnnnnnnnnnnnnnnnnnnnnnnnnnnnnnnnnnnnnnnnnnnnnnnnnnnnnnnnnnnnnnnnnnnnnnnnnnnnnnnnnnnnnnnnnnnnnnnnnnnnnnnnnnnnnnnnnnnnnnnnnnnnnnnnnnnnnnnnnnnnnnnnnnnnnnnnnnnnnnnnnnnnnnnnnnnnnnnnnnnnnnnnnnnnnnnnnnnnnnnnnnnnnnnnnnnnnnnnnnnnnnnnnnnnnnnnnnnnnnnnnnnnnnnnnnnnnnnnnnnnnnnnnnnnnnnnnnnnnnnnnnnnnnnnnnnnnnnnnnnnnnnnnnnnnnnnnnnnnnnnnnnnnnnnnnnnnnnnnnnnnnnnnnnnnnnnnnnnnnnnnnnnnnnnnnnnnnnnnnnnnnnnnnnnnnnnnnnnnnnnnnnnnnnnnnnnnnnnnnnnnnnnnnnnnnnnnnnnnnnnnnnnnnnnnnnnnnnnnnnnnnnnnnnnnnnnnnnnnnnnnnnnnnnnnnnnnnnnnnnnnnnnnnnnnnnnnnnnnnnnnnnnnnnnnnnnnnnnnnnnnnnnnnnnnnnnnnnnnnnnnnnnnnnnnnnnnnnnnnnnnnnnnnnnnnnnnnnnnnnnnnnnnnnnnnnnnnnnnnnnnnnnnnnnnnnnnnnnnnnnnnnnnnnnnnnnnnnnnnnnnnnnnnnnnnnnnnnnnnnnnnnnnnnnnnnnnnnnnnnnnnnnnnnnnnnnnnnnnnnnnnnnnnnnnnnnnnnnnnnnnnnnnnnnnnnnnnnnnnnnnnnnnnnnnnnnnnnnnnnnnnnnnnnnnnnnnnnnnnnnnnnnnnnnnnnnnnnnnnnnnnnnnnnnnnnnnnnnnnnnnnnnnnnnnnnnnnnnnnnnnnnnnnnnnnnnnnnnnnnnnnnnnnnnnnnnnnnnnnnnnnnnnnnnnnnnnnnnnnnnnnnnnnnnnnnnnnnnnnnnnnnnnnnnnnnnnnnnnnnnnnnnnnnnnnnnnnnnnnnnnnnnnnnnnnnnnnnnnnnnnnnnnnnnnnnnnnnnnnnnnnnnnnnnnnnnnnnnnnnnnnnnnnnnnnnnnnnnnnnnnnnnnnnnnnnnnnnnnnnnnnnnnnnnnnnnnnnnnnnnnnnnnnnnnnnnnnnnnnnnnnnnnnnnnnnnnnnnnnnnnnnnnnnnnnnnnnnnnnnnnnnnnnnnnnnnnnnnnnnnnnnnnnnnnnnnnnnnnnnnnnnnnnnnnnnnnnnnnnnnnnnnnnnnnnnnnnnnnnnnnnnnnnnnnnnnnnnnnnnnnnnnnnnnnnnnnnnnnnnnnnnnnnnnnnnnnnnnnnnnnnnnnnnnnnnnnnnnnnnnnnnnnnnnnnnnnnnnnnnnnnnnnnnnnnnnnnnnnnnnnnnnnnnnnnnnnnnnnnnnnnnnnnnnnnnnnnnnnnnnnnnnnnnnnnnnnnnnnnnnnnnnnnnnnnnnnnnnnnnnnnnnnnnnnnnnnnnnnnnnnnnnnnnnnnnnnnnnnnnnnnnnnnnnnnnnnnnnnnnnnnnnnnnnnnnnnnnnnnnnnnnnnnnnnnnnnnnnnnnnnnnnnnnnnnnnnnnnnnnnnnnnnnnnnnnnnnnnnnnnnnnnnnnnnnnnnnnnnnnnnnnnnnnnnnnnnnnnnnnnnnnnnnnnnnnnnnnnnnnnnnnnnnnnnnnnnnnnnnnnnnnnnnnnnnnnnnnnnnnnnnnnnnnnnnnnnnnnnnnnnnnnnnnnnnnnnnnnnnnnnnnnnnnnnnnnnnnnnnnnnnnnnnnnnnnnnnnnnnnnnnnnnnnnnnnnnnnnnnnnnnnnnnnnnnnnnnnnnnnnnnnnnnnnnnnnnnnnnnnnnnnnnnnnnnnnnnnnnnnnnnnnnnnnnnnnnnnnnnnnnnnnnnnnnnnnnnnnnnnnnnnnnnnnnnnnnnnnnnnnnnnnnnnnnnnnnnnnnnnnnnnnnnnnnnnnnnnnnnnnnnnnnnnnnnnnnnnnnnnnnnnnnnnnnnnnnnnnnnnnnnnnnnnnnnnnnnnnnnnnnnnnnnnnnnnnnnnnnnnnnnnnnnnnnnnnnnnnnnnnnnnnnnnnnnnnnnnnnnnnnnnnnnnnnnnnnnnnnnnnnnnnnnnnnnnnnnnnnnnnnnnnnnnnnnnnnnnnnnnnnnnnnnnnnnnnnnnnnnnnnnnnnnnnnnnnnnnnnnnnnnnnnnnnnnnnnnnnnnnnnnnnnnnnnnnnnnnnnnnnnnnnnnnnnnnnnnnnnnnnnnnnnnnnnnnnnnnnnnnnnnnnnnnnnnnnnnnnnnnnnnnnnnnnnnnnnnnnnnnnnnnnnnnnnnnnnnnnnnnnnnnnnnnnnnnnnnnnnnnnnnnnnnnnnnnnnnnnnnnnnnnnnnnnnnnnnnnnnnnnnnnnnnnnnnnnnnnnnnnnnnnnnnnnnnnnnnnnnnnnnnnnnnnnnnnnnnnnnnnnnnnnnnnnnnnnnnnnnnnnnnnnnnnnnnnnnnnnnnnnnnnnnnnnnnnnnnnnnnnnnnnnnnnnnnnnnnnnnnnnnnnnnnnnnnnnnnnnnnnnnnnnnnnnnnnnnnnnnnnnnnnnnnnnnnnnnnnnnnnnnnnnnnnnnnnnnnnnnnnnnnnnnnnnnnnnnnnnnnnnnnnnnnnnnnnnnnnnnnnnnnnnnnnnnnnnnnnnnnnnnnnnnnnnnnnnnnnnnnnnnnnnnnnnnnnnnnnnnnnnnnnnnnnnnnnnnnnnnnnnnnnnnnnnnnnnnnnnnnnnnnnnnnnnnnnnnnnnnnnnnnnnnnnnnnnnnnnnnnnnnnnnnnnnnnnnnnnnnnnnnnnnnnnnnnnnnnnnnnnnnnnnnnnnnnnnnnnnnnnnnnnnnnnnnnnnnnnnnnnnnnnnnnnnnnnnnnnnnnnnnnnnnnnnnnnnnnnnnnnnnnnnnnnnnnnnnnnnnnnnnnnnnnnnnnnnnnnnnnnnnnnnnnnnnnnnnnnnnnnnnnnnnnnnnnnnnnnnnnnnnnnnnnnnnnnnnnnnnnnnnnnnnnnnnnnnnnnnnnnnnnnnnnnnnnnnnnnnnnnnnnnnnnnnnnnnnnnnnnnnnnnnnnnnnnnnnnnnnnnnnnnnnnnnnnnnnnnnnnnnnnnnnnnnnnnnnnnnnnnnnnnnnnnnnnnnnnnnnnnnnnnnnnnnnnnnnnnnnnnnnnnnnnnnnnnnnnnnnnnnnnnnnnnnnnnnnnnnnnnnnnnnnnnnnnnnnnnnnnnnnnnnnnnnnnnnnnnnnnnnnnnnnnnnnnnnnnnnnnnnnnnnnnnnnnnnnnnnnnnnnnnnnnnnnnnnnnnnnnnnnnnnnnnnnnnnnnnnnnnnnnnnnnnnnnnnnnnnnnnnnnnnnnnnnnnnnnnnnnnnnnnnnnnnnnnnnnnnnnnnnnnnnnnnnnnnnnnnnnnnnnnnnnnnnnnnnnnnnnnnnnnnnnnnnnnnnnnnnnnnnnnnnnnnnnnnnnnnnnnnnnnnnnnnnnnnnnnnnnnnnnnnnnnnnnnnnnnnnnnnnnnnnnnnnnnnnnnnnnnnnnnnnnnnnnnnnnnnnnnnnnnnnnnnnnnnnnnnnnnnnnnnnnnnnnnnnnnnnnnnnnnnnnnnnnnnnnnnnnnnnnnnnnnnnnnnnnnnnnnnnnnnnnnnnnnnnnnnnnnnnnnnnnnnnnnnnnnnnnnnnnnnnnnnnnnnnnnnnnnnnnnnnnnnnnnnnnnnnnnnnnnnnnnnnnnnnnnnnnnnnnnnnnnnnnnnnnnnnnnnnnnnnnnnnnnnnnnnnnnnnnnnnnnnnnnnnnnnnnnnnnnnnnnnnnnnnnnnnnnnnnnnnnnnnnnnnnnnnnnnnnnnnnnnnnnnnnnnnnnnnnnnnnnnnnnnnnnnnnnnnnnnnnnnnnnnnnnnnnnnnnnnnnnnnnnnnnnnnnnnnnnnnnnnnnnnnnnnnnnnnnnnnnnnnnnnnnnnnnnnnnnnnnnnnnnnnnnnnnnnnnnnnnnnnnnnnnnnnnnnnnnnnnnnnnnnnnnnnnnnnnnnnnnnnnnnnnnnnnnnnnnnnnnnnnnnnnnnnnnnnnnnnnnnnnnnnnnnnnnnnnnnnnnnnnnnnnnnnnnnnnnnnnnnnnnnnnnnnnnnnnnnnnnnnnnnnnnnnnnnnnnnnnnnnnnnnnnnnnnnnnnnnnnnnnnnnnnnnnnnnnnnnnnnnnnnnnnnnnnnnnnnnnnnnnnnnnnnnnnnnnnnnnnnnnnnnnnnnnnnnnnnnnnnnnnnnnnnnnnnnnnnnnnnnnnnnnnnnnnnnnnnnnnnnnnnnnnnnnnnnnnnnnnnnnnnnnnnnnnnnnnnnnnnnnnnnnnnnnnnnnnnnnnnnnnnnnnnnnnnnnnnnnnnnnnnnnnnnnnnnnnnnnnnnnnnnnnnnnnnnnnnnnnnnnnnnnnnnnnnnnnnnnnnnnnnnnnnnnnnnnnnnnnnnnnnnnnnnnnnnnnnnnnnnnnnnnnnnnnnnnnnnnnnnnnnnnnnnnnnnnnnnnnnnnnnnnnnnnnnnnnnnnnnnnnnnnnnnnnnnnnnnnnnnnnnnnnnnnnnnnnnnnnnnnnnnnnnnnnnnnnnnnnnnnnnnnnnnnnnnnnnnnnnnnnnnnnnnnnnnnnnnnnnnnnnnnnnnnnnnnnnnnnnnnnnnnnnnnnnnnnnnnnnnnnnnnnnnnnnnnnnnnnnnnnnnnnnnnnnnnnnnnnnnnnnnnnnnnnnnnnnnnnnnnnnnnnnnnnnnnnnnnnnnnnnnnnnnnnnnnnnnnnnnnnnnnnnnnnnnnnnnnnnnnnnnnnnnnnnnnnnnnnnnnnnnnnnnnnnnnnnnnnnnnnnnnnnnnnnnnnnnnnnnnnnnnnnnnnnnnnnnnnnnnnnnnnnnnnnnnnnnnnnnnnnnnnnnnnnnnnnnnnnnnnnnnnnnnnnnnnnnnnnnnnnnnnnnnnnnnnnnnnnnnnnnnnnnnnnnnnnnnnnnnnnnnnnnnnnnnnnnnnnnnnnnnnnnnnnnnnnnnnnnnnnnnnnnnnnnnnnnnnnnnnnnnnnnnnnnnnnnnnnnnnnnnnnnnnnnnnnnnnnnnnnnnnnnnnnnnnnnnnnnnnnnnnnnnnnnnnnnnnnnnnnnnnnnnnnnnnnnnnnnnnnnnnnnnnnnnnnnnnnnnnnnnnnnnnnnnnnnnnnnnnnnnnnnnnnnnnnnnnnnnnnnnnnnnnnnnnnnnnnnnnnnnnnnnnnnnnnnnnnnnnnnnnnnnnnnnnnnnnnnnnnnnnnnnnnnnnnnnnnnnnnnnnnnnnnnnnnnnnnnnnnnnnnnnnnnnnnnnnnnnnnnnnnnnnnnnnnnnnnnnnnnnnnnnnnnnnnnnnnnnnnnnnnnnnnnnnnnnnnnnnnnnnnnnnnnnnnnnnnnnnnnnnnnnnnnnnnnnnnnnnnnnnnnnnnnnnnnnnnnnnnnnnnnnnnnnnnnnnnnnnnnnnnnnnnnnnnnnnnnnnnnnnnnnnnnnnnnnnnnnnnnnnnnnnnnnnnnnnnnnnnnnnnnnnnnnnnnnnnnnnnnnnnnnnnnnnnnnnnnnnnnnnnnnnnnnnnnnnnnnnnnnnnnnnnnnnnnnnnnnnnnnnnnnnnnnnnnnnnnnnnnnnnnnnnnnnnnnnnnnnnnnnnnnnnnnnnnnnnnnnnnnnnnnnnnnnnnnnnnnnnnnnnnnnnnnnnnnnnnnnnnnnnnnnnnnnnnnnnnnnnnnnnnnnnnnnnnnnnnnnnnnnnnnnnnnnnnnnnnnnnnnnnnnnnnnnnnnnnnnnnnnnnnnnnnnnnnnnnnnnnnnnnnnnnnnnnnnnnnnnnnnnnnnnnnnnnnnnnnnnnnnnnnnnnnnnnnnnnnnnnnnnnnnnnnnnnnnnnnnnnnnnnnnnnnnnnnnnnnnnnnnnnnnnnnnnnnnnnnnnnnnnnnnnnnnnnnnnnnnnnnnnnnnnnnnnnnnnnnnnnnnnnnnnnnnnnnnnnnnnnnnnnnnnnnnnnnnnnnnnnnnnnnnnnnnnnnnnnnnnnnnnnnnnnnnnnnnnnnnnnnnnnnnnnnnnnnnnnnnnnnnnnnnnnnnnnnnnnnnnnnnnnnnnnnnnnnnnnnnnnnnnnnnnnnnnnnnnnnnnnnnnnnnnnnnnnnnnnnnnnnnnnnnnnnnnnnnnnnnnnnnnnnnnnnnnnnnnnnnnnnnnnnnnnnnnnnnnnnnnnnnnnnnnnnnnnnnnnnnnnnnnnnnnnnnnnnnnnnnnnnnnnnnnnnnnnnnnnnnnnnnnnnnnnnnnnnnnnnnnnnnnnnnnnnnnnnnnnnnnnnnnnnnnnnnnnnnnnnnnnnnnnnnnnnnnnnnnnnnnnnnnnnnnnnnnnnnnnnnnnnnnnnnnnnnnnnnnnnnnnnnnnnnnnnnnnnnnnnnnnnnnnnnnnnnnnnnnnnnnnnnnnnnnnnnnnnnnnnnnnnnnnnnnnnnnnnnnnnnnnnnnnnnnnnnnnnnnnnnnnnnnnnnnnnnnnnnnnnnnnnnnnnnnnnnnnnnnnnnnnnnnnnnnnnnnnnnnnnnnnnnnnnnnnnnnnnnnnnnnnnnnnnnnnnnnnnnnnnnnnnnnnnnnnnnnnnnnnnnnnnnnnnnnnnnnnnnnnnnnnnnnnnnnnnnnnnnnnnnnnnnnnnnnnnnnnnnnnnnnnnnnnnnnnnnnnnnnnnnnnnnnnnnnnnnnnnnnnnnnnnnnnnnnnnnnnnnnnnnnnnnnnnnnnnnnnnnnnnnnnnnnnnnnnnnnnnnnnnnnnnnnnnnnnnnnnnnnnnnnnnnnnnnnnnnnnnnnnnnnnnnnnnnnnnnnnnnnnnnnnnnnnnnnnnnnnnnnnnnnnnnnnnnnnnnnnnnnnnnnnnnnnnnnnnnnnnnnnnnnnnnnnnnnnnnnnnnnnnnnnnnnnnnnnnnnnnnnnnnnnnnnnnnnnnnnnnnnnnnnnnnnnnnnnnnnnnnnnnnnnnnnnnnnnnnnnnnnnnnnnnnnnnnnnnnnnnnnnnnnnnnnnnnnnnnnnnnnnnnnnnnnnnnnnnnnnnnnnnnnnnnnnnnnnnnnnnnnnnnnnnnnnnnnnnnnnnnnnnnnnnnnnnnnnnnnnnnnnnnnnnnnnnnnnnnnnnnnnnnnnnnnnnnnnnnnnnnnnnnnnnnnnnnnnnnnnnnnnnnnnnnnnnnnnnnnnnnnnnnnnnnnnnnnnnnnnnnnnnnnnnnnnnnnnnnnnnnnnnnnnnnnnnnnnnnnnnnnnnnnnnnnnnnnnnnnnnnnnnnnnnnnnnnnnnnnnnnnnnnnnnnnnnnnnnnnnnnnnnnnnnnnnnnnnnnnnnnnnnnnnnnnnnnnnnnnnnnnnnnnnnnnnnnnnnnnnnnnnnnnnnnnnnnnnnnnnnnnnnnnnnnnnnnnnnnnnnnnnnnnnnnnnnnnnnnnnnnnnnnnnnnnnnnnnnnnnnnnnnnnnnnnnnnnnnnnnnnnnnnnnnnnnnnnnnnnnnnnnnnnnnnnnnnnnnnnnnnnnnnnnnnnnnnnnnnnnnnnnnnnnnnnnnnnnnnnnnnnnnnnnnnnnnnnnnnnnnnnnnnnnnnnnnnnnnnnnnnnnnnnnnnnnnnnnnnnnnnnnnnnnnnnnnnnnnnnnnnnnnnnnnnnnnnnnnnnnnnnnnnnnnnnnnnnnnnnnnnnnnnnnnnnnnnnnnnnnnnnnnnnnnnnnnnnnnnnnnnnnnnnnnnnnnnnnnnnnnnnnnnnnnnnnnnnnnnnnnnnnnnnnnnnnnnnnnnnnnnnnnnnnnnnnnnnnnnnnnnnnnnnnnnnnnnnnnnnnnnnnnnnnnnnnnnnnnnnnnnnnnnnnnnnnnnnnnnnnnnnnnnnnnnnnnnnnnnnnnnnnnnnnnnnnnnnnnnnnnnnnnnnnnnnnnnnnnnnnnnnnnnnnnnnnnnnnnnnnnnnnnnnnnnnnnnnnnnnnnnnnnnnnnnnnnnnnnnnnnnnnnnnnnnnnnnnnnnnnnnnnnnnnnnnnnnnnnnnnnnnnnnnnnnnnnnnnnnnnnnnnnnnnnnnnnnnnnnnnnnnnnnnnnnnnnnnnnnnnnnnnnnnnnnnnnnnnnnnnnnnnnnnnnnnnnnnnnnnnnnnnnnnnnnnnnnnnnnnnnnnnnnnnnnnnnnnnnnnnnnnnnnnnnnnnnnnnnnnnnnnnnnnnnnnnnnnnnnnnnnnnnnnnnnnnnnnnnnnnnnnnnnnnnnnnnnnnnnnnnnnnnnnnnnnnnnnnnnnnnnnnnnnnnnnnnnnnnnnnnnnnnnnnnnnnnnnnnnnnnnnnnnnnnnnnnnnnnnnnnnnnnnnnnnnnnnnnnnnnnnnnnnnnnnnnnnnnnnnnnnnnnnnnnnnnnnnnnnnnnnnnnnnnnnnnnnnnnnnnnnnnnnnnnnnnnnnnnnnnnnnnnnnnnnnnnnnnnnnnnnnnnnnnnnnnnnnnnnnnnnnnnnnnnnnnnnnnnnnnnnnnnnnnnnnnnnnnnnnnnnnnnnnnnnnnnnnnnnnnnnnnnnnnnnnnnnnnnnnnnnnnnnnnnnnnnnnnnnnnnnnnnnnnnnnnnnnnnnnnnnnnnnnnnnnnnnnnnnnnnnnnnnnnnnnnnnnnnnnnnnnnnnnnnnnnnnnnnnnnnnnnnnnnnnnnnnnnnnnnnnnnnnnnnnnnnnnnnnnnnnnnnnnnnnnnnnnnnnnnnnnnnnnnnnnnnnnnnnnnnnnnnnnnnnnnnnnnnnnnnnnnnnnnnnnnnnnnnnnnnnnnnnnnnnnnnnnnnnnnnnnnnnnnnnnnnnnnnnnnnnnnnnnnnnnnnnnnnnnnnnnnnnnnnnnnnnnnnnnnnnnnnnnnnnnnnnnnnnnnnnnnnnnnnnnnnnnnnnnnnnnnnnnnnnnnnnnnnnnnnnnnnnnnnnnnnnnnnnnnnnnnnnnnnnnnnnnnnnnnnnnnnnnnnnnnnnnnnnnnnnnnnnnnnnnnnnnnnnnnnnnnnnnnnnnnnnnnnnnnnnnnnnnnnnnnnnnnnnnnnnnnnnnnnnnnnnnnnnnnnnnnnnnnnnnnnnnnnnnnnnnnnnnnnnnnnnnnnnnnnnnnnnnnnnnnnnnnnnnnnnnnnnnnnnnnnnnnnnnnnnnnnnnnnnnnnnnnnnnnnnnnnnnnnnnnnnnnnnnnnnnnnnnnnnnnnnnnnnnnnnnnnnnnnnnnnnnnnnnnnnnnnnnnnnnnnnnnnnnnnnnnnnnnnnnnnnnnnnnnnnnnnnnnnnnnnnnnnnnnnnnnnnnnnnnnnnnnnnnnnnnnnnnnnnnnnnnnnnnnnnnnnnnnnnnnnnnnnnnnnnnnnnnnnnnnnnnnnnnnnnnnnnnnnnnnnnnnnnnnnnnnnnnnnnnnnnnnnnnnnnnnnnnnnnnnnnnnnnnnnnnnnnnnnnnnnnnnnnnnnnnnnnnnnnnnnnnnnnnnnnnnnnnnnnnnnnnnnnnnnnnnnnnnnnnnnnnnnnnnnnnnnnnnnnnnnnnnnnnnnnnnnnnnnnnnnnnnnnnnnnnnnnnnnnnnnnnnnnnnnnnnnnnnnnnnnnnnnnnnnnnnnnnnnnnnnnnnnnnnnnnnnnnnnnnnnnnnnnnnnnnnnnnnnnnnnnnnnnnnnnnnnnnnnnnnnnnnnnnnnnnnnnnnnnnnnnnnnnnnnnnnnnnnnnnnnnnnnnnnnnnnnnnnnnnnnnnnnnnnnnnnnnnnnnnnnnnnnnnnnnnnnnnnnnnnnnnnnnnnnnnnnnnnnnnnnnnnnnnnnnnnnnnnnnnnnnnnnnnnnnnnnnnnnnnnnnnnnnnnnnnnnnnnnnnnnnnnnnnnnnnnnnnnnnnnnnnnnnnnnnnnnnnnnnnnnnnnnnnnnnnnnnnnnnnnnnnnnnnnnnnnnnnnnnnnnnnnnnnnnnnnnnnnnnnnnnnnnnnnnnnnnnnnnnnnnnnnnnnnnnnnnnnnnnnnnnnnnnnnnnnnnnnnnnnnnnnnnnnnnnnnnnnnnnnnnnnnnnnnnnnnnnnnnnnnnnnnnnnnnnnnnnnnnnnnnnnnnnnnnnnnnnnnnnnnnnnnnnnnnnnnnnnnnnnnnnnnnnnnnnnnnnnnnnnnnnnnnnnnnnnnnnnnnnnnnnnnnnnnnnnnnnnnnnnnnnnnnnnnnnnnnnnnnnnnnnnnnnnnnnnnnnnnnnnnnnnnnnnnnnnnnnnnnnnnnnnnnnnnnnnnnnnnnnnnnnnnnnnnnnnnnnnnnnnnnnnnnnnnnnnnnnnnnnnnnnnnnnnnnnnnnnnnnnnnnnnnnnnnnnnnnnnnnnnnnnnnnnnnnnnnnnnnnnnnnnnnnnnnnnnnnnnnnnnnnnnnnnnnnnnnnnnnnnnnnnnnnnnnnnnnnnnnnnnnnnnnnnnnnnnnnnnnnnnnnnnnnnnnnnnnnnnnnnnnnnnnnnnnnnnnnnnnnnnnnnnnnnnnnnnnnnnnnnnnnnnnnnnnnnnnnnnnnnnnnnnnnnnnnnnnnnnnnnnnnnnnnnnnnnnnnnnnnnnnnnnnnnnnnnnnnnnnnnnnnnnnnnnnnnnnnnnnnnnnnnnnnnnnnnnnnnnnnnnnnnnnnnnnnnnnnnnnnnnnnnnnnnnnnnnnnnnnnnnnnnnnnnnnnnnnnnnnnnnnnnnnnnnnnnnnnnnnnnnnnnnnnnnnnnnnnnnnnnnnnnnnnnnnnnnnnnnnnnnnnnnnnnnnnnnnnnnnnnnnnnnnnnnnnnnnnnnnnnnnnnnnnnnnnnnnnnnnnnnnnnnnnnnnnnnnnnnnnnnnnnnnnnnnnnnnnnnnnnnnnnnnnnnnnnnnnnnnnnnnnnnnnnnnnnnnnnnnnnnnnnnnnnnnnnnnnnnnnnnnnnnnnnnnnnnnnnnnnnnnnnnnnnnnnnnnnnnnnnnnnnnnnnnnnnnnnnnnnnnnnnnnnnnnnnnnnnnnnnnnnnnnnnnnnnnnnnnnnnnnnnnnnnnnnnnnnnnnnnnnnnnnnnnnnnnnnnnnnnnnnnnnnnnnnnnnnnnnnnnnnnnnnnnnnnnnnnnnnnnnnnnnnnnnnnnnnnnnnnnnnnnnnnnnnnnnnnnnnnnnnnnnnnnnnnnnnnnnnnnnnnnnnnnnnnnnnnnnnnnnnnnnnnnnnnnnnnnnnnnnnnnnnnnnnnnnnnnnnnnnnnnnnnnnnnnnnnnnnnnnnnnnnnnnnnnnnnnnnnnnnnnnnnnnnnnnnnnnnnnnnnnnnnnnnnnnnnnnnnnnnnnnnnnnnnnnnnnnnnnnnnnnnnnnnnnnnnnnnnnnnnnnnnnnnnnnnnnnnnnnnnnnnnnnnnnnnnnnnnnnnnnnnnnnnnnnnnnnnnnnnnnnnnnnnnnnnnnnnnnnnnnnnnnnnnnnnnnnnnnnnnnnnnnnnnnnnnnnnnnnnnnnnnnnnnnnnnnnnnnnnnnnnnnnnnnnnnnnnnnnnnnnnnnnnnnnnnnnnnnnnnnnnnnnnnnnnnnnnnnnnnnnnnnnnnnnnnnnnnnnnnnnnnnnnnnnnnnnnnnnnnnnnnnnnnnnnnnnnnnnnnnnnnnnnnnnnnnnnnnnnnnnnnnnnnnnnnnnnnnnnnnnnnnnnnnnnnnnnnnnnnnnnnnnnnnnnnnnnnnnnnnnnnnnnnnnnnnnnnnnnnnnnnnnnnnnnnnnnnnnnnnnnnnnnnnnnnnnnnnnnnnnnnnnnnnnnnnnnnnnnnnnnnnnnnnnnnnnnnnnnnnnnnnnnnnnnnnnnnnnnnnnnnnnnnnnnnnnnnnnnnnnnnnnnnnnnnnnnnnnnnnnnnnnnnnnnnnnnnnnnnnnnnnnnnnnnnnnnnnnnnnnnnnnnnnnnnnnnnnnnnnnnnnnnnnnnnnnnnnnnnnnnnnnnnnnnnnnnnnnnnnnnnnnnnnnnnnnnnnnnnnnnnnnnnnnnnnnnnnnnnnnnnnnnnnnnnnnnnnnnnnnnnnnnnnnnnnnnnnnnnnnnnnnnnnnnnnnnnnnnnnnnnnnnnnnnnnnnnnnnnnnnnnnnnnnnnnnnnnnnnnnnnnnnnnnnnnnnnnnnnnnnnnnnnnnnnnnnnnnnnnnnnnnnnnnnnnnnnnnnnnnnnnnnnnnnnnnnnnnnnnnnnnnnnnnnnnnnnnnnnnnnnnnnnnnnnnnnnnnnnnnnnnnnnnnnnnnnnnnnnnnnnnnnnnnnnnnnnnnnnnnnnnnnnnnnnnnnnnnnnnnnnnnnnnnnnnnnnnnnnnnnnnnnnnnnnnnnnnnnnnnnnnnnnnnnnnnnnnnnnnnnnnnnnnnnnnnnnnnnnnnnnnnnnnnnnnnnnnnnnnnnnnnnnnnnnnnnnnnnnnnnnnnnnnnnnnnnnnnnnnnnnnnnnnnnnnnnnnnnnnnnnnnnnnnnnnnnnnnnnnnnnnnnnnnnnnnnnnnnnnnnnnnnnnnnnnnnnnnnnnnnnnnnnnnnnnnnnnnnnnnnnnnnnnnnnnnnnnnnnnnnnnnnnnnnnnnnnnnnnnnnnnnnnnnnnnnnnnnnnnnnnnnnnnnnnnnnnnnnnnnnnnnnnnnnnnnnnnnnnnnnnnnnnnnnnnnnnnnnnnnnnnnnnnnnnnnnnnnnnnnnnnnnnnnnnnnnnnnnnnnnnnnnnnnnnnnnnnnnnnnnnnnnnnnnnnnnnnnnnnnnnnnnnnnnnnnnnnnnnnnnnnnnnnnnnnnnnnnnnnnnnnnnnnnnnnnnnnnnnnnnnnnnnnnnnnnnnnnnnnnnnnnnnnnnnnnnnnnnnnnnnnnnnnnnnnnnnnnnnnnnnnnnnnnnnnnnnnnnnnnnnnnnnnnnnnnnnnnnnnnnnnnnnnnnnnnnnnnnnnnnnnnnnnnnnnnnnnnnnnnnnnnnnnnnnnnnnnnnnnnnnnnnnnnnnnnnnnnnnnnnnnnnnnnnnnnnnnnnnnnnnnnnnnnnnnnnnnnnnnnnnnnnnnnnnnnnnnnnnnnnnnnnnnnnnnnnnnnnnnnnnnnnnnnnnnnnnnnnnnnnnnnnnnnnnnnnnnnnnnnnnnnnnnnnnnnnnnnnnnnnnnnnnnnnnnnnnnnnnnnnnnnnnnnnnnnnnnnnnnnnnnnnnnnnnnnnnnnnnnnnnnnnnnnnnnnnnnnnnnnnnnnnnnnnnnnnnnnnnnnnnnnnnnnnnnnnnnnnnnnnnnnnnnnnnnnnnnnnnnnnnnnnnnnnnnnnnnnnnnnnnnnnnnnnnnnnnnnnnnnnnnnnnnnnnnnnnnnnnnnnnnnnnnnnnnnnnnnnnnnnnnnnnnnnnnnnnnnnnnnnnnnnnnnnnnnnnnnnnnnnnnnnnnnnnnnnnnnnnnnnnnnnnnnnnnnnnnnnnnnnnnnnnnnnnnnnnnnnnnnnnnnnnnnnnnnnnnnnnnnnnnnnnnnnnnnnnnnnnnnnnnnnnnnnnnnnnnnnnnnnnnnnnnnnnnnnnnnnnnnnnnnnnnnnnnnnnnnnnnnnnnnnnnnnnnnnnnnnnnnnnnnnnnnnnnnnnnnnnnnnnnnnnnnnnnnnnnnnnnnnnnnnnnnnnnnnnnnnnnnnnnnnnnnnnnnnnnnnnnnnnnnnnnnnnnnnnnnnnnnnnnnnnnnnnnnnnnnnnnnnnnnnnnnnnnnnnnnnnnnnnnnnnnnnnnnnnnnnnnnnnnnnnnnnnnnnnnnnnnnnnnnnnnnnnnnnnnnnnnnnnnnnnnnnnnnnnnnnnnnnnnnnnnnnnnnnnnnnnnnnnnnnnnnnnnnnnnnnnnnnnnnnnnnnnnnnnnnnnnnnnnnnnnnnnnnnnnnnnnnnnnnnnnnnnnnnnnnnnnnnnnnnnnnnnnnnnnnnnnnnnnnnnnnnnnnnnnnnnnnnnnnnnnnnnnnnnnnnnnnnnnnnnnnnnnnnnnnnnnnnnnnnnnnnnnnnnnnnnnnnnnnnnnnnnnnnnnnnnnnnnnnnnnnnnnnnnnnnnnnnnnnnnnnnnnnnnnnnnnnnnnnnnnnnnnnnnnnnnnnnnnnnnnnnnnnnnnnnnnnnnnnnnnnnnnnnnnnnnnnnnnnnnnnnnnnnnnnnnnnnnnnnnnnnnnnnnnnnnnnnnnnnnnnnnnnnnnnnnnnnnnnnnnnnnnnnnnnnnnnnnnnnnnnnnnnnnnnnnnnnnnnnnnnnnnnnnnnnnnnnnnnnnnnnnnnnnnnnnnnnnnnnnnnnnnnnnnnnnnnnnnnnnnnnnnnnnnnnnnnnnnnnnnnnnnnnnnnnnnnnnnnnnnnnnnnnnnnnnnnnnnnnnnnnnnnnnnnnnnnnnnnnnnnnnnnnnnnnnnnnnnnnnnnnnnnnnnnnnnnnnnnnnnnnnnnnnnnnnnnnnnnnnnnnnnnnnnnnnnnnnnnnnnnnnnnnnnnnnnnnnnnnnnnnnnnnnnnnnnnnnnnnnnnnnnnnnnnnnnnnnnnnnnnnnnnnnnnnnnnnnnnnnnnnnnnnnnnnnnnnnnnnnnnnnnnnnnnnnnnnnnnnnnnnnnnnnnnnnnnnnnnnnnnnnnnnnnnnnnnnnnnnnnnnnnnnnnnnnnnnnnnnnnnnnnnnnnnnnnnnnnnnnnnnnnnnnnnnnnnnnnnnnnnnnnnnnnnnnnnnnnnnnnnnnnnnnnnnnnnnnnnnnnnnnnnnnnnnnnnnnnnnnnnnnnnnnnnnnnnnnnnnnnnnnnnnnnnnnnnnnnnnnnnnnnnnnnnnnnnnnnnnnnnnnnnnnnnnnnnnnnnnnnnnnnnnnnnnnnnnnnnnnnnnnnnnnnnnnnnnnnnnnnnnnnnnnnnnnnnnnnnnnnnnnnnnnnnnnnnnnnnnnnnnnnnnnnnnnnnnnnnnnnnnnnnnnnnnnnnnnnnnnnnnnnnnnnnnnnnnnnnnnnnnnnnnnnnnnnnnnnnnnnnnnnnnnnnnnnnnnnnnnnnnnnnnnnnnnnnnnnnnnnnnnnnnnnnnnnnnnnnnnnnnnnnnnnnnnnnnnnnnnnnnnnnnnnnnnnnnnnnnnnnnnnnnnnnnnnnnnnnnnnnnnnnnnnnnnnnnnnnnnnnnnnnnnnnnnnnnnnnnnnnnnnnnnnnnnnnnnnnnnnnnnnnnnnnnnnnnnnnnnnnnnnnnnnnnnnnnnnnnnnnnnnnnnnnnnnnnnnnnnnnnnnnnnnnnnnnnnnnnnnnnnnnnnnnnnnnnnnnnnnnnnnnnnnnnnnnnnnnnnnnnnnnnnnnnnnnnnnnnnnnnnnnnnnnnnnnnnnnnnnnnnnnnnnnnnnnnnnnnnnnnnnnnnnnnnnnnnnnnnnnnnnnnnnnnnnnnnnnnnnnnnnnnnnnnnnnnnnnnnnnnnnnnnnnnnnnnnnnnnnnnnnnnnnnnnnnnnnnnnnnnnnnnnnnnnnnnnnnnnnnnnnnnnnnnnnnnnnnnnnnnnnnnnnnnnnnnnnnnnnnnnnnnnnnnnnnnnnnnnnnnnnnnnnnnnnnnnnnnnnnnnnnnnnnnnnnnnnnnnnnnnnnnnnnnnnnnnnnnnnnnnnnnnnnnnnnnnnnnnnnnnnnnnnnnnnnnnnnnnnnnnnnnnnnnnnnnnnnnnnnnnnnnnnnnnnnnnnnnnnnnnnnnnnnnnnnnnnnnnnnnnnnnnnnnnnnnnnnnnnnnnnnnnnnnnnnnnnnnnnnnnnnnnnnnnnnnnnnnnnnnnnnnnnnnnnnnnnnnnnnnnnnnnnnnnnnnnnnnnnnnnnnnnnnnnnnnnnnnnnnnnnnnnnnnnnnnnnnnnnnnnnnnnnnnnnnnnnnnnnnnnnnnnnnnnnnnnnnnnnnnnnnnnnnnnnnnnnnnnnnnnnnnnnnnnnnnnnnnnnnnnnnnnnnnnnnnnnnnnnnnnnnnnnnnnnnnnnnnnnnnnnnnnnnnnnnnnnnnnnnnnnnnnnnnnnnnnnnnnnnnnnnnnnnnnnnnnnnnnnnnnnnnnnnnnnnnnnnnnnnnnnnnnnnnnnnnnnnnnnnnnnnnnnnnnnnnnnnnnnnnnnnnnnnnnnnnnnnnnnnnnnnnnnnnnnnnnnnnnnnnnnnnnnnnnnnnnnnnnnnnnnnnnnnnnnnnnnnnnnnnnnnnnnnnnnnnnnnnnnnnnnnnnnnnnnnnnnnnnnnnnnnnnnnnnnnnnnnnnnnnnnnnnnnnnnnnnnnnnnnnnnnnnnnnnnnnnnnnnnnnnnnnnnnnnnnnnnnnnnnnnnnnnnnnnnnnnnnnnnnnnnnnnnnnnnnnnnnnnnnnnnnnnnnnnnnnnnnnnnnnnnnnnnnnnnnnnnnnnnnnnnnnnnnnnnnnnnnnnnnnnnnnnnnnnnnnnnnnnnnnnnnnnnnnnnnnnnnnnnnnnnnnnnnnnnnnnnnnnnnnnnnnnnnnnnnnnnnnnnnnnnnnnnnnnnnnnnnnnnnnnnnnnnnnnnnnnnnnnnnnnnnnnnnnnnnnnnnnnnnnnnnnnnnnnnnnnnnnnnnnnnnnnnnnnnnnnnnnnnnnnnnnnnnnnnnnnnnnnnnnnnnnnnnnnnnnnnnnnnnnnnnnnnnnnnnnnnnnnnnnnnnnnnnnnnnnnnnnnnnnnnnnnnnnnnnnnnnnnnnnnnnnnnnnnnnnnnnnnnnnnnnnnnnnnnnnnnnnnnnnnnnnnnnnnnnnnnnnnnnnnnnnnnnnnnnnnnnnnnnnnnnnnnnnnnnnnnnnnnnnnnnnnnnnnnnnnnnnnnnnnnnnnnnnnnnnnnnnnnnnnnnnnnnnnnnnnnnnnnnnnnnnnnnnnnnnnnnnnnnnnnnnnnnnnnnnnnnnnnnnnnnnnnnnnnnnnnnnnnnnnnnnnnnnnnnnnnnnnnnnnnnnnnnnnnnnnnnnnnnnnnnnnnnnnnnnnnnnnnnnnnnnnnnnnnnnnnnnnnnnnnnnnnnnnnnnnnnnnnnnnnnnnnnnnnnnnnnnnnnnnnnnnnnnnnnnnnnnnnnnnnnnnnnnnnnnnnnnnnnnnnnnnnnnnnnnnnnnnnnnnnnnnnnnnnnnnnnnnnnnnnnnnnnnnnnnnnnnnnnnnnnnnnnnnnnnnnnnnnnnnnnnnnnnnnnnnnnnnnnnnnnnnnnnnnnnnnnnnnnnnnnnnnnnnnnnnnnnnnnnnnnnnnnnnnnnnnnnnnnnnnnnnnnnnnnnnnnnnnnnnnnnnnnnnnnnnnnnnnnnnnnnnnnnnnnnnnnnnnnnnnnnnnnnnnnnnnnnnnnnnnnnnnnnnnnnnnnnnnnnnnnnnnnnnnnnnnnnnnnnnnnnnnnnnnnnnnnnnnnnnnnnnnnnnnnnnnnnnnnnnnnnnnnnnnnnnnnnnnnnnnnnnnnnnnnnnnnnnnnnnnnnnnnnnnnnnnnnnnnnnnnnnnnnnnnnnnnnnnnnnnnnnnnnnnnnnnnnnnnnnnnnnnnnnnnnnnnnnnnnnnnnnnnnnnnnnnnnnnnnnnnnnnnnnnnnnnnnnnnnnnnnnnnnnnnnnnnnnnnnnnnnnnnnnnnnnnnnnnnnnnnnnnnnnnnnnnnnnnnnnnnnnnnnnnnnnnnnnnnnnnnnnnnnnnnnnnnnnnnnnnnnnnnnnnnnnnnnnnnnnnnnnnnnnnnnnnnnnnnnnnnnnnnnnnnnnnnnnnnnnnnnnnnnnnnnnnnnnnnnnnnnnnnnnnnnnnnnnnnnnnnnnnnnnnnnnnnnnnnnnnnnnnnnnnnnnnnnnnnnnnnnnnnnnnnnnnnnnnnnnnnnnnnnnnnnnnnnnnnnnnnnnnnnnnnnnnnnnnnnnnnnnnnnnnnnnnnnnnnnnnnnnnnnnnnnnnnnnnnnnnnnnnnnnnnnnnnnnnnnnnnnnnnnnnnnnnnnnnnnnnnnnnnnnnnnnnnnnnnnnnnnnnnnnnnnnnnnnnnnnnnnnnnnnnnnnnnnnnnnnnnnnnnnnnnnnnnnnnnnnnnnnnnnnnnnnnnnnnnnnnnnnnnnnnnnnnnnnnnnnnnnnnnnnnnnnnnnnnnnnnnnnnnnnnnnnnnnnnnnnnnnnnnnnnnnnnnnnnnnnnnnnnnnnnnnnnnnnnnnnnnnnnnnnnnnnnnnnnnnnnnnnnnnnnnnnnnnnnnnnnnnnnnnnnnnnnnnnnnnnnnnnnnnnnnnnnnnnnnnnnnnnnnnnnnnnnnnnnnnnnnnnnnnnnnnnnnnnnnnnnnnnnnnnnnnnnnnnnnnnnnnnnnnnnnnnnnnnnnnnnnnnnnnnnnnnnnnnnnnnnnnnnnnnnnnnnnnnnnnnnnnnnnnnnnnnnnnnnnnnnnnnnnnnnnnnnnnnnnnnnnnnnnnnnnnnnnnnnnnnnnnnnnnnnnnnnnnnnnnnnnnnnnnnnnnnnnnnnnnnnnnnnnnnnnnnnnnnnnnnnnnnnnnnnnnnnnnnnnnnnnnnnnnnnnnnnnnnnnnnnnnnnnnnnnnnnnnnnnnnnnnnnnnnnnnnnnnnnnnnnnnnnnnnnnnnnnnnnnnnnnnnnnnnnnnnnnnnnnnnnnnnnnnnnnnnnnnnnnnnnnnnnnnnnnnnnnnnnnnnnnnnnnnnnnnnnnnnnnnnnnnnnnnnnnnnnnnnnnnnnnnnnnnnnnnnnnnnnnnnnnnnnnnnnnnnnnnnnnnnnnnnnnnnnnnnnnnnnnnnnnnnnnnnnnnnnnnnnnnnnnnnnnnnnnnnnnnnnnnnnnnnnnnnnnnnnnnnnnnnnnnnnnnnnnnnnnnnnnnnnnnnnnnnnnnnnnnnnnnnnnnnnnnnnnnnnnnnnnnnnnnnnnnnnnnnnnnnnnnnnnnnnnnnnnnnnnnnnnnnnnnnnnnnnnnnnnnnnnnnnnnnnnnnnnnnnnnnnnnnnnnnnnnnnnnnnnnnnnnnnnnnnnnnnnnnnnnnnnnnnnnnnnnnnnnnnnnnnnnnnnnnnnnnnnnnnnnnnnnnnnnnnnnnnnnnnnnnnnnnnnnnnnnnnnnnnnnnnnnnnnnnnnnnnnnnnnnnnnnnnnnnnnnnnnnnnnnnnnnnnnnnnnnnnnnnnnnnnnnnnnnnnnnnnnnnnnnnnnnnnnnnnnnnnnnnnnnnnnnnnnnnnnnnnnnnnnnnnnnnnnnnnnnnnnnnnnnnnnnnnnnnnnnnnnnnnnnnnnnnnnnnnnnnnnnnnnnnnnnnnnnnnnnnnnnnnnnnnnnnnnnnnnnnnnnnnnnnnnnnnnnnnnnnnnnnnnnnnnnnnnnnnnnnnnnnnnnnnnnnnnnnnnnnnnnnnnnnnnnnnnnnnnnnnnnnnnnnnnnnnnnnnnnnnnnnnnnnnnnnnnnnnnnnnnnnnnnnnnnnnnnnnnnnnnnnnnnnnnnnnnnnnnnnnnnnnnnnnnnnnnnnnnnnnnnnnnnnnnnnnnnnnnnnnnnnnnnnnnnnnnnnnnnnnnnnnnnnnnnnnnnnnnnnnnnnnnnnnnnnnnnnnnnnnnnnnnnnnnnnnnnnnnnnnnnnnnnnnnnnnnnnnnnnnnnnnnnnnnnnnnnnnnnnnnnnnnnnnnnnnnnnnnnnnnnnnnnnnnnnnnnnnnnnnnnnnnnnnnnnnnnnnnnnnnnnnnnnnnnnnnnnnnnnnnnnnnnnnnnnnnnnnnnnnnnnnnnnnnnnnnnnnnnnnnnnnnnnnnnnnnnnnnnnnnnnnnnnnnnnnnnnnnnnnnnnnnnnnnnnnnnnnnnnnnnnnnnnnnnnnnnnnnnnnnnnnnnnnnnnnnnnnnnnnnnnnnnnnnnnnnnnnnnnnnnnnnnnnnnnnnnnnnnnnnnnnnnnnnnnnnnnnnnnnnnnnnnnnnnnnnnnnnnnnnnnnnnnnnnnnnnnnnnnnnnnnnnnnnnnnnnnnnnnnnnnnnnnnnnnnnnnnnnnnnnnnnnnnnnnnnnnnnnnnnnnnnnnnnnnnnnnnnnnnnnnnnnnnnnnnnnnnnnnnnnnnnnnnnnnnnnnnnnnnnnnnnnnnnnnnnnnnnnnnnnnnnnnnnnnnnnnnnnnnnnnnnnnnnnnnnnnnnnnnnnnnnnnnnnnnnnnnnnnnnnnnnnnnnnnnnnnnnnnnnnnnnnnnnnnnnnnnnnnnnnnnnnnnnnnnnnnnnnnnnnnnnnnnnnnnnnnnnnnnnnnnnnnnnnnnnnnnnnnnnnnnnnnnnnnnnnnnnnnnnnnnnnnnnnnnnnnnnnnnnnnnnnnnnnnnnnnnnnnnnnnnnnnnnnnnnnnnnnnnnnnnnnnnnnnnnnnnnnnnnnnnnnnnnnnnnnnnnnnnnnnnnnnnnnnnnnnnnnnnnnnnnnnnnnnnnnnnnnnnnnnnnnnnnnnnnnnnnnnnnnnnnnnnnnnnnnnnnnnnnnnnnnnnnnnnnnnnnnnnnnnnnnnnnnnnnnnnnnnnnnnnnnnnnnnnnnnnnnnnnnnnnnnnnnnnnnnnnnnnnnnnnnnnnnnnnnnnnnnnnnnnnnnnnnnnnnnnnnnnnnnnnnnnnnnnnnnnnnnnnnnnnnnnnnnnnnnnnnnnnnnnnnnnnnnnnnnnnnnnnnnnnnnnnnnnnnnnnnnnnnnnnnnnnnnnnnnnnnnnnnnnnnnnnnnnnnnnnnnnnnnnnnnnnnnnnnnnnnnnnnnnnnnnnnnnnnnnnnnnnnnnnnnnnnnnnnnnnnnnnnnnnnnnnnnnnnnnnnnnnnnnnnnnnnnnnnnnnnnnnnnnnnnnnnnnnnnnnnnnnnnnnnnnnnnnnnnnnnnnnnnnnnnnnnnnnnnnnnnnnnnnnnnnnnnnnnnnnnnnnnnnnnnnnnnnnnnnnnnnnnnnnnnnnnnnnnnnnnnnnnnnnnnnnnnnnnnnnnnnnnnnnnnnnnnnnnnnnnnnnnnnnnnnnnnnnnnnnnnnnnnnnnnnnnnnnnnnnnnnnnnnnnnnnnnnnnnnnnnnnnnnnnnnnnnnnnnnnnnnnnnnnnnnnnnnnnnnnnnnnnnnnnnnnnnnnnnnnnnnnnnnnnnnnnnnnnnnnnnnnnnnnnnnnnnnnnnnnnnnnnnnnnnnnnnnnnnnnnnnnnnnnnnnnnnnnnnnnnnnnnnnnnnnnnnnnnnnnnnnnnnnnnnnnnnnnnnnnnnnnnnnnnnnnnnnnnnnnnnnnnnnnnnnnnnnnnnnnnnnnnnnnnnnnnnnnnnnnnnnnnnnnnnnnnnnnnnnnnnnnnnnnnnnnnnnnnnnnnnnnnnnnnnnnnnnnnnnnnnnnnnnnnnnnnnnnnnnnnnnnnnnnnnnnnnnnnnnnnnnnnnnnnnnnnnnnnnnnnnnnnnnnnnnnnnnnnnnnnnnnnnnnnnnnnnnnnnnnnnnnnnnnnnnnnnnnnnnnnnnnnnnnnnnnnnnnnnnnnnnnnnnnnnnnnnnnnnnnnnnnnnnnnnnnnnnnnnnnnnnnnnnnnnnnnnnnnnnnnnnnnnnnnnnnnnnnnnnnnnnnnnnnnnnnnnnnnnnnnnnnnnnnnnnnnnnnnnnnnnnnnnnnnnnnnnnnnnnnnnnnnnnnnnnnnnnnnnnnnnnnnnnnnnnnnnnnnnnnnnnnnnnnnnnnnnnnnnnnnnnnnnnnnnnnnnnnnnnnnnnnnnnnnnnnnnnnnnnnnnnnnnnnnnnnnnnnnnnnnnnnnnnnnnnnnnnnnnnnnnnnnnnnnnnnnnnnnnnnnnnnnnnnnnnnnnnnnnnnnnnnnnnnnnnnnnnnnnnnnnnnnnnnnnnnnnnnnnnnnnnnnnnnnnnnnnnnnnnnnnnnnnnnnnnnnnnnnnnnnnnnnnnnnnnnnnnnnnnnnnnnnnnnnnnnnnnnnnnnnnnnnnnnnnnnnnnnnnnnnnnnnnnnnnnnnnnnnnnnnnnnnnnnnnnnnnnnnnnnnnnnnnnnnnnnnnnnnnnnnnnnnnnnnnnnnnnnnnnnnnnnnnnnnnnnnnnnnnnnnnnnnnnnnnnnnnnnnnnnnnnnnnnnnnnnnnnnnnnnnnnnnnnnnnnnnnnnnnnnnnnnnnnnnnnnnnnnnnnnnnnnnnnnnnnnnnnnnnnnnnnnnnnnnnnnnnnnnnnnnnnnnnnnnnnnnnnnnnnnnnnnnnnnnnnnnnnnnnnnnnnnnnnnnnnnnnnnnnnnnnnnnnnnnnnnnnnnnnnnnnnnnnnnnnnnnnnnnnnnnnnnnnnnnnnnnnnnnnnnnnnnnnnnnnnnnnnnnnnnnnnnnnnnnnnnnnnnnnnnnnnnnnnnnnnnnnnnnnnnnnnnnnnnnnnnnnnnnnnnnnnnnnnnnnnnnnnnnnnnnnnnnnnnnnnnnnnnnnnnnnnnnnnnnnnnnnnnnnnnnnnnnnnnnnnnnnnnnnnnnnnnnnnnnnnnnnnnnnnnnnnnnnnnnnnnnnnnnnnnnnnnnnnnnnnnnnnnnnnnnnnnnnnnnnnnnnnnnnnnnnnnnnnnnnnnnnnnnnnnnnnnnnnnnnnnnnnnnnnnnnnnnnnnnnnnnnnnnnnnnnnnnnnnnnnnnnnnnnnnnnnnnnnnnnnnnnnnnnnnnnnnnnnnnnnnnnnnnnnnnnnnnnnnnnnnnnnnnnnnnnnnnnnnnnnnnnnnnnnnnnnnnnnnnnnnnnnnnnnnnnnnnnnnnnnnnnnnnnnnnnnnnnnnnnnnnnnnnnnnnnnnnnnnnnnnnnnnnnnnnnnnnnnnnnnnnnnnnnnnnnnnnnnnnnnnnnnnnnnnnnnnnnnnnnnnnnnnnnnnnnnnnnnnnnnnnnnnnnnnnnnnnnnnnnnnnnnnnnnnnnnnnnnnnnnnnnnnnnnnnnnnnnnnnnnnnnnnnnnnnnnnnnnnnnnnnnnnnnnnnnnnnnnnnnnnnnnnnnnnnnnnnnnnnnnnnnnnnnnnnnnnnnnnnnnnnnnnnnnnnnnnnnnnnnnnnnnnnnnnnnnnnnnnnnnnnnnnnnnnnnnnnnnnnnnnnnnnnnnnnnnnnnnnnnnnnnnnnnnnnnnnnnnnnnnnnnnnnnnnnnnnnnnnnnnnnnnnnnnnnnnnnnnnnnnnnnnnnnnnnnnnnnnnnnnnnnnnnnnnnnnnnnnnnnnnnnnnnnnnnnnnnnnnnnnnnnnnnnnnnnnnnnnnnnnnnnnnnnnnnnnnnnnnnnnnnnnnnnnnnnnnnnnnnnnnnnnnnnnnnnnnnnnnnnnnnnnnnnnnnnnnnnnnnnnnnnnnnnnnnnnnnnnnnnnnnnnnnnnnnnnnnnnnnnnnnnnnnnnnnnnnnnnnnnnnnnnnnnnnnnnnnnnnnnnnnnnnnnnnnnnnnnnnnnnnnnnnnnnnnnnnnnnnnnnnnnnnnnnnnnnnnnnnnnnnnnnnnnnnnnnnnnnnnnnnnnnnnnnnnnnnnnnnnnnnnnnnnnnnnnnnnnnnnnnnnnnnnnnnnnnnnnnnnnnnnnnnnnnnnnnnnnnnnnnnnnnnnnnnnnnnnnnnnnnnnnnnnnnnnnnnnnnnnnnnnnnnnnnnnnnnnnnnnnnnnnnnnnnnnnnnnnnnnnnnnnnnnnnnnnnnnnnnnnnnnnnnnnnnnnnnnnnnnnnnnnnnnnnnnnnnnnnnnnnnnnnnnnnnnnnnnnnnnnnnnnnnnnnnnnnnnnnnnnnnnnnnnnnnnnnnnnnnnnnnnnnnnnnnnnnnnnnnnnnnnnnnnnnnnnnnnnnnnnnnnnnnnnnnnnnnnnnnnnnnnnnnnnnnnnnnnnnnnnnnnnnnnnnnnnnnnnnnnnnnnnnnnnnnnnnnnnnnnnnnnnnnnnnnnnnnnnnnnnnnnnnnnnnnnnnnnnnnnnnnnnnnnnnnnnnnnnnnnnnnnnnnnnnnnnnnnnnnnnnnnnnnnnnnnnnnnnnnnnnnnnnnnnnnnnnnnnnnnnnnnnnnnnnnnnnnnnnnnnnnnnnnnnnnnnnnnnnnnnnnnnnnnnnnnnnnnnnnnnnnnnnnnnnnnnnnnnnnnnnnnnnnnnnnnnnnnnnnnnnnnnnnnnnnnnnnnnnnnnnnnnnnnnnnnnnnnnnnnnnnnnnnnnnnnnnnnnnnnnnnnnnnnnnnnnnnnnnnnnnnnnnnnnnnnnnnnnnnnnnnnnnnnnnnnnnnnnnnnnnnnnnnnnnnnnnnnnnnnnnnnnnnnnnnnnnnnnnnnnnnnnnnnnnnnnnnnnnnnnnnnnnnnnnnnnnnnnnnnnnnnnnnnnnnnnnnnnnnnnnnnnnnnnnnnnnnnnnnnnnnnnnnnnnnnnnnnnnnnnnnnnnnnnnnnnnnnnnnnnnnnnnnnnnnnnnnnnnnnnnnnnnnnnnnnnnnnnnnnnnnnnnnnnnnnnnnnnnnnnnnnnnnnnnnnnnnnnnnnnnnnnnnnnnnnnnnnnnnnnnnnnnnnnnnnnnnnnnnnnnnnnnnnnnnnnnnnnnnnnnnnnnnnnnnnnnnnnnnnnnnnnnnnnnnnnnnnnnnnnnnnnnnnnnnnnnnnnnnnnnnnnnnnnnnnnnnnnnnnnnnnnnnnnnnnnnnnnnnnnnnnnnnnnnnnnnnnnnnnnnnnnnnnnnnnnnnnnnnnnnnnnnnnnnnnnnnnnnnnnnnnnnnnnnnnnnnnnnnnnnnnnnnnnnnnnnnnnnnnnnnnnnnnnnnnnnnnnnnnnnnnnnnnnnnnnnnnnnnnnnnnnnnnnnnnnnnnnnnnnnnnnnnnnnnnnnnnnnnnnnnnnnnnnnnnnnnnnnnnnnnnnnnnnnnnnnnnnnnnnnnnnnnnnnnnnnnnnnnnnnnnnnnnnnnnnnnnnnnnnnnnnnnnnnnnnnnnnnnnnnnnnnnnnnnnnnnnnnnnnnnnnnnnnnnnnnnnnnnnnnnnnnnnnnnnnnnnnnnnnnnnnnnnnnnnnnnnnnnnnnnnnnnnnnnnnnnnnnnnnnnnnnnnnnnnnnnnnnnnnnnnnnnnnnnnnnnnnnnnnnnnnnnnnnnnnnnnnnnnnnnnnnnnnnnnnnnnnnnnnnnnnnnnnnnnnnnnnnnnnnnnnnnnnnnnnnnnnnnnnnnnnnnnnnnnnnnnnnnnnnnnnnnnnnnnnnnnnnnnnnnnnnnnnnnnnnnnnnnnnnnnnnnnnnnnnnnnnnnnnnnnnnnnnnnnnnnnnnnnnnnnnnnnnnnnnnnnnnnnnnnnnnnnnnnnnnnnnnnnnnnnnnnnnnnnnnnnnnnnnnnnnnnnnnnnnnnnnnnnnnnnnnnnnnnnnnnnnnnnnnnnnnnnnnnnnnnnnnnnnnnnnnnnnnnnnnnnnnnnnnnnnnnnnnnnnnnnnnnnnnnnnnnnnnnnnnnnnnnnnnnnnnnnnnnnnnnnnnnnnnnnnnnnnnnnnnnnnnnnnnnnnnnnnnnnnnnnnnnnnnnnnnnnnnnnnnnnnnnnnnnnnnnnnnnnnnnnnnnnnnnnnnnnnnnnnnnnnnnnnnnnnnnnnnnnnnnnnnnnnnnnnnnnnnnnnnnnnnnnnnnnnnnnnnnnnnnnnnnnnnnnnnnnnnnnnnnnnnnnnnnnnnnnnnnnnnnnnnnnnnnnnnnnnnnnnnnnnnnnnnnnnnnnnnnnnnnnnnnnnnnnnnnnnnnnnnnnnnnnnnnnnnnnnnnnnnnnnnnnnnnnnnnnnnnnnnnnnnnnnnnnnnnnnnnnnnnnnnnnnnnnnnnnnnnnnnnnnnnnnnnnnnnnnnnnnnnnnnnnnnnnnnnnnnnnnnnnnnnnnnnnnnnnnnnnnnnnnnnnnnnnnnnnnnnnnnnnnnnnnnnnnnnnnnnnnnnnnnnnnnnnnnnnnnnnnnnnnnnnnnnnnnnnnnnnnnnnnnnnnnnnnnnnnnnnnnnnnnnnnnnnnnnnnnnnnnnnnnnnnnnnnnnnnnnnnnnnnnnnnnnnnnnnnnnnnnnnnnnnnnnnnnnnnnnnnnnnnnnnnnnnnnnnnnnnnnnnnnnnnnnnnnnnnnnnnnnnnnnnnnnnnnnnnnnnnnnnnnnnnnnnnnnnnnnnnnnnnnnnnnnnnnnnnnnnnnnnnnnnnnnnnnnnnnnnnnnnnnnnnnnnnnnnnnnnnnnnnnnnnnnnnnnnnnnnnnnnnnnnnnnnnnnnnnnnnnnnnnnnnnnnnnnnnnnnnnnnnnnnnnnnnnnnnnnnnnnnnnnnnnnnnnnnnnnnnnnnnnnnnnnnnnnnnnnnnnnnnnnnnnnnnnnnnnnnnnnnnnnnnnnnnnnnnnnnnnnnnnnnnnnnnnnnnnnnnnnnnnnnnnnnnnnnnnnnnnnnnnnnnnnnnnnnnnnnnnnnnnnnnnnnnnnnnnnnnnnnnnnnnnnnnnnnnnnnnnnnnnnnnnnnnnnnnnnnnnnnnnnnnnnnnnnnnnnnnnnnnnnnnnnnnnnnnnnnnnnnnnnnnnnnnnnnnnnnnnnnnnnnnnnnnnnnnnnnnnnnnnnnnnnnnnnnnnnnnnnnnnnnnnnnnnnnnnnnnnnnnnnnnnnnnnnnnnnnnnnnnnnnnnnnnnnnnnnnnnnnnnnnnnnnnnnnnnnnnnnnnnnnnnnnnnnnnnnnnnnnnnnnnnnnnnnnnnnnnnnnnnnnnnnnnnnnnnnnnnnnnnnnnnnnnnnnnnnnnnnnnnnnnnnnnnnnnnnnnnnnnnnnnnnnnnnnnnnnnnnnnnnnnnnnnnnnnnnnnnnnnnnnnnnnnnnnnnnnnnnnnnnnnnnnnnnnnnnnnnnnnnnnnnnnnnnnnnnnnnnnnnnnnnnnnnnnnnnnnnnnnnnnnnnnnnnnnnnnnnnnnnnnnnnnnnnnnnnnnnnnnnnnnnnnnnnnnnnnnnnnnnnnnnnnnnnnnnnnnnnnnnnnnnnnnnnnnnnnnnnnnnnnnnnnnnnnnnnnnnnnnnnnnnnnnnnnnnnnnnnnnnnnnnnnnnnnnnnnnnnnnnnnnnnnnnnnnnnnnnnnnnnnnnnnnnnnnnnnnnnnnnnnnnnnnnnnnnnnnnnnnnnnnnnnnnnnnnnnnnnnnnnnnnnnnnnnnnnnnnnnnnnnnnnnnnnnnnnnnnnnnnnnnnnnnnnnnnnnnnnnnnnnnnnnnnnnnnnnnnnnnnnnnnnnnnnnnnnnnnnnnnnnnnnnnnnnnnnnnnnnnnnnnnnnnnnnnnnnnnnnnnnnnnnnnnnnnnnnnnnnnnnnnnnnnnnnnnnnnnnnnnnnnnnnnnnnnnnnnnnnnnnnnnnnnnnnnnnnnnnnnnnnnnnnnnnnnnnnnnnnnnnnnnnnnnnnnnnnnnnnnnnnnnnnnnnnnnnnnnnnnnnnnnnnnnnnnnnnnnnnnnnnnnnnnnnnnnnnnnnnnnnnnnnnnnnnnnnnnnnnnnnnnnnnnnnnnnnnnnnnnnnnnnnnnnnnnnnnnnnnnnnnnnnnnnnnnnnnnnnnnnnnnnnnnnnnnnnnnnnnnnnnnnnnnnnnnnnnnnnnnnnnnnnnnnnnnnnnnnnnnnnnnnnnnnnnnnnnnnnnnnnnnnnnnnnnnnnnnnnnnnnnnnnnnnnnnnnnnnnnnnnnnnnnnnnnnnnnnnnnnnnnnnnnnnnnnnnnnnnnnnnnnnnnnnnnnnnnnnnnnnnnnnnnnnnnnnnnnnnnnnnnnnnnnnnnnnnnnnnnnnnnnnnnnnnnnnnnnnnnnnnnnnnnnnnnnnnnnnnnnnnnnnnnnnnnnnnnnnnnnnnnnnnnnnnnnnnnnnnnnnnnnnnnnnnnnnnnnnnnnnnnnnnnnnnnnnnnnnnnnnnnnnnnnnnnnnnnnnnnnnnnnnnnnnnnnnnnnnnnnnnnnnnnnnnnnnnnnnnnnnnnnnnnnnnnnnnnnnnnnnnnnnnnnnnnnnnnnnnnnnnnnnnnnnnnnnnnnnnnnnnnnnnnnnnnnnnnnnnnnnnnnnnnnnnnnnnnnnnnnnnnnnnnnnnnnnnnnnnnnnnnnnnnnnnnnnnnnnnnnnnnnnnnnnnnnnnnnnnnnnnnnnnnnnnnnnnnnnnnnnnnnnnnnnnnnnnnnnnnnnnnnnnnnnnnnnnnnnnnnnnnnnnnnnnnnnnnnnnnnnnnnnnnnnnnnnnnnnnnnnnnnnnnnnnnnnnnnnnnnnnnnnnnnnnnnnnnnnnnnnnnnnnnnnnnnnnnnnnnnnnnnnnnnnnnnnnnnnnnnnnnnnnnnnnnnnnnnnnnnnnnnnnnnnnnnnnnnnnnnnnnnnnnnnnnnnnnnnnnnnnnnnnnnnnnnnnnnnnnnnnnnnnnnnnnnnnnnnnnnnnnnnnnnnnnnnnnnnnnnnnnnnnnnnnnnnnnnnnnnnnnnnnnnnnnnnnnnnnnnnnnnnnnnnnnnnnnnnnnnnnnnnnnnnnnnnnnnnnnnnnnnnnnnnnnnnnnnnnnnnnnnnnnnnnnnnnnnnnnnnnnnnnnnnnnnnnnnnnnnnnnnnnnnnnnnnnnnnnnnnnnnnnnnnnnnnnnnnnnnnnnnnnnnnnnnnnnnnnnnnnnnnnnnnnnnnnnnnnnnnnnnnnnnnnnnnnnnnnnnnnnnnnnnnnnnnnnnnnnnnnnnnnnnnnnnnnnnnnnnnnnnnnnnnnnnnnnnnnnnnnnnnnnnnnnnnnnnnnnnnnnnnnnnnnnnnnnnnnnnnnnnnnnnnnnnnnnnnnnnnnnnnnnnnnnnnnnnnnnnnnnnnnnnnnnnnnnnnnnnnnnnnnnnnnnnnnnnnnnnnnnnnnnnnnnnnnnnnnnnnnnnnnnnnnnnnnnnnnnnnnnnnnnnnnnnnnnnnnnnnnnnnnnnnnnnnnnnnnnnnnnnnnnnnnnnnnnnnnnnnnnnnnnnnnnnnnnnnnnnnnnnnnnnnnnnnnnnnnnnnnnnnnnnnnnnnnnnnnnnnnnnnnnnnnnnnnnnnnnnnnnnnnnnnnnnnnnnnnnnnnnnnnnnnnnnnnnnnnnnnnnnnnnnnnnnnnnnnnnnnnnnnnnnnnnnnnnnnnnnnnnnnnnnnnnnnnnnnnnnnnnnnnnnnnnnnnnnnnnnnnnnnnnnnnnnnnnnnnnnnnnnnnnnnnnnnnnnnnnnnnnnnnnnnnnnnnnnnnnnnnnnnnnnnnnnnnnnnnnnnnnnnnnnnnnnnnnnnnnnnnnnnnnnnnnnnnnnnnnnnnnnnnnnnnnnnnnnnnnnnnnnnnnnnnnnnnnnnnnnnnnnnnnnnnnnnnnnnnnnnnnnnnnnnnnnnnnnnnnnnnnnnnnnnnnnnnnnnnnnnnnnnnnnnnnnnnnnnnnnnnnnnnnnnnnnnnnnnnnnnnnnnnnnnnnnnnnnnnnnnnnnnnnnnnnnnnnnnnnnnnnnnnnnnnnnnnnnnnnnnnnnnnnnnnnnnnnnnnnnnnnnnnnnnnnnnnnnnnnnnnnnnnnnnnnnnnnnnnnnnnnnnnnnnnnnnnnnnnnnnnnnnnnnnnnnnnnnnnnnnnnnnnnnnnnnnnnnnnnnnnnnnnnnnnnnnnnnnnnnnnnnnnnnnnnnnnnnnnnnnnnnnnnnnnnnnnnnnnnnnnnnnnnnnnnnnnnnnnnnnnnnnnnnnnnnnnnnnnnnnnnnnnnnnnnnnnnnnnnnnnnnnnnnnnnnnnnnnnnnnnnnnnnnnnnnnnnnnnnnnnnnnnnnnnnnnnnnnnnnnnnnnnnnnnnnnnnnnnnnnnnnnnnnnnnnnnnnnnnnnnnnnnnnnnnnnnnnnnnnnnnnnnnnnnnnnnnnnnnnnnnnnnnnnnnnnnnnnnnnnnnnnnnnnnnnnnnnnnnnnnnnnnnnnnnnnnnnnnnnnnnnnnnnnnnnnnnnnnnnnnnnnnnnnnnnnnnnnnnnnnnnnnnnnnnnnnnnnnnnnnnnnnnnnnnnnnnnnnnnnnnnnnnnnnnnnnnnnnnnnnnnnnnnnnnnnnnnnnnnnnnnnnnnnnnnnnnnnnnnnnnnnnnnnnnnnnnnnnnnnnnnnnnnnnnnnnnnnnnnnnnnnnnnnnnnnnnnnnnnnnnnnnnnnnnnnnnnnnnnnnnnnnnnnnnnnnnnnnnnnnnnnnnnnnnnnnnnnnnnnnnnnnnnnnnnnnnnnnnnnnnnnnnnnnnnnnnnnnnnnnnnnnnnnnnnnnnnnnnnnnnnnnnnnnnnnnnnnnnnnnnnnnnnnnnnnnnnnnnnnnnnnnnnnnnnnnnnnnnnnnnnnnnnnnnnnnnnnnnnnnnnnnnnnnnnnnnnnnnnnnnnnnnnnnnnnnnnnnnnnnnnnnnnnnnnnnnnnnnnnnnnnnnnnnnnnnnnnnnnnnnnnnnnnnnnnnnnnnnnnnnnnnnnnnnnnnnnnnnnnnnnnnnnnnnnnnnnnnnnnnnnnnnnnnnnnnnnnnnnnnnnnnnnnnnnnnnnnnnnnnnnnnnnnnnnnnnnnnnnnnnnnnnnnnnnnnnnnnnnnnnnnnnnnnnnnnnnnnnnnnnnnnnnnnnnnnnnnnnnnnnnnnnnnnnnnnnnnnnnnnnnnnnnnnnnnnnnnnnnnnnnnnnnnnnnnnnnnnnnnnnnnnnnnnnnnnnnnnnnnnnnnnnnnnnnnnnnnnnnnnnnnnnnnnnnnnnnnnnnnnnnnnnnnnnnnnnnnnnnnnnnnnnnnnnnnnnnnnnnnnnnnnnnnnnnnnnnnnnnnnnnnnnnnnnnnnnnnnnnnnnnnnnnnnnnnnnnnnnnnnnnnnnnnnnnnnnnnnnnnnnnnnnnnnnnnnnnnnnnnnnnnnnnnnnnnnnnnnnnnnnnnnnnnnnnnnnnnnnnnnnnnnnnnnnnnnnnnnnnnnnnnnnnnnnnnnnnnnnnnnnnnnnnnnnnnnnnnnnnnnnnnnnnnnnnnnnnnnnnnnnnnnnnnnnnnnnnnnnnnnnnnnnnnnnnnnnnnnnnnnnnnnnnnnnnnnnnnnnnnnnnnnnnnnnnnnnnnnnnnnnnnnnnnnnnnnnnnnnnnnnnnnnnnnnnnnnnnnnnnnnnnnnnnnnnnnnnnnnnnnnnnnnnnnnnnnnnnnnnnnnnnnnnnnnnnnnnnnnnnnnnnnnnnnnnnnnnnnnnnnnnnnnnnnnnnnnnnnnnnnnnnnnnnnnnnnnnnnnnnnnnnnnnnnnnnnnnnnnnnnnnnnnnnnnnnnnnnnnnnnnnnnnnnnnnnnnnnnnnnnnnnnnnnnnnnnnnnnnnnnnnnnnnnnnnnnnnnnnnnnnnnnnnnnnnnnnnnnnnnnnnnnnnnnnnnnnnnnnnnnnnnnnnnnnnnnnnnnnnnnnnnnnnnnnnnnnnnnnnnnnnnnnnnnnnnnnnnnnnnnnnnnnnnnnnnnnnnnnnnnnnnnnnnnnnnnnnnnnnnnnnnnnnnnnnnnnnnnnnnnnnnnnnnnnnnnnnnnnnnnnnnnnnnnnnnnnnnnnnnnnnnnnnnnnnnnnnnnnnnnnnnnnnnnnnnnnnnnnnnnnnnnnnnnnnnnnnnnnnnnnnnnnnnnnnnnnnnnnnnnnnnnnnnnnnnnnnnnnnnnnnnnnnnnnnnnnnnnnnnnnnnnnnnnnnnnnnnnnnnnnnnnnnnnnnnnnnnnnnnnnnnnnnnnnnnnnnnnnnnnnnnnnnnnnnnnnnnnnnnnnnnnnnnnnnnnnnnnnnnnnnnnnnnnnnnnnnnnnnnnnnnnnnnnnnnnnnnnnnnnnnnnnnnnnnnnnnnnnnnnnnnnnnnnnnnnnnnnnnnnnnnnnnnnnnnnnnnnnnnnnnnnnnnnnnnnnnnnnnnnnnnnnnnnnnnnnnnnnnnnnnnnnnnnnnnnnnnnnnnnnnnnnnnnnnnnnnnnnnnnnnnnnnnnnnnnnnnnnnnnnnnnnnnnnnnnnnnnnnnnnnnnnnnnnnnnnnnnnnnnnnnnnnnnnnnnnnnnnnnnnnnnnnnnnnnnnnnnnnnnnnnnnnnnnnnnnnnnnnnnnnnnnnnnnnnnnnnnnnnnnnnnnnnnnnnnnnnnnnnnnnnnnnnnnnnnnnnnnnnnnnnnnnnnnnnnnnnnnnnnnnnnnnnnnnnnnnnnnnnnnnnnnnnnnnnnnnnnnnnnnnnnnnnnnnnnnnnnnnnnnnnnnnnnnnnnnnnnnnnnnnnnnnnnnnnnnnnnnnnnnnnnnnnnnnnnnnnnnnnnnnnnnnnnnnnnnnnnnnnnnnnnnnnnnnnnnnnnnnnnnnnnnnnnnnnnnnnnnnnnnnnnnnnnnnnnnnnnnnnnnnnnnnnnnnnnnnnnnnnnnnnnnnnnnnnnnnnnnnnnnnnnnnnnnnnnnnnnnnnnnnnnnnnnnnnnnnnnnnnnnnnnnnnnnnnnnnnnnnnnnnnnnnnnnnnnnnnnnnnnnnnnnnnnnnnnnnnnnnnnnnnnnnnnnnnnnnnnnnnnnnnnnnnnnnnnnnnnnnnnnnnnnnnnnnnnnnnnnnnnnnnnnnnnnnnnnnnnnnnnnnnnnnnnnnnnnnnnnnnnnnnnnnnnnnnnnnnnnnnnnnnnnnnnnnnnnnnnnnnnnnnnnnnnnnnnnnnnnnnnnnnnnnnnnnnnnnnnnnnnnnnnnnnnnnnnnnnnnnnnnnnnnnnnnnnnnnnnnnnnnnnnnnnnnnnnnnnnnnnnnnnnnnnnnnnnnnnnnnnnnnnnnnnnnnnnnnnnnnnnnnnnnnnnnnnnnnnnnnnnnnnnnnnnnnnnnnnnnnnnnnnnnnnnnnnnnnnnnnnnnnnnnnnnnnnnnnnnnnnnnnnnnnnnnnnnnnnnnnnnnnnnnnnnnnnnnnnnnnnnnnnnnnnnnnnnnnnnnnnnnnnnnnnnnnnnnnnnnnnnnnnnnnnnnnnnnnnnnnnnnnnnnnnnnnnnnnnnnnnnnnnnnnnnnnnnnnnnnnnnnnnnnnnnnnnnnnnnnnnnnnnnnnnnnnnnnnnnnnnnnnnnnnnnnnnnnnnnnnnnnnnnnnnnnnnnnnnnnnnnnnnnnnnnnnnnnnnnnnnnnnnnnnnnnnnnnnnnnnnnnnnnnnnnnnnnnnnnnnnnnnnnnnnnnnnnnnnnnnnnnnnnnnnnnnnnnnnnnnnnnnnnnnnnnnnnnnnnnnnnnnnnnnnnnnnnnnnnnnnnnnnnnnnnnnnnnnnnnnnnnnnnnnnnnnnnnnnnnnnnnnnnnnnnnnnnnnnnnnnnnnnnnnnnnnnnnnnnnnnnnnnnnnnnnnnnnnnnnnnnnnnnnnnnnnnnnnnnnnnnnnnnnnnnnnnnnnnnnnnnnnnnnnnnnnnnnnnnnnnnnnnnnnnnnnnnnnnnnnnnnnnnnnnnnnnnnnnnnnnnnnnnnnnnnnnnnnnnnnnnnnnnnnnnnnnnnnnnnnnnnnnnnnnnnnnnnnnnnnnnnnnnnnnnnnnnnnnnnnnnnnnnnnnnnnnnnnnnnnnnnnnnnnnnnnnnnnnnnnnnnnnnnnnnnnnnnnnnnnnnnnnnnnnnnnnnnnnnnnnnnnnnnnnnnnnnnnnnnnnnnnnnnnnnnnnnnnnnnnnnnnnnnnnnnnnnnnnnnnnnnnnnnnnnnnnnnnnnnnnnnnnnnnnnnnnnnnnnnnnnnnnnnnnnnnnnnnnnnnnnnnnnnnnnnnnnnnnnnnnnnnnnnnnnnnnnnnnnnnnnnnnnnnnnnnnnnnnnnnnnnnnnnnnnnnnnnnnnnnnnnnnnnnnnnnnnnnnnnnnnnnnnnnnnnnnnnnnnnnnnnnnnnnnnnnnnnnnnnnnnnnnnnnnnnnnnnnnnnnnnnnnnnnnnnnnnnnnnnnnnnnnnnnnnnnnnnnnnnnnnnnnnnnnnnnnnnnnnnnnnnnnnnnnnnnnnnnnnnnnnnnnnnnnnnnnnnnnnnnnnnnnnnnnnnnnnnnnnnnnnnnnnnnnnnnnnnnnnnnnnnnnnnnnnnnnnnnnnnnnnnnnnnnnnnnnnnnnnnnnnnnnnnnnnnnnnnnnnnnnnnnnnnnnnnnnnnnnnnnnnnnnnnnnnnnnnnnnnnnnnnnnnnnnnnnnnnnnnnnnnnnnnnnnnnnnnnnnnnnnnnnnnnnnnnnnnnnnnnnnnnnnnnnnnnnnnnnnnnnnnnnnnnnnnnnnnnnnnnnnnnnnnnnnnnnnnnnnnnnnnnnnnnnnnnnnnnnnnnnnnnnnnnnnnnnnnnnnnnnnnnnnnnnnnnnnnnnnnnnnnnnnnnnnnnnnnnnnnnnnnnnnnnnnnnnnnnnnnnnnnnnnnnnnnnnnnnnnnnnnnnnnnnnnnnnnnnnnnnnnnnnnnnnnnnnnnnnnnnnnnnnnnnnnnnnnnnnnnnnnnnnnnnnnnnnnnnnnnnnnnnnnnnnnnnnnnnnnnnnnnnnnnnnnnnnnnnnnnnnnnnnnnnnnnnnnnnnnnnnnnnnnnnnnnnnnnnnnnnnnnnnnnnnnnnnnnnnnnnnnnnnnnnnnnnnnnnnnnnnnnnnnnnnnnnnnnnnnnnnnnnnnnnnnnnnnnnnnnnnnnnnnnnnnnnnnnnnnnnnnnnnnnnnnnnnnnnnnnnnnnnnnnnnnnnnnnnnnnnnnnnnnnnnnnnnnnnnnnnnnnnnnnnnnnnnnnnnnnnnnnnnnnnnnnnnnnnnnnnnnnnnnnnnnnnnnnnnnnnnnnnnnnnnnnnnnnnnnnnnnnnnnnnnnnnnnnnnnnnnnnnnnnnnnnnnnnnnnnnnnnnnnnnnnnnnnnnnnnnnnnnnnnnnnnnnnnnnnnnnnnnnnnnnnnnnnnnnnnnnnnnnnnnnnnnnnnnnnnnnnnnnnnnnnnnnnnnnnnnnnnnnnnnnnnnnnnnnnnnnnnnnnnnnnnnnnnnnnnnnnnnnnnnnnnnnnnnnnnnnnnnnnnnnnnnnnnnnnnnnnnnnnnnnnnnnnnnnnnnnnnnnnnnnnnnnnnnnnnnnnnnnnnnnnnnnnnnnnnnnnnnnnnnnnnnnnnnnnnnnnnnnnnnnnnnnnnnnnnnnnnnnnnnnnnnnnnnnnnnnnnnnnnnnnnnnnnnnnnnnnnnnnnnnnnnnnnnnnnnnnnnnnnnnnnnnnnnnnnnnnnnnnnnnnnnnnnnnnnnnnnnnnnnnnnnnnnnnnnnnnnnnnnnnnnnnnnnnnnnnnnnnnnnnnnnnnnnnnnnnnnnnnnnnnnnnnnnnnnnnnnnnnnnnnnnnnnnnnnnnnnnnnnnnnnnnnnnnnnnnnnnnnnnnnnnnnnnnnnnnnnnnnnnnnnnnnnnnnnnnnnnnnnnnnnnnnnnnnnnnnnnnnnnnnnnnnnnnnnnnnnnnnnnnnnnnnnnnnnnnnnnnnnnnnnnnnnnnnnnnnnnnnnnnnnnnnnnnnnnnnnnnnnnnnnnnnnnnnnnnnnnnnnnnnnnnnnnnnnnnnnnnnnnnnnnnnnnnnnnnnnnnnnnnnnnnnnnnnnnnnnnnnnnnnnnnnnnnnnnnnnnnnnnnnnnnnnnnnnnnnnnnnnnnnnnnnnnnnnnnnnnnnnnnnnnnnnnnnnnnnnnnnnnnnnnnnnnnnnnnnnnnnnnnnnnnnnnnnnnnnnnnnnnnnnnnnnnnnnnnnnnnnnnnnnnnnnnnnnnnnnnnnnnnnnnnnnnnnnnnnnnnnnnnnnnnnnnnnnnnnnnnnnnnnnnnnnnnnnnnnnnnnnnnnnnnnnnnnnnnnnnnnnnnnnnnnnnnnnnnnnnnnnnnnnnnnnnnnnnnnnnnnnnnnnnnnnnnnnnnnnnnnnnnnnnnnnnnnnnnnnnnnnnnnnnnnnnnnnnnnnnnnnnnnnnnnnnnnnnnnnnnnnnnnnnnnnnnnnnnnnnnnnnnnnnnnnnnnnnnnnnnnnnnnnnnnnnnnnnnnnnnnnnnnnnnnnnnnnnnnnnnnnnnnnnnnnnnnnnnnnnnnnnnnnnnnnnnnnnnnnnnnnnnnnnnnnnnnnnnnnnnnnnnnnnnnnnnnnnnnnnnnnnnnnnnnnnnnnnnnnnnnnnnnnnnnnnnnnnnnnnnnnnnnnnnnnnnnnnnnnnnnnnnnnnnnnnnnnnnnnnnnnnnnnnnnnnnnnnnnnnnnnnnnnnnnnnnnnnnnnnnnnnnnnnnnnnnnnnnnnnnnnnnnnnnnnnnnnnnnnnnnnnnnnnnnnnnnnnnnnnnnnnnnnnnnnnnnnnnnnnnnnnnnnnnnnnnnnnnnnnnnnnnnnnnnnnnnnnnnnnnnnnnnnnnnnnnnnnnnnnnnnnnnnnnnnnnnnnnnnnnnnnnnnnnnnnnnnnnnnnnnnnnnnnnnnnnnnnnnnnnnnnnnnnnnnnnnnnnnnnnnnnnnnnnnnnnnnnnnnnnnnnnnnnnnnnnnnnnnnnnnnnnnnnnnnnnnnnnnnnnnnnnnnnnnnnnnnnnnnnnnnnnnnnnnnnnnnnnnnnnnnnnnnnnnnnnnnnnnnnnnnnnnnnnnnnnnnnnnnnnnnnnnnnnnnnnnnnnnnnnnnnnnnnnnnnnnnnnnnnnnnnnnnnnnnnnnnnnnnnnnnnnnnnnnnnnnnnnnnnnnnnnnnnnnnnnnnnnnnnnnnnnnnnnnnnnnnnnnnnnnnnnnnnnnnnnnnnnnnnnnnnnnnnnnnnnnnnnnnnnnnnnnnnnnnnnnnnnnnnnnnnnnnnnnnnnnnnnnnnnnnnnnnnnnnnnnnnnnnnnnnnnnnnnnnnnnnnnnnnnnnnnnnnnnnnnnnnnnnnnnnnnnnnnnnnnnnnnnnnnnnnnnnnnnnnnnnnnnnnnnnnnnnnnnnnnnnnnnnnnnnnnnnnnnnnnnnnnnnnnnnnnnnnnnnnnnnnnnnnnnnnnnnnnnnnnnnnnnnnnnnnnnnnnnnnnnnnnnnnnnnnnnnnnnnnnnnnnnnnnnnnnnnnnnnnnnnnnnnnnnnnnnnnnnnnnnnnnnnnnnnnnnnnnnnnnnnnnnnnnnnnnnnnnnnnnnnnnnnnnnnnnnnnnnnnnnnnnnnnnnnnnnnnnnnnnnnnnnnnnnnnnnnnnnnnnnnnnnnnnnnnnnnnnnnnnnnnnnnnnnnnnnnnnnnnnnnnnnnnnnnnnnnnnnnnnnnnnnnnnnnnnnnnnnnnnnnnnnnnnnnnnnnnnnnnnnnnnnnnnnnnnnnnnnnnnnnnnnnnnnnnnnnnnnnnnnnnnnnnnnnnnnnnnnnnnnnnnnnnnnnnnnnnnnnnnnnnnnnnnnnnnnnnnnnnnnnnnnnnnnnnnnnnnnnnnnnnnnnnnnnnnnnnnnnnnnnnnnnnnnnnnnnnnnnnnnnnnnnnnnnnnnnnnnnnnnnnnnnnnnnnnnnnnnnnnnnnnnnnnnnnnnnnnnnnnnnnnnnnnnnnnnnnnnnnnnnnnnnnnnnnnnnnnnnnnnnnnnnnnnnnnnnnnnnnnnnnnnnnnnnnnnnnnnnnnnnnnnnnnnnnnnnnnnnnnnnnnnnnnnnnnnnnnnnnnnnnnnnnnnnnnnnnnnnnnnnnnnnnnnnnnnnnnnnnnnnnnnnnnnnnnnnnnnnnnnnnnnnnnnnnnnnnnnnnnnnnnnnnnnnnnnnnnnnnnnnnnnnnnnnnnnnnnnnnnnnnnnnnnnnnnnnnnnnnnnnnnnnnnnnnnnnnnnnnnnnnnnnnnnnnnnnnnnnnnnnnnnnnnnnnnnnnnnnnnnnnnnnnnnnnnnnnnnnnnnnnnnnnnnnnnnnnnnnnnnnnnnnnnnnnnnnnnnnnnnnnnnnnnnnnnnnnnnnnnnnnnnnnnnnnnnnnnnnnnnnnnnnnnnnnnnnnnnnnnnnnnnnnnnnnnnnnnnnnnnnnnnnnnnnnnnnnnnnnnnnnnnnnnnnnnnnnnnnnnnnnnnnnnnnnnnnnnnnnnnnnnnnnnnnnnnnnnnnnnnnnnnnnnnnnnnnnnnnnnnnnnnnnnnnnnnnnnnnnnnnnnnnnnnnnnnnnnnnnnnnnnnnnnnnnnnnnnnnnnnnnnnnnnnnnnnnnnnnnnnnnnnnnnnnnnnnnnnnnnnnnnnnnnnnnnnnnnnnnnnnnnnnnnnnnnnnnnnnnnnnnnnnnnnnnnnnnnnnnnnnnnnnnnnnnnnnnnnnnnnnnnnnnnnnnnnnnnnnnnnnnnnnnnnnnnnnnnnnnnnnnnnnnnnnnnnnnnnnnnnnnnnnnnnnnnnnnnnnnnnnnnnnnnnnnnnnnnnnnnnnnnnnnnnnnnnnnnnnnnnnnnnnnnnnnnnnnnnnnnnnnnnnnnnnnnnnnnnnnnnnnnnnnnnnnnnnnnnnnnnnnnnnnnnnnnnnnnnnnnnnnnnnnnnnnnnnnnnnnnnnnnnnnnnnnnnnnnnnnnnnnnnnnnnnnnnnnnnnnnnnnnnnnnnnnnnnnnnnnnnnnnnnnnnnnnnnnnnnnnnnnnnnnnnnnnnnnnnnnnnnnnnnnnnnnnnnnnnnnnnnnnnnnnnnnnnnnnnnnnnnnnnnnnnnnnnnnnnnnnnnnnnnnnnnnnnnnnnnnnnnnnnnnnnnnnnnnnnnnnnnnnnnnnnnnnnnnnnnnnnnnnnnnnnnnnnnnnnnnnnnnnnnnnnnnnnnnnnnnnnnnnnnnnnnnnnnnnnnnnnnnnnnnnnnnnnnnnnnnnnnnnnnnnnnnnnnnnnnnnnnnnnnnnnnnnnnnnnnnnnnnnnnnnnnnnnnnnnnnnnnnnnnnnnnnnnnnnnnnnnnnnnnnnnnnnnnnnnnnnnnnnnnnnnnnnnnnnnnnnnnnnnnnnnnnnnnnnnnnnnnnnnnnnnnnnnnnnnnnnnnnnnnnnnnnnnnnnnnnnnnnnnnnnnnnnnnnnnnnnnnnnnnnnnnnnnnnnnnnnnnnnnnnnnnnnnnnnnnnnnnnnnnnnnnnnnnnnnnnnnnnnnnnnnnnnnnnnnnnnnnnnnnnnnnnnnnnnnnnnnnnnnnnnnnnnnnnnnnnnnnnnnnnnnnnnnnnnnnnnnnnnnnnnnnnnnnnnnnnnnnnnnnnnnnnnnnnnnnnnnnnnnnnnnnnnnnnnnnnnnnnnnnnnnnnnnnnnnnnnnnnnnnnnnnnnnnnnnnnnnnnnnnnnnnnnnnnnnnnnnnnnnnnnnnnnnnnnnnnnnnnnnnnnnnnnnnnnnnnnnnnnnnnnnnnnnnnnnnnnnnnnnnnnnnnnnnnnnnnnnnnnnnnnnnnnnnnnnnnnnnnnnnnnnnnnnnnnnnnnnnnnnnnnnnnnnnnnnnnnnnnnnnnnnnnnnnnnnnnnnnnnnnnnnnnnnnnnnnnnnnnnnnnnnnnnnnnnnnnnnnnnnnnnnnnnnnnnnnnnnnnnnnnnnnnnnnnnnnnnnnnnnnnnnnnnnnnnnnnnnnnnnnnnnnnnnnnnnnnnnnnnnnnnnnnnnnnnnnnnnnnnnnnnnnnnnnnnnnnnnnnnnnnnnnnnnnnnnnnnnnnnnnnnnnnnnnnnnnnnnnnnnnnnnnnnnnnnnnnnnnnnnnnnnnnnnnnnnnnnnnnnnnnnnnnnnnnnnnnnnnnnnnnnnnnnnnnnnnnnnnnnnnnnnnnnnnnnnnnnnnnnnnnnnnnnnnnnnnnnnnnnnnnnnnnnnnnnnnnnnnnnnnnnnnnnnnnnnnnnnnnnnnnnnnnnnnnnnnnnnnnnnnnnnnnnnnnnnnnnnnnnnnnnnnnnnnnnnnnnnnnnnnnnnnnnnnnnnnnnnnnnnnnnnnnnnnnnnnnnnnnnnnnnnnnnnnnnnnnnnnnnnnnnnnnnnnnnnnnnnnnnnnnnnnnnnnnnnnnnnnnnnnnnnnnnnnnnnnnnnnnnnnnnnnnnnnnnnnnnnnnnnnnnnnnnnnnnnnnnnnnnnnnnnnnnnnnnnnnnnnnnnnnnnnnnnnnnnnnnnnnnnnnnnnnnnnnnnnnnnnnnnnnnnnnnnnnnnnnnnnnnnnnnnnnnnnnnnnnnnnnnnnnnnnnnnnnnnnnnnnnnnnnnnnnnnnnnnnnnnnnnnnnnnnnnnnnnnnnnnnnnnnnnnnnnnnnnnnnnnnnnnnnnnnnnnnnnnnnnnnnnnnnnnnnnnnnnnnnnnnnnnnnnnnnnnnnnnnnnnnnnnnnnnnnnnnnnnnnnnnnnnnnnnnnnnnnnnnnnnnnnnnnnnnnnnnnnnnnnnnnnnnnnnnnnnnnnnnnnnnnnnnnnnnnnnnnnnnnnnnnnnnnnnnnnnnnnnnnnnnnnnnnnnnnnnnnnnnnnnnnnnnnnnnnnnnnnnnnnnnnnnnnnnnnnnnnnnnnnnnnnnnnnnnnnnnnnnnnnnnnnnnnnnnnnnnnnnnnnnnnnnnnnnnnnnnnnnnnnnnnnnnnnnnnnnnnnnnnnnnnnnnnnnnnnnnnnnnnnnnnnnnnnnnnnnnnnnnnnnnnnnnnnnnnnnnnnnnnnnnnnnnnnnnnnnnnnnnnnnnnnnnnnnnnnnnnnnnnnnnnnnnnnnnnnnnnnnnnnnnnnnnnnnnnnnnnnnnnnnnnnnnnnnnnnnnnnnnnnnnnnnnnnnnnnnnnnnnnnnnnnnnnnnnnnnnnnnnnnnnnnnnnnnnnnnnnnnnnnnnnnnnnnnnnnnnnnnnnnnnnnnnnnnnnnnnnnnnnnnnnnnnnnnnnnnnnnnnnnnnnnnnnnnnnnnnnnnnnnnnnnnnnnnnnnnnnnnnnnnnnnnnnnnnnnnnnnnnnnnnnnnnnnnnnnnnnnnnnnnnnnnnnnnnnnnnnnnnnnnnnnnnnnnnnnnnnnnnnnnnnnnnnnnnnnnnnnnnnnnnnnnnnnnnnnnnnnnnnnnnnnnnnnnnnnnnnnnnnnnnnnnnnnnnnnnnnnnnnnnnnnnnnnnnnnnnnnnnnnnnnnnnnnnnnnnnnnnnnnnnnnnnnnnnnnnnnnnnnnnnnnnnnnnnnnnnnnnnnnnnnnnnnnnnnnnnnnnnnnnnnnnnnnnnnnnnnnnnnnnnnnnnnnnnnnnnnnnnnnnnnnnnnnnnnnnnnnnnnnnnnnnnnnnnnnnnnnnnnnnnnnnnnnnnnnnnnnnnnnnnnnnnnnnnnnnnnnnnnnnnnnnnnnnnnnnnnnnnnnnnnnnnnnnnnnnnnnnnnnnnnnnnnnnnnnnnnnnnnnnnnnnnnnnnnnnnnnnnnnnnnnnnnnnnnnnnnnnnnnnnnnnnnnnnnnnnnnnnnnnnnnnnnnnnnnnnnnnnnnnnnnnnnnnnnnnnnnnnnnnnnnnnnnnnnnnnnnnnnnnnnnnnnnnnnnnnnnnnnnnnnnnnnnnnnnnnnnnnnnnnnnnnnnnnnnnnnnnnnnnnnnnnnnnnnnnnnnnnnnnnnnnnnnnnnnnnnnnnnnnnnnnnnnnnnnnnnnnnnnnnnnnnnnnnnnnnnnnnnnnnnnnnnnnnnnnnnnnnnnnnnnnnnnnnnnnnnnnnnnnnnnnnnnnnnnnnnnnnnnnnnnnnnnnnnnnnnnnnnnnnnnnnnnnnnnnnnnnnnnnnnnnnnnnnnnnnnnnnnnnnnnnnnnnnnnnnnnnnnnnnnnnnnnnnnnnnnnnnnnnnnnnnnnnnnnnnnnnnnnnnnnnnnnnnnnnnnnnnnnnnnnnnnnnnnnnnnnnnnnnnnnnnnnnnnnnnnnnnnnnnnnnnnnnnnnnnnnnnnnnnnnnnnnnnnnnnnnnnnnnnnnnnnnnnnnnnnnnnnnnnnnnnnnnnnnnnnnnnnnnnnnnnnnnnnnnnnnnnnnnnnnnnnnnnnnnnnnnnnnnnnnnnnnnnnnnnnnnnnnnnnnnnnnnnnnnnnnnnnnnnnnnnnnnnnnnnnnnnnnnnnnnnnnnnnnnnnnnnnnnnnnnnnnnnnnnnnnnnnnnnnnnnnnnnnnnnnnnnnnnnnnnnnnnnnnnnnnnnnnnnnnnnnnnnnnnnnnnnnnnnnnnnnnnnnnnnnnnnnnnnnnnnnnnnnnnnnnnnnnnnnnnnnnnnnnnnnnnnnnnnnnnnnnnnnnnnnnnnnnnnnnnnnnnnnnnnnnnnnnnnnnnnnnnnnnnnnnnnnnnnnnnnnnnnnnnnnnnnnnnnnnnnnnnnnnnnnnnnnnnnnnnnnnnnnnnnnnnnnnnnnnnnnnnnnnnnnnnnnnnnnnnnnnnnnnnnnnnnnnnnnnnnnnnnnnnnnnnnnnnnnnnnnnnnnnnnnnnnnnnnnnnnnnnnnnnnnnnnnnnnnnnnnnnnnnnnnnnnnnnnnnnnnnnnnnnnnnnnnnnnnnnnnnnnnnnnnnnnnnnnnnnnnnnnnnnnnnnnnnnnnnnnnnnnnnnnnnnnnnnnnnnnnnnnnnnnnnnnnnnnnnnnnnnnnnnnnnnnnnnnnnnnnnnnnnnnnnnnnnnnnnnnnnnnnnnnnnnnnnnnnnnnnnnnnnnnnnnnnnnnnnnnnnnnnnnnnnnnnnnnnnnnnnnnnnnnnnnnnnnnnnnnnnnnnnnnnnnnnnnnnnnnnnnnnnnnnnnnnnnnnnnnnnnnnnnnnnnnnnnnnnnnnnnnnnnnnnnnnnnnnnnnnnnnnnnnnnnnnnnnnnnnnnnnnnnnnnnnnnnnnnnnnnnnnnnnnnnnnnnnnnnnnnnnnnnnnnnnnnnnnnnnnnnnnnnnnnnnnnnnnnnnnnnnnnnnnnnnnnnnnnnnnnnnnnnnnnnnnnnnnnnnnnnnnnnnnnnnnnnnnnnnnnnnnnnnnnnnnnnnnnnnnnnnnnnnnnnnnnnnnnnnnnnnnnnnnnnnnnnnnnnnnnnnnnnnnnnnnnnnnnnnnnnnnnnnnnnnnnnnnnnnnnnnnnnnnnnnnnnnnnnnnnnnnnnnnnnnnnnnnnnnnnnnnnnnnnnnnnnnnnnnnnnnnnnnnnnnnnnnnnnnnnnnnnnnnnnnnnnnnnnnnnnnnnnnnnnnnnnnnnnnnnnnnnnnnnnnnnnnnnnnnnnnnnnnnnnnnnnnnnnnnnnnnnnnnnnnnnnnnnnnnnnnnnnnnnnnnnnnnnnnnnnnnnnnnnnnnnnnnnnnnnnnnnnnnnnnnnnnnnnnnnnnnnnnnnnnnnnnnnnnnnnnnnnnnnnnnnnnnnnnnnnnnnnnnnnnnnnnnnnnnnnnnnnnnnnnnnnnnnnnnnnnnnnnnnnnnnnnnnnnnnnnnnnnnnnnnnnnnnnnnnnnnnnnnnnnnnnnnnnnnnnnnnnnnnnnnnnnnnnnnnnnnnnnnnnnnnnnnnnnnnnnnnnnnnnnnnnnnnnnnnnnnnnnnnnnnnnnnnnnnnnnnnnnnnnnnnnnnnnnnnnnnnnnnnnnnnnnnnnnnnnnnnnnnnnnnnnnnnnnnnnnnnnnnnnnnnnnnnnnnnnnnnnnnnnnnnnnnnnnnnnnnnnnnnnnnnnnnnnnnnnnnnnnnnnnnnnnnnnnnnnnnnnnnnnnnnnnnnnnnnnnnnnnnnnnnnnnnnnnnnnnnnnnnnnnnnnnnnnnnnnnnnnnnnnnnnnnnnnnnnnnnnnnnnnnnnnnnnnnnnnnnnnnnnnnnnnnnnnnnnnnnnnnnnnnnnnnnnnnnnnnnnnnnnnnnnnnnnnnnnnnnnnnnnnnnnnnnnnnnnnnnnnnnnnnnnnnnnnnnnnnnnnnnnnnnnnnnnnnnnnnnnnnnnnnnnnnnnnnnnnnnnnnnnnnnnnnnnnnnnnnnnnnnnnnnnnnnnnnnnnnnnnnnnnnnnnnnnnnnnnnnnnnnnnnnnnnnnnnnnnnnnnnnnnnnnnnnnnnnnnnnnnnnnnnnnnnnnnnnnnnnnnnnnnnnnnnnnnnnnnnnnnnnnnnnnnnnnnnnnnnnnnnnnnnnnnnnnnnnnnnnnnnnnnnnnnnnnnnnnnnnnnnnnnnnnnnnnnnnnnnnnnnnnnnnnnnnnnnnnnnnnnnnnnnnnnnnnnnnnnnnnnnnnnnnnnnnnnnnnnnnnnnnnnnnnnnnnnnnnnnnnnnnnnnnnnnnnnnnnnnnnnnnnnnnnnnnnnnnnnnnnnnnnnnnnnnnnnnnnnnnnnnnnnnnnnnnnnnnnnnnnnnnnnnnnnnnnnnnnnnnnnnnnnnnnnnnnnnnnnnnnnnnnnnnnnnnnnnnnnnnnnnnnnnnnnnnnnnnnnnnnnnnnnnnnnnnnnnnnnnnnnnnnnnnnnnnnnnnnnnnnnnnnnnnnnnnnnnnnnnnnnnnnnnnnnnnnnnnnnnnnnnnnnnnnnnnnnnnnnnnnnnnnnnnnnnnnnnnnnnnnnnnnnnnnnnnnnnnnnnnnnnnnnnnnnnnnnnnnnnnnnnnnnnnnnnnnnnnnnnnnnnnnnnnnnnnnnnnnnnnnnnnnnnnnnnnnnnnnnnnnnnnnnnnnnnnnnnnnnnnnnnnnnnnnnnnnnnnnnnnnnnnnnnnnnnnnnnnnnnnnnnnnnnnnnnnnnnnnnnnnnnnnnnnnnnnnnnnnnnnnnnnnnnnnnnnnnnnnnnnnnnnnnnnnnnnnnnnnnnnnnnnnnnnnnnnnnnnnnnnnnnnnnnnnnnnnnnnnnnnnnnnnnnnnnnnnnnnnnnnnnnnnnnnnnnnnnnnnnnnnnnnnnnnnnnnnnnnnnnnnnnnnnnnnnnnnnnnnnnnnnnnnnnnnnnnnnnnnnnnnnnnnnnnnnnnnnnnnnnnnnnnnnnnnnnnnnnnnnnnnnnnnnnnnnnnnnnnnnnnnnnnnnnnnnnnnnnnnnnnnnnnnnnnnnnnnnnnnnnnnnnnnnnnnnnnnnnnnnnnnnnnnnnnnnnnnnnnnnnnnnnnnnnnnnnnnnnnnnnnnnnnnnnnnnnnnnnnnnnnnnnnnnnnnnnnnnnnnnnnnnnnnnnnnnnnnnnnnnnnnnnnnnnnnnnnnnnnnnnnnnnnnnnnnnnnnnnnnnnnnnnnnnnnnnnnnnnnnnnnnnnnnnnnnnnnnnnnnnnnnnnnnnnnnnnnnnnnnnnnnnnnnnnnnnnnnnnnnnnnnnnnnnnnnnnnnnnnnnnnnnnnnnnnnnnnnnnnnnnnnnnnnnnnnnnnnnnnnnnnnnnnnnnnnnnnnnnnnnnnnnnnnnnnnnnnnnnnnnnnnnnnnnnnnnnnnnnnnnnnnnnnnnnnnnnnnnnnnnnnnnnnnnnnnnnnnnnnnnnnnnnnnnnnnnnnnnnnnnnnnnnnnnnnnnnnnnnnnnnnnnnnnnnnnnnnnnnnnnnnnnnnnnnnnnnnnnnnnnnnnnnnnnnnnnnnnnnnnnnnnnnnnnnnnnnnnnnnnnnnnnnnnnnnnnnnnnnnnnnnnnnnnnnnnnnnnnnnnnnnnnnnnnnnnnnnnnnnnnnnnnnnnnnnnnnnnnnnnnnnnnnnnnnnnnnnnnnnnnnnnnnnnnnnnnnnnnnnnnnnnnnnnnnnnnnnnnnnnnnnnnnnnnnnnnnnnnnnnnnnnnnnnnnnnnnnnnnnnnnnnnnnnnnnnnnnnnnnnnnnnnnnnnnnnnnnnnnnnnnnnnnnnnnnnnnnnnnnnnnnnnnnnnnnnnnnnnnnnnnnnnnnnnnnnnnnnnnnnnnnnnnnnnnnnnnnnnnnnnnnnnnnnnnnnnnnnnnnnnnnnnnnnnnnnnnnnnnnnnnnnnnnnnnnnnnnnnnnnnnnnnnnnnnnnnnnnnnnnnnnnnnnnnnnnnnnnnnnnnnnnnnnnnnnnnnnnnnnnnnnnnnnnnnnnnnnnnnnnnnnnnnnnnnnnnnnnnnnnnnnnnnnnnnnnnnnnnnnnnnnnnnnnnnnnnnnnnnnnnnnnnnnnnnnnnnnnnnnnnnnnnnnnnnnnnnnnnnnnnnnnnnnnnnnnnnnnnnnnnnnnnnnnnnnnnnnnnnnnnnnnnnnnnnnnnnnnnnnnnnnnnnnnnnnnnnnnnnnnnnnnnnnnnnnnnnnnnnnnnnnnnnnnnnnnnnnnnnnnnnnnnnnnnnnnnnnnnnnnnnnnnnnnnnnnnnnnnnnnnnnnnnnnnnnnnnnnnnnnnnnnnnnnnnnnnnnnnnnnnnnnnnnnnnnnnnnnnnnnnnnnnnnnnnnnnnnnnnnnnnnnnnnnnnnnnnnnnnnnnnnnnnnnnnnnnnnnnnnnnnnnnnnnnnnnnnnnnnnnnnnnnnnnnnnnnnnnnnnnnnnnnnnnnnnnnnnnnnnnnnnnnnnnnnnnnnnnnnnnnnnnnnnnnnnnnnnnnnnnnnnnnnnnnnnnnnnnnnnnnnnnnnnnnnnnnnnnnnnnnnnnnnnnnnnnnnnnnnnnnnnnnnnnnnnnnnnnnnnnnnnnnnnnnnnnnnnnnnnnnnnnnnnnnnnnnnnnnnnnnnnnnnnnnnnnnnnnnnnnnnnnnnnnnnnnnnnnnnnnnnnnnnnnnnnnnnnnnnnnnnnnnnnnnnnnnnnnnnnnnnnnnnnnnnnnnnnnnnnnnnnnnnnnnnnnnnnnnnnnnnnnnnnnnnnnnnnnnnnnnnnnnnnnnnnnnnnnnnnnnnnnnnnnnnnnnnnnnnnnnnnnnnnnnnnnnnnnnnnnnnnnnnnnnnnnnnnnnnnnnnnnnnnnnnnnnnnnnnnnnnnnnnnnnnnnnnnnnnnnnnnnnnnnnnnnnnnnnnnnnnnnnnnnnnnnnnnnnnnnnnnnnnnnnnnnnnnnnnnnnnnnnnnnnnnnnnnnnnnnnnnnnnnnnnnnnnnnnnnnnnnnnnnnnnnnnnnnnnnnnnnnnnnnnnnnnnnnnnnnnnnnnnnnnnnnnnnnnnnnnnnnnnnnnnnnnnnnnnnnnnnnnnnnnnnnnnnnnnnnnnnnnnnnnnnnnnnnnnnnnnnnnnnnnnnnnnnnnnnnnnnnnnnnnnnnnnnnnnnnnnnnnnnnnnnnnnnnnnnnnnnnnnnnnnnnnnnnnnnnnnnnnnnnnnnnnnnnnnnnnnnnnnnnnnnnnnnnnnnnnnnnnnnnnnnnnnnnnnnnnnnnnnnnnnnnnnnnnnnnnnnnnnnnnnnnnnnnnnnnnnnnnnnnnnnnnnnnnnnnnnnnnnnnnnnnnnnnnnnnnnnnnnnnnnnnnnnnnnnnnnnnnnnnnnnnnnnnnnnnnnnnnnnnnnnnnnnnnnnnnnnnnnnnnnnnnnnnnnnnnnnnnnnnnnnnnnnnnnnnnnnnnnnnnnnnnnnnnnnnnnnnnnnnnnnnnnnnnnnnnnnnnnnnnnnnnnnnnnnnnnnnnnnnnnnnnnnnnnnnnnnnnnnnnnnnnnnnnnnnnnnnnnnnnnnnnnnnnnnnnnnnnnnnnnnnnnnnnnnnnnnnnnnnnnnnnnnnnnnnnnnnnnnnnnnnnnnnnnnnnnnnnnnnnnnnnnnnnnnnnnnnnnnnnnnnnnnnnnnnnnnnnnnnnnnnnnnnnnnnnnnnnnnnnnnnnnnnnnnnnnnnnnnnnnnnnnnnnnnnnnnnnnnnnnnnnnnnnnnnnnnnnnnnnnnnnnnnnnnnnnnnnnnnnnnnnnnnnnnnnnnnnnnnnnnnnnnnnnnnnnnnnnnnnnnnnnnnnnnnnnnnnnnnnnnnnnnnnnnnnnnnnnnnnnnnnnnnnnnnnnnnnnnnnnnnnnnnnnnnnnnnnnnnnnnnnnnnnnnnnnnnnnnnnnnnnnnnnnnnnnnnnnnnnnnnnnnnnnnnnnnnnnnnnnnnnnnnnnnnnnnnnnnnnnnnnnnnnnnnnnnnnnnnnnnnnnnnnnnnnnnnnnnnnnnnnnnnnnnnnnnnnnnnnnnnnnnnnnnnnnnnnnnnnnnnnnnnnnnnnnnnnnnnnnnnnnnnnnnnnnnnnnnnnnnnnnnnnnnnnnnnnnnnnnnnnnnnnnnnnnnnnnnnnnnnnnnnnnnnnnnnnnnnnnnnnnnnnnnnnnnnnnnnnnnnnnnnnnnnnnnnnnnnnnnnnnnnnnnnnnnnnnnnnnnnnnnnnnnnnnnnnnnnnnnnnnnnnnnnnnnnnnnnnnnnnnnnnnnnnnnnnnnnnnnnnnnnnnnnnnnnnnnnnnnnnnnnnnnnnnnnnnnnnnnnnnnnnnnnnnnnnnnnnnnnnnnnnnnnnnnnnnnnnnnnnnnnnnnnnnnnnnnnnnnnnnnnnnnnnnnnnnnnnnnnnnnnnnnnnnnnnnnnnnnnnnnnnnnnnnnnnnnnnnnnnnnnnnnnnnnnnnnnnnnnnnnnnnnnnnnnnnnnnnnnnnnnnnnnnnnnnnnnnnnnnnnnnnnnnnnnnnnnnnnnnnnnnnnnnnnnnnnnnnnnnnnnnnnnnnnnnnnnnnnnnnnnnnnnnnnnnnnnnnnnnnnnnnnnnnnnnnnnnnnnnnnnnnnnnnnnnnnnnnnnnnnnnnnnnnnnnnnnnnnnnnnnnnnnnnnnnnnnnnnnnnnnnnnnnnnnnnnnnnnnnnnnnnnnnnnnnnnnnnnnnnnnnnnnnnnnnnnnnnnnnnnnnnnnnnnnnnnnnnnnnnnnnnnnnnnnnnnnnnnnnnnnnnnnnnnnnnnnnnnnnnnnnnnnnnnnnnnnnnnnnnnnnnnnnnnnnnnnnnnnnnnnnnnnnnnnnnnnnnnnnnnnnnnnnnnnnnnnnnnnnnnnnnnnnnnnnnnnnnnnnnnnnnnnnnnnnnnnnnnnnnnnnnnnnnnnnnnnnnnnnnnnnnnnnnnnnnnnnnnnnnnnnnnnnnnnnnnnnnnnnnnnnnnnnnnnnnnnnnnnnnnnnnnnnnnnnnnnnnnnnnnnnnnnnnnnnnnnnnnnnnnnnnnnnnnnnnnnnnnnnnnnnnnnnnnnnnnnnnnnnnnnnnnnnnnnnnnnnnnnnnnnnnnnnnnnnnnnnnnnnnnnnnnnnnnnnnnnnnnnnnnnnnnnnnnnnnnnnnnnnnnnnnnnnnnnnnnnnnnnnnnnnnnnnnnnnnnnnnnnnnnnnnnnnnnnnnnnnnnnnnnnnnnnnnnnnnnnnnnnnnnnnnnnnnnnnnnnnnnnnnnnnnnnnnnnnnnnnnnnnnnnnnnnnnnnnnnnnnnnnnnnnnnnnnnnnnnnnnnnnnnnnnnnnnnnnnnnnnnnnnnnnnnnnnnnnnnnnnnnnnnnnnnnnnnnnnnnnnnnnnnnnnnnnnnnnnnnnnnnnnnnnnnnnnnnnnnnnnnnnnnnnnnnnnnnnnnnnnnnnnnnnnnnnnnnnnnnnnnnnnnnnnnnnnnnnnnnnnnnnnnnnnnnnnnnnnnnnnnnnnnnnnnnnnnnnnnnnnnnnnnnnnnnnnnnnnnnnnnnnnnnnnnnnnnnnnnnnnnnnnnnnnnnnnnnnnnnnnnnnnnnnnnnnnnnnnnnnnnnnnnnnnnnnnnnnnnnnnnnnnnnnnnnnnnnnnnnnnnnnnnnnnnnnnnnnnnnnnnnnnnnnnnnnnnnnnnnnnnnnnnnnnnnnnnnnnnnnnnnnnnnnnnnnnnnnnnnnnnnnnnnnnnnnnnnnnnnnnnnnnnnnnnnnnnnnnnnnnnnnnnnnnnnnnnnnnnnnnnnnnnnnnnnnnnnnnnnnnnnnnnnnnnnnnnnnnnnnnnnnnnnnnnnnnnnnnnnnnnnnnnnnnnnnnnnnnnnnnnnnnnnnnnnnnnnnnnnnnnnnnnnnnnnnnnnnnnnnnnnnnnnnnnnnnnnnnnnnnnnnnnnnnnnnnnnnnnnnnnnnnnnnnnnnnnnnnnnnnnnnnnnnnnnnnnnnnnnnnnnnnnnnnnnnnnnnnnnnnnnnnnnnnnnnnnnnnnnnnnnnnnnnnnnnnnnnnnnnnnnnnnnnnnnnnnnnnnnnnnnnnnnnnnnnnnnnnnnnnnnnnnnnnnnnnnnnnnnnnnnnnnnnnnnnnnnnnnnnnnnnnnnnnnnnnnnnnnnnnnnnnnnnnnnnnnnnnnnnnnnnnnnnnnnnnnnnnnnnnnnnnnnnnnnnnnnnnnnnnnnnnnnnnnnnnnnnnnnnnnnnnnnnnnnnnnnnnnnnnnnnnnnnnnnnnnnnnnnnnnnnnnnnnnnnnnnnnnnnnnnnnnnnnnnnnnnnnnnnnnnnnnnnnnnnnnnnnnnnnnnnnnnnnnnnnnnnnnnnnnnnnnnnnnnnnnnnnnnnnnnnnnnnnnnnnnnnnnnnnnnnnnnnnnnnnnnnnnnnnnnnnnnnnnnnnnnnnnnnnnnnnnnnnnnnnnnnnnnnnnnnnnnnnnnnnnnnnnnnnnnnnnnnnnnnnnnnnnnnnnnnnnnnnnnnnnnnnnnnnnnnnnnnnnnnnnnnnnnnnnnnnnnnnnnnnnnnnnnnnnnnnnnnnnnnnnnnnnnnnnnnnnnnnnnnnnnnnnnnnnnnnnnnnnnnnnnnnnnnnnnnnnnnnnnnnnnnnnnnnnnnnnnnnnnnnnnnnnnnnnnnnnnnnnnnnnnnnnnnnnnnnnnnnnnnnnnnnnnnnnnnnnnnnnnnnnnnnnnnnnnnnnnnnnnnnnnnnnnnnnnnnnnnnnnnnnnnnnnnnnnnnnnnnnnnnnnnnnnnnnnnnnnnnnnnnnnnnnnnnnnnnnnnnnnnnnnnnnnnnnnnnnnnnnnnnnnnnnnnnnnnnnnnnnnnnnnnnnnnnnnnnnnnnnnnnnnnnnnnnnnnnnnnnnnnnnnnnnnnnnnnnnnnnnnnnnnnnnnnnnnnnnnnnnnnnnnnnnnnnnnnnnnnnnnnnnnnnnnnnnnnnnnnnnnnnnnnnnnnnnnnnnnnnnnnnnnnnnnnnnnnnnnnnnnnnnnnnnnnnnnnnnnnnnnnnnnnnnnnnnnnnnnnnnnnnnnnnnnnnnnnnnnnnnnnnnnnnnnnnnnnnnnnnnnnnnnnnnnnnnnnnnnnnnnnnnnnnnnnnnnnnnnnnnnnnnnnnnnnnnnnnnnnnnnnnnnnnnnnnnnnnnnnnnnnnnnnnnnnnnnnnnnnnnnnnnnnnnnnnnnnnnnnnnnnnnnnnnnnnnnnnnnnnnnnnnnnnnnnnnnnnnnnnnnnnnnnnnnnnnnnnnnnnnnnnnnnnnnnnnnnnnnnnnnnnnnnnnnnnnnnnnnnnnnnnnnnnnnnnnnnnnnnnnnnnnnnnnnnnnnnnnnnnnnnnnnnnnnnnnnnnnnnnnnnnnnnnnnnnnnnnnnnnnnnnnnnnnnnnnnnnnnnnnnnnnnnnnnnnnnnnnnnnnnnnnnnnnnnnnnnnnnnnnnnnnnnnnnnnnnnnnnnnnnnnnnnnnnnnnnnnnnnnnnnnnnnnnnnnnnnnnnnnnnnnnnnnnnnnnnnnnnnnnnnnnnnnnnnnnnnnnnnnnnnnnnnnnnnnnnnnnnnnnnnnnnnnnnnnnnnnnnnnnnnnnnnnnnnnnnnnnnnnnnnnnnnnnnnnnnnnnnnnnnnnnnnnnnnnnnnnnnnnnnnnnnnnnnnnnnnnnnnnnnnnnnnnnnnnnnnnnnnnnnnnnnnnnnnnnnnnnnnnnnnnnnnnnnnnnnnnnnnnnnnnnnnnnnnnnnnnnnnnnnnnnnnnnnnnnnnnnnnnnnnnnnnnnnnnnnnnnnnnnnnnnnnnnnnnnnnnnnnnnnnnnnnnnnnnnnnnnnnnnnnnnnnnnnnnnnnnnnnnnnnnnnnnnnnnnnnnnnnnnnnnnnnnnnnnnnnnnnnnnnnnnnnnnnnnnnnnnnnnnnnnnnnnnnnnnnnnnnnnnnnnnnnnnnnnnnnnnnnnnnnnnnnnnnnnnnnnnnnnnnnnnnnnnnnnnnnnnnnnnnnnnnnnnnnnnnnnnnnnnnnnnnnnnnnnnnnnnnnnnnnnnnnnnnnnnnnnnnnnnnnnnnnnnnnnnnnnnnnnnnnnnnnnnnnnnnnnnnnnnnnnnnnnnnnnnnnnnnnnnnnnnnnnnnnnnnnnnnnnnnnnnnnnnnnnnnnnnnnnnnnnnnnnnnnnnnnnnnnnnnnnnnnnnnnnnnnnnnnnnnnnnnnnnnnnnnnnnnnnnnnnnnnnnnnnnnnnnnnnnnnnnnnnnnnnnnnnnnnnnnnnnnnnnnnnnnnnnnnnnnnnnnnnnnnnnnnnnnnnnnnnnnnnnnnnnnnnnnnnnnnnnnnnnnnnnnnnnnnnnnnnnnnnnnnnnnnnnnnnnnnnnnnnnnnnnnnnnnnnnnnnnnnnnnnnnnnnnnnnnnnnnnnnnnnnnnnnnnnnnnnnnnnnnnnnnnnnnnnnnnnnnnnnnnnnnnnnnnnnnnnnnnnnnnnnnnnnnnnnnnnnnnnnnnnnnnnnnnnnnnnnnnnnnnnnnnnnnnnnnnnnnnnnnnnnnnnnnnnnnnnnnnnnnnnnnnnnnnnnnnnnnnnnnnnnnnnnnnnnnnnnnnnnnnnnnnnnnnnnnnnnnnnnnnnnnnnnnnnnnnnnnnnnnnnnnnnnnnnnnnnnnnnnnnnnnnnnnnnnnnnnnnnnnnnnnnnnnnnnnnnnnnnnnnnnnnnnnnnnnnnnnnnnnnnnnnnnnnnnnnnnnnnnnnnnnnnnnnnnnnnnnnnnnnnnnnnnnnnnnnnnnnnnnnnnnnnnnnnnnnnnnnnnnnnnnnnnnnnnnnnnnnnnnnnnnnnnnnnnnnnnnnnnnnnnnnnnnnnnnnnnnnnnnnnnnnnnnnnnnnnnnnnnnnnnnnnnnnnnnnnnnnnnnnnnnnnnnnnnnnnnnnnnnnnnnnnnnnnnnnnnnnnnnnnnnnnnnnnnnnnnnnnnnnnnnnnnnnnnnnnnnnnnnnnnnnnnnnnnnnnnnnnnnnnnnnnnnnnnnnnnnnnnnnnnnnnnnnnnnnnnnnnnnnnnnnnnnnnnnnnnnnnnnnnnnnnnnnnnnnnnnnnnnnnnnnnnnnnnnnnnnnnnnnnnnnnnnnnnnnnnnnnnnnnnnnnnnnnnnnnnnnnnnnnnnnnnnnnnnnnnnnnnnnnnnnnnnnnnnnnnnnnnnnnnnnnnnnnnnnnnnnnnnnnnnnnnnnnnnnnnnnnnnnnnnnnnnnnnnnnnnnnnnnnnnnnnnnnnnnnnnnnnnnnnnnnnnnnnnnnnnnnnnnnnnnnnnnnnnnnnnnnnnnnnnnnnnnnnnnnnnnnnnnnnnnnnnnnnnnnnnnnnnnnnnnnnnnnnnnnnnnnnnnnnnnnnnnnnnnnnnnnnnnnnnnnnnnnnnnnnnnnnnnnnnnnnnnnnnnnnnnnnnnnnnnnnnnnnnnnnnnnnnnnnnnnnnnnnnnnnnnnnnnnnnnnnnnnnnnnnnnnnnnnnnnnnnnnnnnnnnnnnnnnnnnnnnnnnnnnnnnnnnnnnnnnnnnnnnnnnnnnnnnnnnnnnnnnnnnnnnnnnnnnnnnnnnnnnnnnnnnnnnnnnnnnnnnnnnnnnnnnnnnnnnnnnnnnnnnnnnnnnnnnnnnnnnnnnnnnnnnnnnnnnnnnnnnnnnnnnnnnnnnnnnnnnnnnnnnnnnnnnnnnnnnnnnnnnnnnnnnnnnnnnnnnnnnnnnnnnnnnnnnnnnnnnnnnnnnnnnnnnnnnnnnnnnnnnnnnnnnnnnnnnnnnnnnnnnnnnnnnnnnnnnnnnnnnnnnnnnnnnnnnnnnnnnnnnnnnnnnnnnnnnnnnnnnnnnnnnnnnnnnnnnnnnnnnnnnnnnnnnnnnnnnnnnnnnnnnnnnnnnnnnnnnnnnnnnnnnnnnnnnnnnnnnnnnnnnnnnnnnnnnnnnnnnnnnnnnnnnnnnnnnnnnnnnnnnnnnnnnnnnnnnnnnnnnnnnnnnnnnnnnnnnnnnnnnnnnnnnnnnnnnnnnnnnnnnnnnnnnnnnnnnnnnnnnnnnnnnnnnnnnnnnnnnnnnnnnnnnnnnnnnnnnnnnnnnnnnnnnnnnnnnnnnnnnnnnnnnnnnnnnnnnnnnnnnnnnnnnnnnnnnnnnnnnnnnnnnnnnnnnnnnnnnnnnnnnnnnnnnnnnnnnnnnnnnnnnnnnnnnnnnnnnnnnnnnnnnnnnnnnnnnnnnnnnnnnnnnnnnnnnnnnnnnnnnnnnnnnnnnnnnnnnnnnnnnnnnnnnnnnnnnnnnnnnnnnnnnnnnnnnnnnnnnnnnnnnnnnnnnnnnnnnnnnnnnnnnnnnnnnnnnnnnnnnnnnnnnnnnnnnnnnnnnnnnnnnnnnnnnnnnnnnnnnnnnnnnnnnnnnnnnnnnnnnnnnnnnnnnnnnnnnnnnnnnnnnnnnnnnnnnnnnnnnnnnnnnnnnnnnnnnnnnnnnnnnnnnnnnnnnnnnnnnnnnnnnnnnnnnnnnnnnnnnnnnnnnnnnnnnnnnnnnnnnnnnnnnnnnnnnnnnnnnnnnnnnnnnnnnnnnnnnnnnnnnnnnnnnnnnnnnnnnnnnnnnnnnnnnnnnnnnnnnnnnnnnnnnnnnnnnnnnnnnnnnnnnnnnnnnnnnnnnnnnnnnnnnnnnnnnnnnnnnnnnnnnnnnnnnnnnnnnnnnnnnnnnnnnnnnnnnnnnnnnnnnnnnnnnnnnnnnnnnnnnnnnnnnnnnnnnnnnnnnnnnnnnnnnnnnnnnnnnnnnnnnnnnnnnnnnnnnnnnnnnnnnnnnnnnnnnnnnnnnnnnnnnnnnnnnnnnnnnnnnnnnnnnnnnnnnnnnnnnnnnnnnnnnnnnnnnnnnnnnnnnnnnnnnnnnnnnnnnnnnnnnnnnnnnnnnnnnnnnnnnnnnnnnnnnnnnnnnnnnnnnnnnnnnnnnnnnnnnnnnnnnnnnnnnnnnnnnnnnnnnnnnnnnnnnnnnnnnnnnnnnnnnnnnnnnnnnnnnnnnnnnnnnnnnnnnnnnnnnnnnnnnnnnnnnnnnnnnnnnnnnnnnnnnnnnnnnnnnnnnnnnnnnnnnnnnnnnnnnnnnnnnnnnnnnnnnnnnnnnnnnnnnnnnnnnnnnnnnnnnnnnnnnnnnnnnnnnnnnnnnnnnnnnnnnnnnnnnnnnnnnnnnnnnnnnnnnnnnnnnnnnnnnnnnnnnnnnnnnnnnnnnnnnnnnnnnnnnnnnnnnnnnnnnnnnnnnnnnnnnnnnnnnnnnnnnnnnnnnnnnnnnnnnnnnnnnnnnnnnnnnnnnnnnnnnnnnnnnnnnnnnnnnnnnnnnnnnnnnnnnnnnnnnnnnnnnnnnnnnnnnnnnnnnnnnnnnnnnnnnnnnnnnnnnnnnnnnnnnnnnnnnnnnnnnnnnnnnnnnnnnnnnnnnnnnnnnnnnnnnnnnnnnnnnnnnnnnnnnnnnnnnnnnnnnnnnnnnnnnnnnnnnnnnnnnnnnnnnnnnnnnnnnnnnnnnnnnnnnnnnnnnnnnnnnnnnnnnnnnnnnnnnnnnnnnnnnnnnnnnnnnnnnnnnnnnnnnnnnnnnnnnnnnnnnnnnnnnnnnnnnnnnnnnnnnnnnnnnnnnnnnnnnnnnnnnnnnnnnnnnnnnnnnnnnnnnnnnnnnnnnnnnnnnnnnnnnnnnnnnnnnnnnnnnnnnnnnnnnnnnnnnnnnnnnnnnnnnnnnnnnnnnnnnnnnnnnnnnnnnnnnnnnnnnnnnnnnnnnnnnnnnnnnnnnnnnnnnnnnnnnnnnnnnnnnnnnnnnnnnnnnnnnnnnnnnnnnnnnnnnnnnnnnnnnnnnnnnnnnnnnnnnnnnnnnnnnnnnnnnnnnnnnnnnnnnnnnnnnnnnnnnnnnnnnnnnnnnnnnnnnnnnnnnnnnnnnnnnnnnnnnnnnnnnnnnnnnnnnnnnnnnnnnnnnnnnnnnnnnnnnnnnnnnnnnnnnnnnnnnnnnnnnnnnnnnnnnnnnnnnnnnnnnnnnnnnnnnnnnnnnnnnnnnnnnnnnnnnnnnnnnnnnnnnnnnnnnnnnnnnnnnnnnnnnnnnnnnnnnnnnnnnnnnnnnnnnnnnnnnnnnnnnnnnnnnnnnnnnnnnnnnnnnnnnnnnnnnnnnnnnnnnnnnnnnnnnnnnnnnnnnnnnnnnnnnnnnnnnnnnnnnnnnnnnnnnnnnnnnnnnnnnnnnnnnnnnnnnnnnnnnnnnnnnnnnnnnnnnnnnnnnnnnnnnnnnnnnnnnnnnnnnnnnnnnnnnnnnnnnnnnnnnnnnnnnnnnnnnnnnnnnnnnnnnnnnnnnnnnnnnnnnnnnnnnnnnnnnnnnnnnnnnnnnnnnnnnnnnnnnnnnnnnnnnnnnnnnnnnnnnnnnnnnnnnnnnnnnnnnnnnnnnnnnnnnnnnnnnnnnnnnnnnnnnnnnnnnnnnnnnnnnnnnnnnnnnnnnnnnnnnnnnnnnnnnnnnnnnnnnnnnnnnnnnnnnnnnnnnnnnnnnnnnnnnnnnnnnnnnnnnnnnnnnnnnnnnnnnnnnnnnnnnnnnnnnnnnnnnnnnnnnnnnnnnnnnnnnnnnnnnnnnnnnnnnnnnnnnnnnnnnnnnnnnnnnnnnnnnnnnnnnnnnnnnnnnnnnnnnnnnnnnnnnnnnnnnnnnnnnnnnnnnnnnnnnnnnnnnnnnnnnnnnnnnnnnnnnnnnnnnnnnnnnnnnnnnnnnnnnnnnnnnnnnnnnnnnnnnnnnnnnnnnnnnnnnnnnnnnnnnnnnnnnnnnnnnnnnnnnnnnnnnnnnnnnnnnnnnnnnnnnnnnnnnnnnnnnnnnnnnnnnnnnnnnnnnnnnnnnnnnnnnnnnnnnnnnnnnnnnnnnnnnnnnnnnnnnnnnnnnnnnnnnnnnnnnnnnnnnnnnnnnnnnnnnnnnnnnnnnnnnnnnnnnnnnnnnnnnnnnnnnnnnnnnnnnnnnnnnnnnnnnnnnnnnnnnnnnnnnnnnnnnnnnnnnnnnnnnnnnnnnnnnnnnnnnnnnnnnnnnnnnnnnnnnnnnnnnnnnnnnnnnnnnnnnnnnnnnnnnnnnnnnnnnnnnnnnnnnnnnnnnnnnnnnnnnnnnnnnnnnnnnnnnnnnnnnnnnnnnnnnnnnnnnnnnnnnnnnnnnnnnnnnnnnnnnnnnnnnnnnnnnnnnnnnnnnnnnnnnnnnnnnnnnnnnnnnnnnnnnnnnnnnnnnnnnnnnnnnnnnnnnnnnnnnnnnnnnnnnnnnnnnnnnnnnnnnnnnnnnnnnnnnnnnnnnnnnnnnnnnnnnnnnnnnnnnnnnnnnnnnnnnnnnnnnnnnnnnnnnnnnnnnnnnnnnnnnnnnnnnnnnnnnnnnnnnnnnnnnnnnnnnnnnnnnnnnnnnnnnnnnnnnnnnnnnnnnnnnnnnnnnnnnnnnnnnnnnnnnnnnnnnnnnnnnnnnnnnnnnnnnnnnnnnnnnnnnnnnnnnnnnnnnnnnnnnnnnnnnnnnnnnnnnnnnnnnnnnnnnnnnnnnnnnnnnnnnnnnnnnnnnnnnnnnnnnnnnnnnnnnnnnnnnnnnnnnnnnnnnnnnnnnnnnnnnnnnnnnnnnnnnnnnnnnnnnnnnnnnnnnnnnnnnnnnnnnnnnnnnnnnnnnnnnnnnnnnnnnnnnnnnnnnnnnnnnnnnnnnnnnnnnnnnnnnnnnnnnnnnnnnnnnnnnnnnnnnnnnnnnnnnnnnnnnnnnnnnnnnnnnnnnnnnnnnnnnnnnnnnnnnnnnnnnnnnnnnnnnnnnnnnnnnnnnnnnnnnnnnnnnnnnnnnnnnnnnnnnnnnnnnnnnnnnnnnnnnnnnnnnnnnnnnnnnnnnnnnnnnnnnnnnnnnnnnnnnnnnnnnnnnnnnnnnnnnnnnnnnnnnnnnnnnnnnnnnnnnnnnnnnnnnnnnnnnnnnnnnnnnnnnnnnnnnnnnnnnnnnnnnnnnnnnnnnnnnnnnnnnnnnnnnnnnnnnnnnnnnnnnnnnnnnnnnnnnnnnnnnnnnnnnnnnnnnnnnnnnnnnnnnnnnnnnnnnnnnnnnnnnnnnnnnnnnnnnnnnnnnnnnnnnnnnnnnnnnnnnnnnnnnnnnnnnnnnnnnnnnnnnnnnnnnnnnnnnnnnnnnnnnnnnnnnnnnnnnnnnnnnnnnnnnnnnnnnnnnnnnnnnnnnnnnnnnnnnnnnnnnnnnnnnnnnnnnnnnnnnnnnnnnnnnnnnnnnnnnnnnnnnnnnnnnnnnnnnnnnnnnnnnnnnnnnnnnnnnnnnnnnnnnnnnnnnnnnnnnnnnnnnnnnnnnnnnnnnnnnnnnnnnnnnnnnnnnnnnnnnnnnnnnnnnnnnnnnnnnnnnnnnnnnnnnnnnnnnnnnnnnnnnnnnnnnnnnnnnnnnnnnnnnnnnnnnnnnnnnnnnnnnnnnnnnnnnnnnnnnnnnnnnnnnnnnnnnnnnnnnnnnnnnnnnnnnnnnnnnnnnnnnnnnnnnnnnnnnnnnnnnnnnnnnnnnnnnnnnnnnnnnnnnnnnnnnnnnnnnnnnnnnnnnnnnnnnnnnnnnnnnnnnnnnnnnnnnnnnnnnnnnnnnnnnnnnnnnnnnnnnnnnnnnnnnnnnnnnnnnnnnnnnnnnnnnnnnnnnnnnnnnnnnnnnnnnnnnnnnnnnnnnnnnnnnnnnnnnnnnnnnnnnnnnnnnnnnnnnnnnnnnnnnnnnnnnnnnnnnnnnnnnnnnnnnnnnnnnnnnnnnnnnnnnnnnnnnnnnnnnnnnnnnnnnnnnnnnnnnnnnnnnnnnnnnnnnnnnnnnnnnnnnnnnnnnnnnnnnnnnnnnnnnnnnnnnnnnnnnnnnnnnnnnnnnnnnnnnnnnnnnnnnnnnnnnnnnnnnnnnnnnnnnnnnnnnnnnnnnnnnnnnnnnnnnnnnnnnnnnnnnnnnnnnnnnnnnnnnnnnnnnnnnnnnnnnnnnnnnnnnnnnnnnnnnnnnnnnnnnnnnnnnnnnnnnnnnnnnnnnnnnnnnnnnnnnnnnnnnnnnnnnnnnnnnnnnnnnnnnnnnnnnnnnnnnnnnnnnnnnnnnnnnnnnnnnnnnnnnnnnnnnnnnnnnnnnnnnnnnnnnnnnnnnnnnnnnnnnnnnnnnnnnnnnnnnnnnnnnnnnnnnnnnnnnnnnnnnnnnnnnnnnnnnnnnnnnnnnnnnnnnnnnnnnnnnnnnnnnnnnnnnnnnnnnnnnnnnnnnnnnnnnnnnnnnnnnnnnnnnnnnnnnnnnnnnnnnnnnnnnnnnnnnnnnnnnnnnnnnnnnnnnnnnnnnnnnnnnnnnnnnnnnnnnnnnnnnnnnnnnnnnnnnnnnnnnnnnnnnnnnnnnnnnnnnnnnnnnnnnnnnnnnnnnnnnnnnnnnnnnnnnnnnnnnnnnnnnnnnnnnnnnnnnnnnnnnnnnnnnnnnnnnnnnnnnnnnnnnnnnnnnnnnnnnnnnnnnnnnnnnnnnnnnnnnnnnnnnnnnnnnnnnnnnnnnnnnnnnnnnnnnnnnnnnnnnnnnnnnnnnnnnnnnnnnnnnnnnnnnnnnnnnnnnnnnnnnnnnnnnnnnnnnnnnnnnnnnnnnnnnnnnnnnnnnnnnnnnnnnnnnnnnnnnnnnnnnnnnnnnnnnnnnnnnnnnnnnnnnnnnnnnnnnnnnnnnnnnnnnnnnnnnnnnnnnnnnnnnnnnnnnnnnnnnnnnnnnnnnnnnnnnnnnnnnnnnnnnnnnnnnnnnnnnnnnnnnnnnnnnnnnnnnnnnnnnnnnnnnnnnnnnnnnnnnnnnnnnnnnnnnnnnnnnnnnnnnnnnnnnnnnnnnnnnnnnnnnnnnnnnnnnnnnnnnnnnnnnnnnnnnnnnnnnnnnnnnnnnnnnnnnnnnnnnnnnnnnnnnnnnnnnnnnnnnnnnnnnnnnnnnnnnnnnnnnnnnnnnnnnnnnnnnnnnnnnnnnnnnnnnnnnnnnnnnnnnnnnnnnnnnnnnnnnnnnnnnnnnnnnnnnnnnnnnnnnnnnnnnnnnnnnnnnnnnnnnnnnnnnnnnnnnnnnnnnnnnnnnnnnnnnnnnnnnnnnnnnnnnnnnnnnnnnnnnnnnnnnnnnnnnnnnnnnnnnnnnnnnnnnnnnnnnnnnnnnnnnnnnnnnnnnnnnnnnnnnnnnnnnnnnnnnnnnnnnnnnnnnnnnnnnnnnnnnnnnnnnnnnnnnnnnnnnnnnnnnnnnnnnnnnnnnnnnnnnnnnnnnnnnnnnnnnnnnnnnnnnnnnnnnnnnnnnnnnnnnnnnnnnnnnnnnnnnnnnnnnnnnnnnnnnnnnnnnnnnnnnnnnnnnnnnnnnnnnnnnnnnnnnnnnnnnnnnnnnnnnnnnnnnnnnnnnnnnnnnnnnnnnnnnnnnnnnnnnnnnnnnnnnnnnnnnnnnnnnnnnnnnnnnnnnnnnnnnnnnnnnnnnnnnnnnnnnnnnnnnnnnnnnnnnnnnnnnnnnnnnnnnnnnnnnnnnnnnnnnnnnnnnnnnnnnnnnnnnnnnnnnnnnnnnnnnnnnnnnnnnnnnnnnnnnnnnnnnnnnnnnnnnnnnnnnnnnnnnnnnnnnnnnnnnnnnnnnnnnnnnnnnnnnnnnnnnnnnnnnnnnnnnnnnnnnnnnnnnnnnnnnnnnnnnnnnnnnnnnnnnnnnnnnnnnnnnnnnnnnnnnnnnnnnnnnnnnnnnnnnnnnnnnnnnnnnnnnnnnnnnnnnnnnnnnnnnnnnnnnnnnnnnnnnnnnnnnnnnnnnnnnnnnnnnnnnnnnnnnnnnnnnnnnnnnnnnnnnnnnnnnnnnnnnnnnnnnnnnnnnnnnnnnnnnnnnnnnnnnnnnnnnnnnnnnnnnnnnnnnnnnnnnnnnnnnnnnnnnnnnnnnnnnnnnnnnnnnnnnnnnnnnnnnnnnnnnnnnnnnnnnnnnnnnnnnnnnnnnnnnnnnnnnnnnnnnnnnnnnnnnnnnnnnnnnnnnnnnnnnnnnnnnnnnnnnnnnnnnnnnnnnnnnnnnnnnnnnnnnnnnnnnnnnnnnnnnnnnnnnnnnnnnnnnnnnnnnnnnnnnnnnnnnnnnnnnnnnnnnnnnnnnnnnnnnnnnnnnnnnnnnnnnnnnnnnnnnnnnnnnnnnnnnnnnnnnnnnnnnnnnnnnnnnnnnnnnnnnnnnnnnnnnnnnnnnnnnnnnnnnnnnnnnnnnnnnnnnnnnnnnnnnnnnnnnnnnnnnnnnnnnnnnnnnnnnnnnnnnnnnnnnnnnnnnnnnnnnnnnnnnnnnnnnnnnnnnnnnnnnnnnnnnnnnnnnnnnnnnnnnnnnnnnnnnnnnnnnnnnnnnnnnnnnnnnnnnnnnnnnnnnnnnnnnnnnnnnnnnnnnnnnnnnnnnnnnnnnnnnnnnnnnnnnnnnnnnnnnnnnnnnnnnnnnnnnnnnnnnnnnnnnnnnnnnnnnnnnnnnnnnnnnnnnnnnnnnnnnnnnnnnnnnnnnnnnnnnnnnnnnnnnnnnnnnnnnnnnnnnnnnnnnnnnnnnnnnnnnnnnnnnnnnnnnnnnnnnnnnnnnnnnnnnnnnnnnnnnnnnnnnnnnnnnnnnnnnnnnnnnnnnnnnnnnnnnnnnnnnnnnnnnnnnnnnnnnnnnnnnnnnnnnnnnnnnnnnnnnnnnnnnnnnnnnnnnnnnnnnnnnnnnnnnnnnnnnnnnnnnnnnnnnnnnnnnnnnnnnnnnnnnnnnnnnnnnnnnnnnnnnnnnnnnnnnnnnnnnnnnnnnnnnnnnnnnnnnnnnnnnnnnnnnnnnnnnnnnnnnnnnnnnnnnnnnnnnnnnnnnnnnnnnnnnnnnnnnnnnnnnnnnnnnnnnnnnnnnnnnnnnnnnnnnnnnnnnnnnnnnnnnnnnnnnnnnnnnnnnnnnnnnnnnnnnnnnnnnnnnnnnnnnnnnnnnnnnnnnnnnnnnnnnnnnnnnnnnnnnnnnnnnnnnnnnnnnnnnnnnnnnnnnnnnnnnnnnnnnnnnnnnnnnnnnnnnnnnnnnnnnnnnnnnnnnnnnnnnnnnnnnnnnnnnnnnnnnnnnnnnnnnnnnnnnnnnnnnnnnnnnnnnnnnnnnnnnnnnnnnnnnnnnnnnnnnnnnnnnnnnnnnnnnnnnnnnnnnnnnnnnnnnnnnnnnnnnnnnnnnnnnnnnnnnnnnnnnnnnnnnnnnnnnnnnnnnnnnnnnnnnnnnnnnnnnnnnnnnnnnnnnnnnnnnnnnnnnnnnnnnnnnnnnnnnnnnnnnnnnnnnnnnnnnnnnnnnnnnnnnnnnnnnnnnnnnnnnnnnnnnnnnnnnnnnnnnnnnnnnnnnnnnnnnnnnnnnnnnnnnnnnnnnnnnnnnnnnnnnnnnnnnnnnnnnnnnnnnnnnnnnnnnnnnnnnnnnnnnnnnnnnnnnnnnnnnnnnnnnnnnnnnnnnnnnnnnnnnnnnnnnnnnnnnnnnnnnnnnnnnnnnnnnnnnnnnnnnnnnnnnnnnnnnnnnnnnnnnnnnnnnnnnnnnnnnnnnnnnnnnnnnnnnnnnnnnnnnnnnnnnnnnnnnnnnnnnnnnnnnnnnnnnnnnnnnnnnnnnnnnnnnnnnnnnnnnnnnnnnnnnnnnnnnnnnnnnnnnnnnnnnnnnnnnnnnnnnnnnnnnnnnnnnnnnnnnnnnnnnnnnnnnnnnnnnnnnnnnnnnnnnnnnnnnnnnnnnnnnnnnnnnnnnnnnnnnnnnnnnnnnnnnnnnnnnnnnnnnnnnnnnnnnnnnnnnnnnnnnnnnnnnnnnnnnnnnnnnnnnnnnnnnnnnnnnnnnnnnnnnnnnnnnnnnnnnnnnnnnnnnnnnnnnnnnnnnnnnnnnnnnnnnnnnnnnnnnnnnnnnnnnnnnnnnnnnnnnnnnnnnnnnnnnnnnnnnnnnnnnnnnnnnnnnnnnnnnnnnnnnnnnnnnnnnnnnnnnnnnnnnnnnnnnnnnnnnnnnnnnnnnnnnnnnnnnnnnnnnnnnnnnnnnnnnnnnnnnnnnnnnnnnnnnnnnnnnnnnnnnnnnnnnnnnnnnnnnnnnnnnnnnnnnnnnnnnnnnnnnnnnnnnnnnnnnnnnnnnnnnnnnnnnnnnnnnnnnnnnnnnnnnnnnnnnnnnnnnnnnnnnnnnnnnnnnnnnnnnnnnnnnnnnnnnnnnnnnnnnnnnnnnnnnnnnnnnnnnnnnnnnnnnnnnnnnnnnnnnnnnnnnnnnnnnnnnnnnnnnnnnnnnnnnnnnnnnnnnnnnnnnnnnnnnnnnnnnnnnnnnnnnnnnnnnnnnnnnnnnnnnnnnnnnnnnnnnnnnnnnnnnnnnnnnnnnnnnnnnnnnnnnnnnnnnnnnnnnnnnnnnnnnnnnnnnnnnnnnnnnnnnnnnnnnnnnnnnnnnnnnnnnnnnnnnnnnnnnnnnnnnnnnnnnnnnnnnnnnnnnnnnnnnnnnnnnnnnnnnnnnnnnnnnnnnnnnnnnnnnnnnnnnnnnnnnnnnnnnnnnnnnnnnnnnnnnnnnnnnnnnnnnnnnnnnnnnnnnnnnnnnnnnnnnnnnnnnnnnnnnnnnnnnnnnnnnnnnnnnnnnnnnnnnnnnnnnnnnnnnnnnnnnnnnnnnnnnnnnnnnnnnnnnnnnnnnnnnnnnnnnnnnnnnnnnnnnnnnnnnnnnnnnnnnnnnnnnnnnnnnnnnnnnnnnnnnnnnnnnnnnnnnnnnnnnnnnnnnnnnnnnnnnnnnnnnnnnnnnnnnnnnnnnnnnnnnnnnnnnnnnnnnnnnnnnnnnnnnnnnnnnnnnnnnnnnnnnnnnnnnnnnnnnnnnnnnnnnnnnnnnnnnnnnnnnnnnnnnnnnnnnnnnnnnnnnnnnnnnnnnnnnnnnnnnnnnnnnnnnnnnnnnnnnnnnnnnnnnnnnnnnnnnnnnnnnnnnnnnnnnnnnnnnnnnnnnnnnnnnnnnnnnnnnnnnnnnnnnnnnnnnnnnnnnnnnnnnnnnnnnnnnnnnnnnnnnnnnnnnnnnnnnnnnnnnnnnnnnnnnnnnnnnnnnnnnnnnnnnnnnnnnnnnnnnnnnnnnnnnnnnnnnnnnnnnnnnnnnnnnnnnnnnnnnnnnnnnnnnnnnnnnnnnnnnnnnnnnnnnnnnnnnnnnnnnnnnnnnnnnnnnnnnnnnnnnnnnnnnnnnnnnnnnnnnnnnnnnnnnnnnnnnnnnnnnnnnnnnnnnnnnnnnnnnnnnnnnnnnnnnnnnnnnnnnnnnnnnnnnnnnnnnnnnnnnnnnnnnnnnnnnnnnnnnnnnnnnnnnnnnnnnnnnnnnnnnnnnnnnnnnnnnnnnnnnnnnnnnnnnnnnnnnnnnnnnnnnnnnnnnnnnnnnnnnnnnnnnnnnnnnnnnnnnnnnnnnnnnnnnnnnnnnnnnnnnnnnnnnnnnnnnnnnnnnnnnnnnnnnnnnnnnnnnnnnnnnnnnnnnnnnnnnnnnnnnnnnnnnnnnnnnnnnnnnnnnnnnnnnnnnnnnnnnnnnnnnnnnnnnnnnnnnnnnnnnnnnnnnnnnnnnnnnnnnnnnnnnnnnnnnnnnnnnnnnnnnnnnnnnnnnnnnnnnnnnnnnnnnnnnnnnnnnnnnnnnnnnnnnnnnnnnnnnnnnnnnnnnnnnnnnnnnnnnnnnnnnnnnnnnnnnnnnnnnnnnnnnnnnnnnnnnnnnnnnnnnnnnnnnnnnnnnnnnnnnnnnnnnnnnnnnnnnnnnnnnnnnnnnnnnnnnnnnnnnnnnnnnnnnnnnnnnnnnnnnnnnnnnnnnnnnnnnnnnnnnnnnnnnnnnnnnnnnnnnnnnnnnnnnnnnnnnnnnnnnnnnnnnnnnnnnnnnnnnnnnnnnnnnnnnnnnnnnnnnnnnnnnnnnnnnnnnnnnnnnnnnnnnnnnnnnnnnnnnnnnnnnnnnnnnnnnnnnnnnnnnnnnnnnnnnnnnnnnnnnnnnnnnnnnnnnnnnnnnnnnnnnnnnnnnnnnnnnnnnnnnnnnnnnnnnnnnnnnnnnnnnnnnnnnnnnnnnnnnnnnnnnnnnnnnnnnnnnnnnnnnnnnnnnnnnnnnnnnnnnnnnnnnnnnnnnnnnnnnnnnnnnnnnnnnnnnnnnnnnnnnnnnnnnnnnnnnnnnnnnnnnnnnnnnnnnnnnnnnnnnnnnnnnnnnnnnnnnnnnnnnnnnnnnnnnnnnnnnnnnnnnnnnnnnnnnnnnnnnnnnnnnnnnnnnnnnnnnnnnnnnnnnnnnnnnnnnnnnnnnnnnnnnnnnnnnnnnnnnnnnnnnnnnnnnnnnnnnnnnnnnnnnnnnnnnnnnnnnnnnnnnnnnnnnnnnnnnnnnnnnnnnnnnnnnnnnnnnnnnnnnnnnnnnnnnnnnnnnnnnnnnnnnnnnnnnnnnnnnnnnnnnnnnnnnnnnnnnnnnnnnnnnnnnnnnnnnnnnnnnnnnnnnnnnnnnnnnnnnnnnnnnnnnnnnnnnnnnnnnnnnnnnnnnnnnnnnnnnnnnnnnnnnnnnnnnnnnnnnnnnnnnnnnnnnnnnnnnnnnnnnnnnnnnnnnnnnnnnnnnnnnnnnnnnnnnnnnnnnnnnnnnnnnnnnnnnnnnnnnnnnnnnnnnnnnnnnnnnnnnnnnnnnnnnnnnnnnnnnnnnnnnnnnnnnnnnnnnnnnnnnnnnnnnnnnnnnnnnnnnnnnnnnnnnnnnnnnnnnnnnnnnnnnnnnnnnnnnnnnnnnnnnnnnnnnnnnnnnnnnnnnnnnnnnnnnnnnnnnnnnnnnnnnnnnnnnnnnnnnnnnnnnnnnnnnnnnnnnnnnnnnnnnnnnnnnnnnnnnnnnnnnnnnnnnnnnnnnnnnnnnnnnnnnnnnnnnnnnnnnnnnnnnnnnnnnnnnnnnnnnnnnnnnnnnnnnnnnnnnnnnnnnnnnnnnnnnnnnnnnnnnnnnnnnnnnnnnnnnnnnnnnnnnnnnnnnnnnnnnnnnnnnnnnnnnnnnnnnnnnnnnnnnnnnnnnnnnnnnnnnnnnnnnnnnnnnnnnnnnnnnnnnnnnnnnnnnnnnnnnnnnnnnnnnnnnnnnnnnnnnnnnnnnnnnnnnnnnnnnnnnnnnnnnnnnnnnnnnnnnnnnnnnnnnnnnnnnnnnnnnnnnnnnnnnnnnnnnnnnnnnnnnnnnnnnnnnnnnnnnnnnnnnnnnnnnnnnnnnnnnnnnnnnnnnnnnnnnnnnnnnnnnnnnnnnnnnnnnnnnnnnnnnnnnnnnnnnnnnnnnnnnnnnnnnnnnnnnnnnnnnnnnnnnnnnnnnnnnnnnnnnnnnnnnnnnnnnnnnnnnnnnnnnnnnnnnnnnnnnnnnnnnnnnnnnnnnnnnnnnnnnnnnnnnnnnnnnnnnnnnnnnnnnnnnnnnnnnnnnnnnnnnnnnnnnnnnnnnnnnnnnnnnnnnnnnnnnnnnnnnnnnnnnnnnnnnnnnnnnnnnnnnnnnnnnnnnnnnnnnnnnnnnnnnnnnnnnnnnnnnnnnnnnnnnnnnnnnnnnnnnnnnnnnnnnnnnnnnnnnnnnnnnnnnnnnnnnnnnnnnnnnnnnnnnnnnnnnnnnnnnnnnnnnnnnnnnnnnnnnnnnnnnnnnnnnnnnnnnnnnnnnnnnnnnnnnnnnnnnnnnnnnnnnnnnnnnnnnnnnnnnnnnnnnnnnnnnnnnnnnnnnnnnnnnnnnnnnnnnnnnnnnnnnnnnnnnnnnnnnnnnnnnnnnnnnnnnnnnnnnnnnnnnnnnnnnnnnnnnnnnnnnnnnnnnnnnnnnnnnnnnnnnnnnnnnnnnnnnnnnnnnnnnnnnnnnnnnnnnnnnnnnnnnnnnnnnnnnnnnnnnnnnnnnnnnnnnnnnnnnnnnnnnnnnnnnnnnnnnnnnnnnnnnnnnnnnnnnnnnnnnnnnnnnnnnnnnnnnnnnnnnnnnnnnnnnnnnnnnnnnnnnnnnnnnnnnnnnnnnnnnnnnnnnnnnnnnnnnnnnnnnnnnnnnnnnnnnnnnnnnnnnnnnnnnnnnnnnnnnnnnnnnnnnnnnnnnnnnnnnnnnnnnnnnnnnnnnnnnnnnnnnnnnnnnnnnnnnnnnnnnnnnnnnnnnnnnnnnnnnnnnnnnnnnnnnnnnnnnnnnnnnnnnnnnnnnnnnnnnnnnnnnnnnnnnnnnnnnnnnnnnnnnnnnnnnnnnnnnnnnnnnnnnnnnnnnnnnnnnnnnnnnnnnnnnnnnnnnnnnnnnnnnnnnnnnnnnnnnnnnnnnnnnnnnnnnnnnnnnnnnnnnnnnnnnnnnnnnnnnnnnnnnnnnnnnnnnnnnnnnnnnnnnnnnnnnnnnnnnnnnnnnnnnnnnnnnnnnnnnnnnnnnnnnnnnnnnnnnnnnnnnnnnnnnnnnnnnnnnnnnnnnnnnnnnnnnnnnnnnnnnnnnnnnnnnnnnnnnnnnnnnnnnnnnnnnnnnnnnnnnnnnnnnnnnnnnnnnnnnnnnnnnnnnnnnnnnnnnnnnnnnnnnnnnnnnnnnnnnnnnnnnnnnnnnnnnnnnnnnnnnnnnnnnnnnnnnnnnnnnnnnnnnnnnnnnnnnnnnnnnnnnnnnnnnnnnnnnnnnnnnnnnnnnnnnnnnnnnnnnnnnnnnnnnnnnnnnnnnnnnnnnnnnnnnnnnnnnnnnnnnnnnnnnnnnnnnnnnnnnnnnnnnnnnnnnnnnnnnnnnnnnnnnnnnnnnnnnnnnnnnnnnnnnnnnnnnnnnnnnnnnnnnnnnnnnnnnnnnnnnnnnnnnnnnnnnnnnnnnnnnnnnnnnnnnnnnnnnnnnnnnnnnnnnnnnnnnnnnnnnnnnnnnnnnnnnnnnnnnnnnnnnnnnnnnnnnnnnnnnnnnnnnnnnnnnnnnnnnnnnnnnnnnnnnnnnnnnnnnnnnnnnnnnnnnnnnnnnnnnnnnnnnnnnnnnnnnnnnnnnnnnnnnnnnnnnnnnnnnnnnnnnnnnnnnnnnnnnnnnnnnnnnnnnnnnnnnnnnnnnnnnnnnnnnnnnnnnnnnnnnnnnnnnnnnnnnnnnnnnnnnnnnnnnnnnnnnnnnnnnnnnnnnnnnnnnnnnnnnnnnnnnnnnnnnnnnnnnnnnnnnnnnnnnnnnnnnnnnnnnnnnnnnnnnnnnnnnnnnnnnnnnnnnnnnnnnnnnnnnnnnnnnnnnnnnnnnnnnnnnnnnnnnnnnnnnnnnnnnnnnnnnnnnnnnnnnnnnnnnnnnnnnnnnnnnnnnnnnnnnnnnnnnnnnnnnnnnnnnnnnnnnnnnnnnnnnnnnnnnnnnnnnnnnnnnnnnnnnnnnnnnnnnnnnnnnnnnnnnnnnnnnnnnnnnnnnnnnnnnnnnnnnnnnnnnnnnnnnnnnnnnnnnnnnnnnnnnnnnnnnnnnnnnnnnnnnnnnnnnnnnnnnnnnnnnnnnnnnnnnnnnnnnnnnnnnnnnnnnnnnnnnnnnnnnnnnnnnnnnnnnnnnnnnnnnnnnnnnnnnnnnnnnnnnnnnnnnnnnnnnnnnnnnnnnnnnnnnnnnnnnnnnnnnnnnnnnnnnnnnnnnnnnnnnnnnnnnnnnnnnnnnnnnnnnnnnnnnnnnnnnnnnnnnnnnnnnnnnnnnnnnnnnnnnnnnnnnnnnnnnnnnnnnnnnnnnnnnnnnnnnnnnnnnnnnnnnnnnnnnnnnnnnnnnnnnnnnnnnnnnnnnnnnnnnnnnnnnnnnnnnnnnnnnnnnnnnnnnnnnnnnnnnnnnnnnnnnnnnnnnnnnnnnnnnnnnnnnnnnnnnnnnnnnnnnnnnnnnnnnnnnnnnnnnnnnnnnnnnnnnnnnnnnnnnnnnnnnnnnnnnnnnnnnnnnnnnnnnnnnnnnnnnnnnnnnnnnnnnnnnnnnnnnnnnnnnnnnnnnnnnnnnnnnnnnnnnnnnnnnnnnnnnnnnnnnnnnnnnnnnnnnnnnnnnnnnnnnnnnnnnnnnnnnnnnnnnnnnnnnnnnnnnnnnnnnnnnnnnnnnnnnnnnnnnnnnnnnnnnnnnnnnnnnnnnnnnnnnnnnnnnnnnnnnnnnnnnnnnnnnnnnnnnnnnnnnnnnnnnnnnnnnnnnnnnnnnnnnnnnnnnnnnnnnnnnnnnnnnnnnnnnnnnnnnnnnnnnnnnnnnnnnnnnnnnnnnnnnnnnnnnnnnnnnnnnnnnnnnnnnnnnnnnnnnnnnnnnnnnnnnnnnnnnnnnnnnnnnnnnnnnnnnnnnnnnnnnnnnnnnnnnnnnnnnnnnnnnnnnnnnnnnnnnnnnnnnnnnnnnnnnnnnnnnnnnnnnnnnnnnnnnnnnnnnnnnnnnnnnnnnnnnnnnnnnnnnnnnnnnnnnnnnnnnnnnnnnnnnnnnnnnnnnnnnnnnnnnnnnnnnnnnnnnnnnnnnnnnnnnnnnnnnnnnnnnnnnnnnnnnnnnnnnnnnnnnnnnnnnnnnnnnnnnnnnnnnnnnnnnnnnnnnnnnnnnnnnnnnnnnnnnnnnnnnnnnnnnnnnnnnnnnnnnnnnnnnnnnnnnnnnnnnnnnnnnnnnnnnnnnnnnnnnnnnnnnnnnnnnnnnnnnnnnnnnnnnnnnnnnnnnnnnnnnnnnnnnnnnnnnnnnnnnnnnnnnnnnnnnnnnnnnnnnnnnnnnnnnnnnnnnnnnnnnnnnnnnnnnnnnnnnnnnnnnnnnnnnnnnnnnnnnnnnnnnnnnnnnnnnnnnnnnnnnnnnnnnnnnnnnnnnnnnnnnnnnnnnnnnnnnnnnnnnnnnnnnnnnnnnnnnnnnnnnnnnnnnnnnnnnnnnnnnnnnnnnnnnnnnnnnnnnnnnnnnnnnnnnnnnnnnnnnnnnnnnnnnnnnnnnnnnnnnnnnnnnnnnnnnnnnnnnnnnnnnnnnnnnnnnnnnnnnnnnnnnnnnnnnnnnnnnnnnnnnnnnnnnnnnnnnnnnnnnnnnnnnnnnnnnnnnnnnnnnnnnnnnnnnnnnnnnnnnnnnnnnnnnnnnnnnnnnnnnnnnnnnnnnnnnnnnnnnnnnnnnnnnnnnnnnnnnnnnnnnnnnnnnnnnnnnnnnnnnnnnnnnnnnnnnnnnnnnnnnnnnnnnnnnnnnnnnnnnnnnnnnnnnnnnnnnnnnnnnnnnnnnnnnnnnnnnnnnnnnnnnnnnnnnnnnnnnnnnnnnnnnnnnnnnnnnnnnnnnnnnnnnnnnnnnnnnnnnnnnnnnnnnnnnnnnnnnnnnnnnnnnnnnnnnnnnnnnnnnnnnnnnnnnnnnnnnnnnnnnnnnnnnnnnnnnnnnnnnnnnnnnnnnnnnnnnnnnnnnnnnnnnnnnnnnnnnnnnnnnnnnnnnnnnnnnnnnnnnnnnnnnnnnnnnnnnnnnnnnnnnnnnnnnnnnnnnnnnnnnnnnnnnnnnnnnnnnnnnnnnnnnnnnnnnnnnnnnnnnnnnnnnnnnnnnnnnnnnnnnnnnnnnnnnnnnnnnnnnnnnnnnnnnnnnnnnnnnnnnnnnnnnnnnnnnnnnnnnnnnnnnnnnnnnnnnnnnnnnnnnnnnnnnnnnnnnnnnnnnnnnnnnnnnnnnnnnnnnnnnnnnnnnnnnnnnnnnnnnnnnnnnnnnnnnnnnnnnnnnnnnnnnnnnnnnnnnnnnnnnnnnnnnnnnnnnnnnnnnnnnnnnnnnnnnnnnnnnnnnnnnnnnnnnnnnnnnnnnnnnnnnnnnnnnnnnnnnnnnnnnnnnnnnnnnnnnnnnnnnnnnnnnnnnnnnnnnnnnnnnnnnnnnnnnnnnnnnnnnnnnnnnnnnnnnnnnnnnnnnnnnnnnnnnnnnnnnnnnnnnnnnnnnnnnnnnnnnnnnnnnnnnnnnnnnnnnnnnnnnnnnnnnnnnnnnnnnnnnnnnnnnnnnnnnnnnnnnnnnnnnnnnnnnnnnnnnnnnnnnnnnnnnnnnnnnnnnnnnnnnnnnnnnnnnnnnnnnnnnnnnnnnnnnnnnnnnnnnnnnnnnnnnnnnnnnnnnnnnnnnnnnnnnnnnnnnnnnnnnnnnnnnnnnnnnnnnnnnnnnnnnnnnnnnnnnnnnnnnnnnnnnnnnnnnnnnnnnnnnnnnnnnnnnnnnnnnnnnnnnnnnnnnnnnnnnnnnnnnnnnnnnnnnnnnnnnnnnnnnnnnnnnnnnnnnnnnnnnnnnnnnnnnnnnnnnnnnnnnnnnnnnnnnnnnnnnnnnnnnnnnnnnnnnnnnnnnnnnnnnnnnnnnnnnnnnnnnnnnnnnnnnnnnnnnnnnnnnnnnnnnnnnnnnnnnnnnnnnnnnnnnnnnnnnnnnnnnnnnnnnnnnnnnnnnnnnnnnnnnnnnnnnnnnnnnnnnnnnnnnnnnnnnnnnnnnnnnnnnnnnnnnnnnnnnnnnnnnnnnnnnnnnnnnnnnnnnnnnnnnnnnnnnnnnnnnnnnnnnnnnnnnnnnnnnnnnnnnnnnnnnnnnnnnnnnnnnnnnnnnnnnnnnnnnnnnnnnnnnnnnnnnnnnnnnnnnnnnnnnnnnnnnnnnnnnnnnnnnnnnnnnnnnnnnnnnnnnnnnnnnnnnnnnnnnnnnnnnnnnnnnnnnnnnnnnnnnnnnnnnnnnnnnnnnnnnnnnnnnnnnnnnnnnnnnnnnnnnnnnnnnnnnnnnnnnnnnnnnnnnnnnnnnnnnnnnnnnnnnnnnnnnnnnnnnnnnnnnnnnnnnnnnnnnnnnnnnnnnnnnnnnnnnnnnnnnnnnnnnnnnnnnnnnnnnnnnnnnnnnnnnnnnnnnnnnnnnnnnnnnnnnnnnnnnnnnnnnnnnnnnnnnnnnnnnnnnnnnnnnnnnnnnnnnnnnnnnnnnnnnnnnnnnnnnnnnnnnnnnnnnnnnnnnnnnnnnnnnnnnnnnnnnnnnnnnnnnnnnnnnnnnnnnnnnnnnnnnnnnnnnnnnnnnnnnnnnnnnnnnnnnnnnnnnnnnnnnnnnnnnnnnnnnnnnnnnnnnnnnnnnnnnnnnnnnnnnnnnnnnnnnnnnnnnnnnnnnnnnnnnnnnnnnnnnnnnnnnnnnnnnnnnnnnnnnnnnnnnnnnnnnnnnnnnnnnnnnnnnnnnnnnnnnnnnnnnnnnnnnnnnnnnnnnnnnnnnnnnnnnnnnnnnnnnnnnnnnnnnnnnnnnnnnnnnnnnnnnnnnnnnnnnnnnnnnnnnnnnnnnnnnnnnnnnnnnnnnnnnnnnnnnnnnnnnnnnnnnnnnnnnnnnnnnnnnnnnnnnnnnnnnnnnnnnnnnnnnnnnnnnnnnnnnnnnnnnnnnnnnnnnnnnnnnnnnnnnnnnnnnnnnnnnnnnnnnnnnnnnnnnnnnnnnnnnnnnnnnnnnnnnnnnnnnnnnnnnnnnnnnnnnnnnnnnnnnnnnnnnnnnnnnnnnnnnnnnnnnnnnnnnnnnnnnnnnnnnnnnnnnnnnnnnnnnnnnnnnnnnnnnnnnnnnnnnnnnnnnnnnnnnnnnnnnnnnnnnnnnnnnnnnnnnnnnnnnnnnnnnnnnnnnnnnnnnnnnnnnnnnnnnnnnnnnnnnnnnnnnnnnnnnnnnnnnnnnnnnnnnnnnnnnnnnnnnnnnnnnnnnnnnnnnnnnnnnnnnnnnnnnnnnnnnnnnnnnnnnnnnnnnnnnnnnnnnnnnnnnnnnnnnnnnnnnnnnnnnnnnnnnnnnnnnnnnnnnnnnnnnnnnnnnnnnnnnnnnnnnnnnnnnnnnnnnnnnnnnnnnnnnnnnnnnnnnnnnnnnnnnnnnnnnnnnnnnnnnnnnnnnnnnnnnnnnnnnnnnnnnnnnnnnnnnnnnnnnnnnnnnnnnnnnnnnnnnnnnnnnnnnnnnnnnnnnnnnnnnnnnnnnnnnnnnnnnnnnnnnnnnnnnnnnnnnnnnnnnnnnnnnnnnnnnnnnnnnnnnnnnnnnnnnnnnnnnnnnnnnnnnnnnnnnnnnnnnnnnnnnnnnnnnnnnnnnnnnnnnnnnnnnnnnnnnnnnnnnnnnnnnnnnnnnnnnnnnnnnnnnnnnnnnnnnnnnnnnnnnnnnnnnnnnnnnnnnnnnnnnnnnnnnnnnnnnnnnnnnnnnnnnnnnnnnnnnnnnnnnnnnnnnnnnnnnnnnnnnnnnnnnnnnnnnnnnnnnnnnnnnnnnnnnnnnnnnnnnnnnnnnnnnnnnnnnnnnnnnnnnnnnnnnnnnnnnnnnnnnnnnnnnnnnnnnnnnnnnnnnnnnnnnnnnnnnnnnnnnnnnnnnnnnnnnnnnnnnnnnnnnnnnnnnnnnnnnnnnnnnnnnnnnnnnnnnnnnnnnnnnnnnnnnnnnnnnnnnnnnnnnnnnnnnnnnnnnnnnnnnnnnnnnnnnnnnnnnnnnnnnnnnnnnnnnnnnnnnnnnnnnnnnnnnnnnnnnnnnnnnnnnnnnnnnnnnnnnnnnnnnnnnnnnnnnnnnnnnnnnnnnnnnnnnnnnnnnnnnnnnnnnnnnnnnnnnnnnnnnnnnnnnnnnnnnnnnnnnnnnnnnnnnnnnnnnnnnnnnnnnnnnnnnnnnnnnnnnnnnnnnnnnnnnnnnnnnnnnnnnnnnnnnnnnnnnnnnnnnnnnnnnnnnnnnnnnnnnnnnnnnnnnnnnnnnnnnnnnnnnnnnnnnnnnnnnnnnnnnnnnnnnnnnnnnnnnnnnnnnnnnnnnnnnnnnnnnnnnnnnnnnnnnnnnnnnnnnnnnnnnnnnnnnnnnnnnnnnnnnnnnnnnnnnnnnnnnnnnnnnnnnnnnnnnnnnnnnnnnnnnnnnnnnnnnnnnnnnnnnnnnnnnnnnnnnnnnnnnnnnnnnnnnnnnnnnnnnnnnnnnnnnnnnnnnnnnnnnnnnnnnnnnnnnnnnnnnnnnnnnnnnnnnnnnnnnnnnnnnnnnnnnnnnnnnnnnnnnnnnnnnnnnnnnnnnnnnnnnnnnnnnnnnnnnnnnnnnnnnnnnnnnnnnnnnnnnnnnnnnnnnnnnnnnnnnnnnnnnnnnnnnnnnnnnnnnnnnnnnnnnnnnnnnnnnnnnnnnnnnnnnnnnnnnnnnnnnnnnnnnnnnnnnnnnnnnnnnnnnnnnnnnnnnnnnnnnnnnnnnnnnnnnnnnnnnnnnnnnnnnnnnnnnnnnnnnnnnnnnnnnnnnnnnnnnnnnnnnnnnnnnnnnnnnnnnnnnnnnnnnnnnnnnnnnnnnnnnnnnnnnnnnnnnnnnnnnnnnnnnnnnnnnnnnnnnnnnnnnnnnnnnnnnnnnnnnnnnnnnnnnnnnnnnnnnnnnnnnnnnnnnnnnnnnnnnnnnnnnnnnnnnnnnnnnnnnnnnnnnnnnnnnnnnnnnnnnnnnnnnnnnnnnnnnnnnnnnnnnnnnnnnnnnnnnnnnnnnnnnnnnnnnnnnnnnnnnnnnnnnnnnnnnnnnnnnnnnnnnnnnnnnnnnnnnnnnnnnnnnnnnnnnnnnnnnnnnnnnnnnnnnnnnnnnnnnnnnnnnnnnnnnnnnnnnnnnnnnnnnnnnnnnnnnnnnnnnnnnnnnnnnnnnnnnnnnnnnnnnnnnnnnnnnnnnnnnnnnnnnnnnnnnnnnnnnnnnnnnnnnnnnnnnnnnnnnnnnnnnnnnnnnnnnnnnnnnnnnnnnnnnnnnnnnnnnnnnnnnnnnnnnnnnnnnnnnnnnnnnnnnnnnnnnnnnnnnnnnnnnnnnnnnnnnnnnnnnnnnnnnnnnnnnnnnnnnnnnnnnnnnnnnnnnnnnnnnnnnnnnnnnnnnnnnnnnnnnnnnnnnnnnnnnnnnnnnnnnnnnnnnnnnnnnnnnnnnnnnnnnnnnnnnnnnnnnnnnnnnnnnnnnnnnnnnnnnnnnnnnnnnnnnnnnnnnnnnnnnnnnnnnnnnnnnnnnnnnnnnnnnnnnnnnnnnnnnnnnnnnnnnnnnnnnnnnnnnnnnnnnnnnnnnnnnnnnnnnnnnnnnnnnnnnnnnnnnnnnnnnnnnnnnnnnnnnnnnnnnnnnnnnnnnnnnnnnnnnnnnnnnnnnnnnnnnnnnnnnnnnnnnnnnnnnnnnnnnnnnnnnnnnnnnnnnnnnnnnnnnnnnnnnnnnnnnnnnnnnnnnnnnnnnnnnnnnnnnnnnnnnnnnnnnnnnnnnnnnnnnnnnnnnnnnnnnnnnnnnnnnnnnnnnnnnnnnnnnnnnnnnnnnnnnnnnnnnnnnnnnnnnnnnnnnnnnnnnnnnnnnnnnnnnnnnnnnnnnnnnnnnnnnnnnnnnnnnnnnnnnnnnnnnnnnnnnnnnnnnnnnnnnnnnnnnnnnnnnnnnnnnnnnnnnnnnnnnnnnnnnnnnnnnnnnnnnnnnnnnnnnnnnnnnnnnnnnnnnnnnnnnnnnnnnnnnnnnnnnnnnnnnnnnnnnnnnnnnnnnnnnnnnnnnnnnnnnnnnnnnnnnnnnnnnnnnnnnnnnnnnnnnnnnnnnnnnnnnnnnnnnnnnnnnnnnnnnnnnnnnnnnnnnnnnnnnnnnnnnnnnnnnnnnnnnnnnnnnnnnnnnnnnnnnnnnnnnnnnnnnnnnnnnnnnnnnnnnnnnnnnnnnnnnnnnnnnnnnnnnnnnnnnnnnnnnnnnnnnnnnnnnnnnnnnnnnnnnnnnnnnnnnnnnnnnnnnnnnnnnnnnnnnnnnnnnnnnnnnnnnnnnnnnnnnnnnnnnnnnnnnnnnnnnnnnnnnnnnnnnnnnnnnnnnnnnnnnnnnnnnnnnnnnnnnnnnnnnnnnnnnnnnnnnnnnnnnnnnnnnnnnnnnnnnnnnnnnnnnnnnnnnnnnnnnnnnnnnnnnnnnnnnnnnnnnnnnnnnnnnnnnnnnnnnnnnnnnnnnnnnnnnnnnnnnnnnnnnnnnnnnnnnnnnnnnnnnnnnnnnnnnnnnnnnnnnnnnnnnnnnnnnnnnnnnnnnnnnnnnnnnnnnnnnnnnnnnnnnnnnnnnnnnnnnnnnnnnnnnnnnnnnnnnnnnnnnnnnnnnnnnnnnnnnnnnnnnnnnnnnnnnnnnnnnnnnnnnnnnnnnnnnnnnnnnnnnnnnnnnnnnnnnnnnnnnnnnnnnnnnnnnnnnnnnnnnnnnnnnnnnnnnnnnnnnnnnnnnnnnnnnnnnnnnnnnnnnnnnnnnnnnnnnnnnnnnnnnnnnnnnnnnnnnnnnnnnnnnnnnnnnnnnnnnnnnnnnnnnnnnnnnnnnnnnnnnnnnnnnnnnnnnnnnnnnnnnnnnnnnnnnnnnnnnnnnnnnnnnnnnnnnnnnnnnnnnnnnnnnnnnnnnnnnnnnnnnnnnnnnnnnnnnnnnnnnnnnnnnnnnnnnnnnnnnnnnnnnnnnnnnnnnnnnnnnnnnnnnnnnnnnnnnnnnnnnnnnnnnnnnnnnnnnnnnnnnnnnnnnnnnnnnnnnnnnnnnnnnnnnnnnnnnnnnnnnnnnnnnnnnnnnnnnnnnnnnnnnnnnnnnnnnnnnnnnnnnnnnnnnnnnnnnnnnnnnnnnnnnnnnnnnnnnnnnnnnnnnnnnnnnnnnnnnnnnnnnnnnnnnnnnnnnnnnnnnnnnnnnnnnnnnnnnnnnnnnnnnnnnnnnnnnnnnnnnnnnnnnnnnnnnnnnnnnnnnnnnnnnnnnnnnnnnnnnnnnnnnnnnnnnnnnnnnnnnnnnnnnnnnnnnnnnnnnnnnnnnnnnnnnnnnnnnnnnnnnnnnnnnnnnnnnnnnnnnnnnnnnnnnnnnnnnnnnnnnnnnnnnnnnnnnnnnnnnnnnnnnnnnnnnnnnnnnnnnnnnnnnnnnnnnnnnnnnnnnnnnnnnnnnnnnnnnnnnnnnnnnnnnnnnnnnnnnnnnnnnnnnnnnnnnnnnnnnnnnnnnnnnnnnnnnnnnnnnnnnnnnnnnnnnnnnnnnnnnnnnnnnnnnnnnnnnnnnnnnnnnnnnnnnnnnnnnnnnnnnnnnnnnnnnnnnnnnnnnnnnnnnnnnnnnnnnnnnnnnnnnnnnnnnnnnnnnnnnnnnnnnnnnnnnnnnnnnnnnnnnnnnnnnnnnnnnnnnnnnnnnnnnnnnnnnnnnnnnnnnnnnnnnnnnnnnnnnnnnnnnnnnnnnnnnnnnnnnnnnnnnnnnnnnnnnnnnnnnnnnnnnnnnnnnnnnnnnnnnnnnnnnnnnnnnnnnnnnnnnnnnnnnnnnnnnnnnnnnnnnnnnnnnnnnnnnnnnnnnnnnnnnnnnnnnnnnnnnnnnnnnnnnnnnnnnnnnnnnnnnnnnnnnnnnnnnnnnnnnnnnnnnnnnnnnnnnnnnnnnnnnnnnnnnnnnnnnnnnnnnnnnnnnnnnnnnnnnnnnnnnnnnnnnnnnnnnnnnnnnnnnnnnnnnnnnnnnnnnnnnnnnnnnnnnnnnnnnnnnnnnnnnnnnnnnnnnnnnnnnnnnnnnnnnnnnnnnnnnnnnnnnnnnnnnnnnnnnnnnnnnnnnnnnnnnnnnnnnnnnnnnnnnnnnnnnnnnnnnnnnnnnnnnnnnnnnnnnnnnnnnnnnnnnnnnnnnnnnnnnnnnnnnnnnnnnnnnnnnnnnnnnnnnnnnnnnnnnnnnnnnnnnnnnnnnnnnnnnnnnnnnnnnnnnnnnnnnnnnnnnnnnnnnnnnnnnnnnnnnnnnnnnnnnnnnnnnnnnnnnnnnnnnnnnnnnnnnnnnnnnnnnnnnnnnnnnnnnnnnnnnnnnnnnnnnnnnnnnnnnnnnnnnnnnnnnnnnnnnnnnnnnnnnnnnnnnnnnnnnnnnnnnnnnnnnnnnnnnnnnnnnnnnnnnnnnnnnnnnnnnnnnnnnnnnnnnnnnnnnnnnnnnnnnnnnnnnnnnnnnnnnnnnnnnnnnnnnnnnnnnnnnnnnnnnnnnnnnnnnnnnnnnnnnnnnnnnnnnnnnnnnnnnnnnnnnnnnnnnnnnnnnnnnnnnnnnnnnnnnnnnnnnnnnnnnnnnnnnnnnnnnnnnnnnnnnnnnnnnnnnnnnnnnnnnnnnnnnnnnnnnnnnnnnnnnnnnnnnnnnnnnnnnnnnnnnnnnnnnnnnnnnnnnnnnnnnnnnnnnnnnnnnnnnnnnnnnnnnnnnnnnnnnnnnnnnnnnnnnnnnnnnnnnnnnnnnnnnnnnnnnnnnnnnnnnnnnnnnnnnnnnnnnnnnnnnnnnnnnnnnnnnnnnnnnnnnnnnnnnnnnnnnnnnnnnnnnnnnnnnnnnnnnnnnnnnnnnnnnnnnnnnnnnnnnnnnnnnnnnnnnnnnnnnnnnnnnnnnnnnnnnnnnnnnnnnnnnnnnnnnnnnnnnnnnnnnnnnnnnnnnnnnnnnnnnnnnnnnnnnnnnnnnnnnnnnnnnnnnnnnnnnnnnnnnnnnnnnnnnnnnnnnnnnnnnnnnnnnnnnnnnnnnnnnnnnnnnnnnnnnnnnnnnnnnnnnnnnnnnnnnnnnnnnnnnnnnnnnnnnnnnnnnnnnnnnnnnnnnnnnnnnnnnnnnnnnnnnnnnnnnnnnnnnnnnnnnnnnnnnnnnnnnnnnnnnnnnnnnnnnnnnnnnnnnnnnnnnnnnnnnnnnnnnnnnnnnnnnnnnnnnnnnnnnnnnnnnnnnnnnnnnnnnnnnnnnnnnnnnnnnnnnnnnnnnnnnnnnnnnnnnnnnnnnnnnnnnnnnnnnnnnnnnnnnnnnnnnnnnnnnnnnnnnnnnnnnnnnnnnnnnnnnnnnnnnnnnnnnnnnnnnnnnnnnnnnnnnnnnnnnnnnnnnnnnnnnnnnnnnnnnnnnnnnnnnnnnnnnnnnnnnnnnnnnnnnnnnnnnnnnnnnnnnnnnnnnnnnnnnnnnnnnnnnnnnnnnnnnnnnnnnnnnnnnnnnnnnnnnnnnnnnnnnnnnnnnnnnnnnnnnnnnnnnnnnnnnnnnnnnnnnnnnnnnnnnnnnnnnnnnnnnnnnnnnnnnnnnnnnnnnnnnnnnnnnnnnnnnnnnnnnnnnnnnnnnnnnnnnnnnnnnnnnnnnnnnnnnnnnnnnnnnnnnnnnnnnnnnnnnnnnnnnnnnnnnnnnnnnnnnnnnnnnnnnnnnnnnnnnnnnnnnnnnnnnnnnnnnnnnnnnnnnnnnnnnnnnnnnnnnnnnnnnnnnnnnnnnnnnnnnnnnnnnnnnnnnnnnnnnnnnnnnnnnnnnnnnnnnnnnnnnnnnnnnnnnnnnnnnnnnnnnnnnnnnnnnnnnnnnnnnnnnnnnnnnnnnnnnnnnnnnnnnnnnnnnnnnnnnnnnnnnnnnnnnnnnnnnnnnnnnnnnnnnnnnnnnnnnnnnnnnnnnnnnnnnnnnnnnnnnnnnnnnnnnnnnnnnnnnnnnnnnnnnnnnnnnnnnnnnnnnnnnnnnnnnnnnnnnnnnnnnnnnnnnnnnnnnnnnnnnnnnnnnnnnnnnnnnnnnnnnnnnnnnnnnnnnnnnnnnnnnnnnnnnnnnnnnnnnnnnnnnnnnnnnnnnnnnnnnnnnnnnnnnnnnnnnnnnnnnnnnnnnnnnnnnnnnnnnnnnnnnnnnnnnnnnnnnnnnnnnnnnnnnnnnnnnnnnnnnnnnnnnnnnnnnnnnnnnnnnnnnnnnnnnnnnnnnnnnnnnnnnnnnnnnnnnnnnnnnnnnnnnnnnnnnnnnnnnnnnnnnnnnnnnnnnnnnnnnnnnnnnnnnnnnnnnnnnnnnnnnnnnnnnnnnnnnnnnnnnnnnnnnnnnnnnnnnnnnnnnnnnnnnnnnnnnnnnnnnnnnnnnnnnnnnnnnnnnnnnnnnnnnnnnnnnnnnnnnnnnnnnnnnnnnnnnnnnnnnnnnnnnnnnnnnnnnnnnnnnnnnnnnnnnnnnnnnnnnnnnnnnnnnnnnnnnnnnnnnnnnnnnnnnnnnnnnnnnnnnnnnnnnnnnnnnnnnnnnnnnnnnnnnnnnnnnnnnnnnnnnnnnnnnnnnnnnnnnnnnnnnnnnnnnnnnnnnnnnnnnnnnnnnnnnnnnnnnnnnnnnnnnnnnnnnnnnnnnnnnnnnnnnnnnnnnnnnnnnnnnnnnnnnnnnnnnnnnnnnnnnnnnnnnnnnnnnnnnnnnnnnnnnnnnnnnnnnnnnnnnnnnnnnnnnnnnnnnnnnnnnnnnnnnnnnnnnnnnnnnnnnnnnnnnnnnnnnnnnnnnnnnnnnnnnnnnnnnnnnnnnnnnnnnnnnnnnnnnnnnnnnnnnnnnnnnnnnnnnnnnnnnnnnnnnnnnnnnnnnnnnnnnnnnnnnnnnnnnnnnnnnnnnnnnnnnnnnnnnnnnnnnnnnnnnnnnnnnnnnnnnnnnnnnnnnnnnnnnnnnnnnnnnnnnnnnnnnnnnnnnnnnnnnnnnnnnnnnnnnnnnnnnnnnnnnnnnnnnnnnnnnnnnnnnnnnnnnnnnnnnnnnnnnnnnnnnnnnnnnnnnnnnnnnnnnnnnnnnnnnnnnnnnnnnnnnnnnnnnnnnnnnnnnnnnnnnnnnnnnnnnnnnnnnnnnnnnnnnnnnnnnnnnnnnnnnnnnnnnnnnnnnnnnnnnnnnnnnnnnnnnnnnnnnnnnnnnnnnnnnnnnnnnnnnnnnnnnnnnnnnnnnnnnnnnnnnnnnnnnnnnnnnnnnnnnnnnnnnnnnnnnnnnnnnnnnnnnnnnnnnnnnnnnnnnnnnnnnnnnnnnnnnnnnnnnnnnnnnnnnnnnnnnnnnnnnnnnnnnnnnnnnnnnnnnnnnnnnnnnnnnnnnnnnnnnnnnnnnnnnnnnnnnnnnnnnnnnnnnnnnnnnnnnnnnnnnnnnnnnnnnnnnnnnnnnnnnnnnnnnnnnnnnnnnnnnnnnnnnnnnnnnnnnnnnnnnnnnnnnnnnnnnnnnnnnnnnnnnnnnnnnnnnnnnnnnnnnnnnnnnnnnnnnnnnnnnnnnnnnnnnnnnnnnnnnnnnnnnnnnnnnnnnnnnnnnnnnnnnnnnnnnnnnnnnnnnnnnnnnnnnnnnnnnnnnnnnnnnnnnnnnnnnnnnnnnnnnnnnnnnnnnnnnnnnnnnnnnnnnnnnnnnnnnnnnnnnnnnnnnnnnnnnnnnnnnnnnnnnnnnnnnnnnnnnnnnnnnnnnnnnnnnnnnnnnnnnnnnnnnnnnnnnnnnnnnnnnnnnnnnnnnnnnnnnnnnnnnnnnnnnnnnnnnnnnnnnnnnnnnnnnnnnnnnnnnnnnnnnnnnnnnnnnnnnnnnnnnnnnnnnnnnnnnnnnnnnnnnnnnnnnnnnnnnnnnnnnnnnnnnnnnnnnnnnnnnnnnnnnnnnnnnnnnnnnnnnnnnnnnnnnnnnnnnnnnnnnnnnnnnnnnnnnnnnnnnnnnnnnnnnnnnnnnnnnnnnnnnnnnnnnnnnnnnnnnnnnnnnnnnnnnnnnnnnnnnnnnnnnnnnnnnnnnnnnnnnnnnnnnnnnnnnnnnnnnnnnnnnnnnnnnnnnnnnnnnnnnnnnnnnnnnnnnnnnnnnnnnnnnnnnnnnnnnnnnnnnnnnnnnnnnnnnnnnnnnnnnnnnnnnnnnnnnnnnnnnnnnnnnnnnnnnnnnnnnnnnnnnnnnnnnnnnnnnnnnnnnnnnnnnnnnnnnnnnnnnnnnnnnnnnnnnnnnnnnnnnnnnnnnnnnnnnnnnnnnnnnnnnnnnnnnnnnnnnnnnnnnnnnnnnnnnnnnnnnnnnnnnnnnnnnnnnnnnnnnnnnnnnnnnnnnnnnnnnnnnnnnnnnnnnnnnnnnnnnnnnnnnnnnnnnnnnnnnnnnnnnnnnnnnnnnnnnnnnnnnnnnnnnnnnnnnnnnnnnnnnnnnnnnnnnnnnnnnnnnnnnnnnnnnnnnnnnnnnnnnnnnnnnnnnnnnnnnnnnnnnnnnnnnnnnnnnnnnnnnnnnnnnnnnnnnnnnnnnnnnnnnnnnnnnnnnnnnnnnnnnnnnnnnnnnnnnnnnnnnnnnnnnnnnnnnnnnnnnnnnnnnnnnnnnnnnnnnnnnnnnnnnnnnnnnnnnnnnnnnnnnnnnnnnnnnnnnnnnnnnnnnnnnnnnnnnnnnnnnnnnnnnnnnnnnnnnnnnnnnnnnnnnnnnnnnnnnnnnnnnnnnnnnnnnnnnnnnnnnnnnnnnnnnnnnnnnnnnnnnnnnnnnnnnnnnnnnnnnnnnnnnnnnnnnnnnnnnnnnnnnnnnnnnnnnnnnnnnnnnnnnnnnnnnnnnnnnnnnnnnnnnnnnnnnnnnnnnnnnnnnnnnnnnnnnnnnnnnnnnnnnnnnnnnnnnnnnnnnnnnnnnnnnnnnnnnnnnnnnnnnnnnnnnnnnnnnnnnnnnnnnnnnnnnnnnnnnnnnnnnnnnnnnnnnnnnnnnnnnnnnnnnnnnnnnnnnnnnnnnnnnnnnnnnnnnnnnnnnnnnnnnnnnnnnnnnnnnnnnnnnnnnnnnnnnnnnnnnnnnnnnnnnnnnnnnnnnnnnnnnnnnnnnnnnnnnnnnnnnnnnnnnnnnnnnnnnnnnnnnnnnnnnnnnnnnnnnnnnnnnnnnnnnnnnnnnnnnnnnnnnnnnnnnnnnnnnnnnnnnnnnnnnnnnnnnnnnnnnnnnnnnnnnnnnnnnnnnnnnnnnnnnnnnnnnnnnnnnnnnnnnnnnnnnnnnnnnnnnnnnnnnnnnnnnnnnnnnnnnnnnnnnnnnnnnnnnnnnnnnnnnnnnnnnnnnnnnnnnnnnnnnnnnnnnnnnnnnnnnnnnnnnnnnnnnnnnnnnnnnnnnnnnnnnnnnnnnnnnnnnnnnnnnnnnnnnnnnnnnnnnnnnnnnnnnnnnnnnnnnnnnnnnnnnnnnnnnnnnnnnnnnnnnnnnnnnnnnnnnnnnnnnnnnnnnnnnnnnnnnnnnnnnnnnnnnnnnnnnnnnnnnnnnnnnnnnnnnnnnnnnnnnnnnnnnnnnnnnnnnnnnnnnnnnnnnnnnnnnnnnnnnnnnnnnnnnnnnnnnnnnnnnnnnnnnnnnnnnnnnnnnnnnnnnnnnnnnnnnnnnnnnnnnnnnnnnnnnnnnnnnnnnnnnnnnnnnnnnnnnnnnnnnnnnnnnnnnnnnnnnnnnnnnnnnnnnnnnnnnnnnnnnnnnnnnnnnnnnnnnnnnnnnnnnnnnnnnnnnnnnnnnnnnnnnnnnnnnnnnnnnnnnnnnnnnnnnnnnnnnnnnnnnnnnnnnnnnnnnnnnnnnnnnnnnnnnnnnnnnnnnnnnnnnnnnnnnnnnnnnnnnnnnnnnnnnnnnnnnnnnnnnnnnnnnnnnnnnnnnnnnnnnnnnnnnnnnnnnnnnnnnnnnnnnnnnnnnnnnnnnnnnnnnnnnnnnnnnnnnnnnnnnnnnnnnnnnnnnnnnnnnnnnnnnnnnnnnnnnnnnnnnnnnnnnnnnnnnnnnnnnnnnnnnnnnnnnnnnnnnnnnnnnnnnnnnnnnnnnnnnnnnnnnnnnnnnnnnnnnnnnnnnnnnnnnnnnnnnnnnnnnnnnnnnnnnnnnnnnnnnnnnnnnnnnnnnnnnnnnnnnnnnnnnnnnnnnnnnnnnnnnnnnnnnnnnnnnnnnnnnnnnnnnnnnnnnnnnnnnnnnnnnnnnnnnnnnnnnnnnnnnnnnnnnnnnnnnnnnnnnnnnnnnnnnnnnnnnnnnnnnnnnnnnnnnnnnnnnnnnnnnnnnnnnnnnnnnnnnnnnnnnnnnnnnnnnnnnnnnnnnnnnnnnnnnnnnnnnnnnnnnnnnnnnnnnnnnnnnnnnnnnnnnnnnnnnnnnnnnnnnnnnnnnnnnnnnnnnnnnnnnnnnnnnnnnnnnnnnnnnnnnnnnnnnnnnnnnnnnnnnnnnnnnnnnnnnnnnnnnnnnnnnnnnnnnnnnnnnnnnnnnnnnnnnnnnnnnnnnnnnnnnnnnnnnnnnnnnnnnnnnnnnnnnnnnnnnnnnnnnnnnnnnnnnnnnnnnnnnnnnnnnnnnnnnnnnnnnnnnnnnnnnnnnnnnnnnnnnnnnnnnnnnnnnnnnnnnnnnnnnnnnnnnnnnnnnnnnnnnnnnnnnnnnnnnnnnnnnnnnnnnnnnnnnnnnnnnnnnnnnnnnnnnnnnnnnnnnnnnnnnnnnnnnnnnnnnnnnnnnnnnnnnnnnnnnnnnnnnnnnnnnnnnnnnnnnnnnnnnnnnnnnnnnnnnnnnnnnnnnnnnnnnnnnnnnnnnnnnnnnnnnnnnnnnnnnnnnnnnnnnnnnnnnnnnnnnnnnnnnnnnnnnnnnnnnnnnnnnnnnnnnnnnnnnnnnnnnnnnnnnnnnnnnnnnnnnnnnnnnnnnnnnnnnnnnnnnnnnnnnnnnnnnnnnnnnnnnnnnnnnnnnnnnnnnnnnnnnnnnnnnnnnnnnnnnnnnnnnnnnnnnnnnnnnnnnnnnnnnnnnnnnnnnnnnnnnnnnnnnnnnnnnnnnnnnnnnnnnnnnnnnnnnnnnnnnnnnnnnnnnnnnnnnnnnnnnnnnnnnnnnnnnnnnnnnnnnnnnnnnnnnnnnnnnnnnnnnnnnnnnnnnnnnnnnnnnnnnnnnnnnnnnnnnnnnnnnnnnnnnnnnnnnnnnnnnnnnnnnnnnnnnnnnnnnnnnnnnnnnnnnnnnnnnnnnnnnnnnnnnnnnnnnnnnnnnnnnnnnnnnnnnnnnnnnnnnnnnnnnnnnnnnnnnnnnnnnnnnnnnnnnnnnnnnnnnnnnnnnnnnnnnnnnnnnnnnnnnnnnnnnnnnnnnnnnnnnnnnnnnnnnnnnnnnnnnnnnnnnnnnnnnnnnnnnnnnnnnnnnnnnnnnnnnnnnnnnnnnnnnnnnnnnnnnnnnnnnnnnnnnnnnnnnnnnnnnnnnnnnnnnnnnnnnnnnnnnnnnnnnnnnnnnnnnnnnnnnnnnnnnnnnnnnnnnnnnnnnnnnnnnnnnnnnnnnnnnnnnnnnnnnnnnnnnnnnnnnnnnnnnnnnnnnnnnnnnnnnnnnnnnnnnnnnnnnnnnnnnnnnnnnnnnnnnnnnnnnnnnnnnnnnnnnnnnnnnnnnnnnnnnnnnnnnnnnnnnnnnnnnnnnnnnnnnnnnnnnnnnnnnnnnnnnnnnnnnnnnnnnnnnnnnnnnnnnnnnnnnnnnnnnnnnnnnnnnnnnnnnnnnnnnnnnnnnnnnnnnnnnnnnnnnnnnnnnnnnnnnnnnnnnnnnnnnnnnnnnnnnnnnnnnnnnnnnnnnnnnnnnnnnnnnnnnnnnnnnnnnnnnnnnnnnnnnnnnnnnnnnnnnnnnnnnnnnnnnnnnnnnnnnnnnnnnnnnnnnnnnnnnnnnnnnnnnnnnnnnnnnnnnnnnnnnnnnnnnnnnnnnnnnnnnnnnnnnnnnnnnnnnnnnnnnnnnnnnnnnnnnnnnnnnnnnnnnnnnnnnnnnnnnnnnnnnnnnnnnnnnnnnnnnnnnnnnnnnnnnnnnnnnnnnnnnnnnnnnnnnnnnnnnnnnnnnnnnnnnnnnnnnnnnnnnnnnnnnnnnnnnnnnnnnnnnnnnnnnnnnnnnnnnnnnnnnnnnnnnnnnnnnnnnnnnnnnnnnnnnnnnnnnnnnnnnnnnnnnnnnnnnnnnnnnnnnnnnnnnnnnnnnnnnnnnnnnnnnnnnnnnnnnnnnnnnnnnnnnnnnnnnnnnnnnnnnnnnnnnnnnnnnnnnnnnnnnnnnnnnnnnnnnnnnnnnnnnnnnnnnnnnnnnnnnnnnnnnnnnnnnnnnnnnnnnnnnnnnnnnnnnnnnnnnnnnnnnnnnnnnnnnnnnnnnnnnnnnnnnnnnnnnnnnnnnnnnnnnnnnnnnnnnnnnnnnnnnnnnnnnnnnnnnnnnnnnnnnnnnnnnnnnnnnnnnnnnnnnnnnnnnnnnnnnnnnnnnnnnnnnnnnnnnnnnnnnnnnnnnnnnnnnnnnnnnnnnnnnnnnnnnnnnnnnnnnnnnnnnnnnnnnnnnnnnnnnnnnnnnnnnnnnnnnnnnnnnnnnnnnnnnnnnnnnnnnnnnnnnnnnnnnnnnnnnnnnnnnnnnnnnnnnnnnnnnnnnnnnnnnnnnnnnnnnnnnnnnnnnnnnnnnnnnnnnnnnnnnnnnnnnnnnnnnnnnnnnnnnnnnnnnnnnnnnnnnnnnnnnnnnnnnnnnnnnnnnnnnnnnnnnnnnnnnnnnnnnnnnnnnnnnnnnnnnnnnnnnnnnnnnnnnnnnnnnnnnnnnnnnnnnnnnnnnnnnnnnnnnnnnnnnnnnnnnnnnnnnnnnnnnnnnnnnnnnnnnnnnnnnnnnnnnnnnnnnnnnnnnnnnnnnnnnnnnnnnnnnnnnnnnnnnnnnnnnnnnnnnnnnnnnnnnnnnnnnnnnnnnnnnnnnnnnnnnnnnnnnnnnnnnnnnnnnnnnnnnnnnnnnnnnnnnnnnnnnnnnnnnnnnnnnnnnnnnnnnnnnnnnnnnnnnnnnnnnnnnnnnnnnnnnnnnnnnnnnnnnnnnnnnnnnnnnnnnnnnnnnnnnnnnnnnnnnnnnnnnnnnnnnnnnnnnnnnnnnnnnnnnnnnnnnnnnnnnnnnnnnnnnnnnnnnnnnnnnnnnnnnnnnnnnnnnnnnnnnnnnnnnnnnnnnnnnnnnnnnnnnnnnnnnnnnnnnnnnnnnnnnnnnnnnnnnnnnnnnnnnnnnnnnnnnnnnnnnnnnnnnnnnnnnnnnnnnnnnnnnnnnnnnnnnnnnnnnnnnnnnnnnnnnnnnnnnnnnnnnnnnnnnnnnnnnnnnnnnnnnnnnnnnnnnnnnnnnnnnnnnnnnnnnnnnnnnnnnnnnnnnnnnnnnnnnnnnnnnnnnnnnnnnnnnnnnnnnnnnnnnnnnnnnnnnnnnnnnnnnnnnnnnnnnnnnnnnnnnnnnnnnnnnnnnnnnnnnnnnnnnnnnnnnnnnnnnnnnnnnnnnnnnnnnnnnnnnnnnnnnnnnnnnnnnnnnnnnnnnnnnnnnnnnnnnnnnnnnnnnnnnnnnnnnnnnnnnnnnnnnnnnnnnnnnnnnnnnnnnnnnnnnnnnnnnnnnnnnnnnnnnnnnnnnnnnnnnnnnnnnnnnnnnnnnnnnnnnnnnnnnnnnnnnnnnnnnnnnnnnnnnnnnnnnnnnnnnnnnnnnnnnnnnnnnnnnnnnnnnnnnnnnnnnnnnnnnnnnnnnnnnnnnnnnnnnnnnnnnnnnnnnnnnnnnnnnnnnnnnnnnnnnnnnnnnnnnnnnnnnnnnnnnnnnnnnnnnnnnnnnnnnnnnnnnnnnnnnnnnnnnnnnnnnnnnnnnnnnnnnnnnnnnnnnnnnnnnnnnnnnnnnnnnnnnnnnnnnnnnnnnnnnnnnnnnnnnnnnnnnnnnnnnnnnnnnnnnnnnnnnnnnnnnnnnnnnnnnnnnnnnnnnnnnnnnnnnnnnnnnnnnnnnnnnnnnnnnnnnnnnnnnnnnnnnnnnnnnnnnnnnnnnnnnnnnnnnnnnnnnnnnnnnnnnnnnnnnnnnnnnnnnnnnnnnnnnnnnnnnnnnnnnnnnnnnnnnnnnnnnnnnnnnnnnnnnnnnnnnnnnnnnnnnnnnnnnnnnnnnnnnnnnnnnnnnnnnnnnnnnnnnnnnnnnnnnnnnnnnnnnnnnnnnnnnnnnnnnnnnnnnnnnnnnnnnnnnnnnnnnnnnnnnnnnnnnnnnnnnnnnnnnnnnnnnnnnnnnnnnnnnnnnnnnnnnnnnnnnnnnnnnnnnnnnnnnnnnnnnnnnnnnnnnnnnnnnnnnnnnnnnnnnnnnnnnnnnnnnnnnnnnnnnnnnnnnnnnnnnnnnnnnnnnnnnnnnnnnnnnnnnnnnnnnnnnnnnnnnnnnnnnnnnnnnnnnnnnnnnnnnnnnnnnnnnnnnnnnnnnnnnnnnnnnnnnnnnnnnnnnnnnnnnnnnnnnnnnnnnnnnnnnnnnnnnnnnnnnnnnnnnnnnnnnnnnnnnnnnnnnnnnnnnnnnnnnnnnnnnnnnnnnnnnnnnnnnnnnnnnnnnnnnnnnnnnnnnnnnnnnnnnnnnnnnnnnnnnnnnnnnnnnnnnnnnnnnnnnnnnnnnnnnnnnnnnnnnnnnnnnnnnnnnnnnnnnnnnnnnnnnnnnnnnnnnnnnnnnnnnnnnnnnnnnnnnnnnnnnnnnnnnnnnnnnnnnnnnnnnnnnnnnnnnnnnnnnnnnnnnnnnnnnnnnnnnnnnnnnnnnnnnnnnnnnnnnnnnnnnnnnnnnnnnnnnnnnnnnnnnnnnnnnnnnnnnnnnnnnnnnnnnnnnnnnnnnnnnnnnnnnnnnnnnnnnnnnnnnnnnnnnnnnnnnnnnnnnnnnnnnnnnnnnnnnnnnnnnnnnnnnnnnnnnnnnnnnnnnnnnnnnnnnnnnnnnnnnnnnnnnnnnnnnnnnnnnnnnnnnnnnnnnnnnnnnnnnnnnnnnnnnnnnnnnnnnnnnnnnnnnnnnnnnnnnnnnnnnnnnnnnnnnnnnnnnnnnnnnnnnnnnnnnnnnnnnnnnnnnnnnnnnnnnnnnnnnnnnnnnnnnnnnnnnnnnnnnnnnnnnnnnnnnnnnnnnnnnnnnnnnnnnnnnnnnnnnnnnnnnnnnnnnnnnnnnnnnnnnnnnnnnnnnnnnnnnnnnnnnnnnnnnnnnnnnnnnnnnnnnnnnnnnnnnnnnnnnnnnnnnnnnnnnnnnnnnnnnnnnnnnnnnnnnnnnnnnnnnnnnnnnnnnnnnnnnnnnnnnnnnnnnnnnnnnnnnnnnnnnnnnnnnnnnnnnnnnnnnnnnnnnnnnnnnnnnnnnnnnnnnnnnnnnnnnnnnnnnnnnnnnnnnnnnnnnnnnnnnnnnnnnnnnnnnnnnnnnnnnnnnnnnnnnnnnnnnnnnnnnnnnnnnnnnnnnnnnnnnnnnnnnnnnnnnnnnnnnnnnnnnnnnnnnnnnnnnnnnnnnnnnnnnnnnnnnnnnnnnnnnnnnnnnnnnnnnnnnnnnnnnnnnnnnnnnnnnnnnnnnnnnnnnnnnnnnnnnnnnnnnnnnnnnnnnnnnnnnnnnnnnnnnnnnnnnnnnnnnnnnnnnnnnnnnnnnnnnnnnnnnnnnnnnnnnnnnnnnnnnnnnnnnnnnnnnnnnnnnnnnnnnnnnnnnnnnnnnnnnnnnnnnnnnnnnnnnnnnnnnnnnnnnnnnnnnnnnnnnnnnnnnnnnnnnnnnnnnnnnnnnnnnnnnnnnnnnnnnnnnnnnnnnnnnnnnnnnnnnnnnnnnnnnnnnnnnnnnnnnnnnnnnnnnnnnnnnnnnnnnnnnnnnnnnnnnnnnnnnnnnnnnnnnnnnnnnnnnnnnnnnnnnnnnnnnnnnnnnnnnnnnnnnnnnnnnnnnnnnnnnnnnnnnnnnnnnnnnnnnnnnnnnnnnnnnnnnnnnnnnnnnnnnnnnnnnnnnnnnnnnnnnnnnnnnnnnnnnnnnnnnnnnnnnnnnnnnnnnnnnnnnnnnnnnnnnnnnnnnnnnnnnnnnnnnnnnnnnnnnnnnnnnnnnnnnnnnnnnnnnnnnnnnnnnnnnnnnnnnnnnnnnnnnnnnnnnnnnnnnnnnnnnnnnnnnnnnnnnnnnnnnnnnnnnnnnnnnnnnnnnnnnnnnnnnnnnnnnnnnnnnnnnnnnnnnnnnnnnnnnnnnnnnnnnnnnnnnnnnnnnnnnnnnnnnnnnnnnnnnnnnnnnnnnnnnnnnnnnnnnnnnnnnnnnnnnnnnnnnnnnnnnnnnnnnnnnnnnnnnnnnnnnnnnnnnnnnnnnnnnnnnnnnnnnnnnnnnnnnnnnnnnnnnnnnnnnnnnnnnnnnnnnnnnnnnnnnnnnnnnnnnnnnnnnnnnnnnnnnnnnnnnnnnnnnnnnnnnnnnnnnnnnnnnnnnnnnnnnnnnnnnnnnnnnnnnnnnnnnnnnnnnnnnnnnnnnnnnnnnnnnnnnnnnnnnnnnnnnnnnnnnnnnnnnnnnnnnnnnnnnnnnnnnnnnnnnnnnnnnnnnnnnnnnnnnnnnnnnnnnnnnnnnnnnnnnnnnnnnnnnnnnnnnnnnnnnnnnnnnnnnnnnnnnnnnnnnnnnnnnnnnnnnnnnnnnnnnnnnnnnnnnnnnnnnnnnnnnnnnnnnnnnnnnnnnnnnnnnnnnnnnnnnnnnnnnnnnnnnnnnnnnnnnnnnnnnnnnnnnnnnnnnnnnnnnnnnnnnnnnnnnnnnnnnnnnnnnnnnnnnnnnnnnnnnnnnnnnnnnnnnnnnnnnnnnnnnnnnnnnnnnnnnnnnnnnnnnnnnnnnnnnnnnnnnnnnnnnnnnnnnnnnnnnnnnnnnnnnnnnnnnnnnnnnnnnnnnnnnnnnnnnnnnnnnnnnnnnnnnnnnnnnnnnnnnnnnnnnnnnnnnnnnnnnnnnnnnnnnnnnnnnnnnnnnnnnnnnnnnnnnnnnnnnnnnnnnnnnnnnnnnnnnnnnnnnnnnnnnnnnnnnnnnnnnnnnnnnnnnnnnnnnnnnnnnnnnnnnnnnnnnnnnnnnnnnnnnnnnnnnnnnnnnnnnnnnnnnnnnnnnnnnnnnnnnnnnnnnnnnnnnnnnnnnnnnnnnnnnnnnnnnnnnnnnnnnnnnnnnnnnnnnnnnnnnnnnnnnnnnnnnnnnnnnnnnnnnnnnnnnnnnnnnnnnnnnnnnnnnnnnnnnnnnnnnnnnnnnnnnnnnnnnnnnnnnnnnnnnnnnnnnnnnnnnnnnnnnnnnnnnnnnnnnnnnnnnnnnnnnnnnnnnnnnnnnnnnnnnnnnnnnnnnnnnnnnnnnnnnnnnnnnnnnnnnnnnnnnnnnnnnnnnnnnnnnnnnnnnnnnnnnnnnnnnnnnnnnnnnnnnnnnnnnnnnnnnnnnnnnnnnnnnnnnnnnnnnnnnnnnnnnnnnnnnnnnnnnnnnnnnnnnnnnnnnnnnnnnnnnnnnnnnnnnnnnnnnnnnnnnnnnnnnnnnnnnnnnnnnnnnnnnnnnnnnnnnnnnnnnnnnnnnnnnnnnnnnnnnnnnnnnnnnnnnnnnnnnnnnnnnnnnnnnnnnnnnnnnnnnnnnnnnnnnnnnnnnnnnnnnnnnnnnnnnnnnnnnnnnnnnnnnnnnnnnnnnnnnnnnnnnnnnnnnnnnnnnnnnnnnnnnnnnnnnnnnnnnnnnnnnnnnnnnnnnnnnnnnnnnnnnnnnnnnnnnnnnnnnnnnnnnnnnnnnnnnnnnnnnnnnnnnnnnnnnnnnnnnnnnnnnnnnnnnnnnnnnnnnnnnnnnnnnnnnnnnnnnnnnnnnnnnnnnnnnnnnnnnnnnnnnnnnnnnnnnnnnnnnnnnnnnnnnnnnnnnnnnnnnnnnnnnnnnnnnnnnnnnnnnnnnnnnnnnnnnnnnnnnnnnnnnnnnnnnnnnnnnnnnnnnnnnnnnnnnnnnnnnnnnnnnnnnnnnnnnnnnnnnnnnnnnnnnnnnnnnnnnnnnnnnnnnnnnnnnnnnnnnnnnnnnnnnnnnnnnnnnnnnnnnnnnnnnnnnnnnnnnnnnnnnnnnnnnnnnnnnnnnnnnnnnnnnnnnnnnnnnnnnnnnnnnnnnnnnnnnnnnnnnnnnnnnnnnnnnnnnnnnnnnnnnnnnnnnnnnnnnnnnnnnnnnnnnnnnnnnnnnnnnnnnnnnnnnnnnnnnnnnnnnnnnnnnnnnnnnnnnnnnnnnnnnnnnnnnnnnnnnnnnnnnnnnnnnnnnnnnnnnnnnnnnnnnnnnnnnnnnnnnnnnnnnnnnnnnnnnnnnnnnnnnnnnnnnnnnnnnnnnnnnnnnnnnnnnnnnnnnnnnnnnnnnnnnnnnnnnnnnnnnnnnnnnnnnnnnnnnnnnnnnnnnnnnnnnnnnnnnnnnnnnnnnnnnnnnnnnnnnnnnnnnnnnnnnnnnnnnnnnnnnnnnnnnnnnnnnnnnnnnnnnnnnnnnnnnnnnnnnnnnnnnnnnnnnnnnnnnnnnnnnnnnnnnnnnnnnnnnnnnnnnnnnnnnnnnnnnnnnnnnnnnnnnnnnnnnnnnnnnnnnnnnnnnnnnnnnnnnnnnnnnnnnnnnnnnnnnnnnnnnnnnnnnnnnnnnnnnnnnnnnnnnnnnnnnnnnnnnnnnnnnnnnnnnnnnnnnnnnnnnnnnnnnnnnnnnnnnnnnnnnnnnnnnnnnnnnnnnnnnnnnnnnnnnnnnnnnnnnnnnnnnnnnnnnnnnnnnnnnnnnnnnnnnnnnnnnnnnnnnnnnnnnnnnnnnnnnnnnnnnnnnnnnnnnnnnnnnnnnnnnnnnnnnnnnnnnnnnnnnnnnnnnnnnnnnnnnnnnnnnnnnnnnnnnnnnnnnnnnnnnnnnnnnnnnnnnnnnnnnnnnnnnnnnnnnnnnnnnnnnnnnnnnnnnnnnnnnnnnnnnnnnnnnnnnnnnnnnnnnnnnnnnnnnnnnnnnnnnnnnnnnnnnnnnnnnnnnnnnnggccatttcctgctggcggcggtgttgccactcttccacccccagcaaggcgcggcgcatcaggccttcttgcgcgcgttccagcctttcgcggcgccagtagagcctggccaagtcgtcgatctgcttttcccagagcgcatctccgggaccataggtggtcatgagttcctgcttcaagttttcgaattcttgcgggtcttcgcccagcgccagcatgacttggtggtgattttcggggctggcacgttggccgtgcttgagggcattcagcttcgagttctgcttagcggccgcgctgcgcggtcccgtcgagtgctgcgcattctggcgcgcggcggcgagcagcttcggggtaagctcaggtgatttgcgtaaggacatagttcctcctgggtaggaatgttagattaccgaggaaaggacttcctcgggggggtaggactcgtcacattgatagcctatcacggctacgggcgcttgtcaagagaaatatgtccacacgtctagccgaccacgactcggattgagtcattgattcatcgactcattgaagcagcaaccctgcagactgctccattgaatcattgatccattgactcattggatcattgaagcgcggctgaagagcaatagtgaattgtgaatggtgaattgtgaatggcgaagcccacgttctgaatcgccttcttccttatttcaccgccgaaaactgacgactgacaactgacgactgacaactgattgctgagaactgacgactgaaaactgactactgagaactgagcactgagtacgttgcctcagcaaacaattaggcgggacgctcgtgcatggtcgcgaaacttcgcggagcgggagtccagggtgttcgggaacccaatgttgtggcgcatacggcaccgctgccagtgctcgggatgcttgagccgggccgccctcgcggggcggggcgagcgtactccgctttctcgccgctcagaggccaaagttcgcgctgcccgcctgatcttttgctacaattgggtgcatgccagctccgagggtaacagacagaccgttgctggcgacgagcgaccctccccgccacgaagcctgctgggcgaagacgaccaaagacggtaagcccggcatctccgtccgagatcactgcctgaacgtcggctgcgtcgccgaagcgcactcggcgctgctaccacatcttgccgagattaagggaaaagccatggggtacggcctactcgaagaaaagtgcattccgattgtacagaaatgagggtattggctatgggtctctccagcagtcaattatcccagtggccgcaattgtgggccaagacaagccaagactggaccaatggaacgtccgcgcctcgccactatcaccccttgctgtaccatatgctcgatgttgccgccgtggcgggtcttgtttgggaccattgccttggccctgaagttcgcaaccgtctcgattactcactgggaagtgaggcgcgcactcatatcgtgtttctggccggtgcgcacgatctcggcaaagctagcccaggcttccagaagaaagtgccggaattagcagagaagtgcggcctgcatttctccaaaaacgaccagaaccgtccgcatgggttcattagcgcgcatattctgaaagaagtcctcgacccggcttctactgtcttggcccagattgcaggagggcaccacggtgtttttccgacttcagcggaactccgaatgggaagggacacgcttggggacagcggctggaatgtggcccgccggatgctgattcaagaatttgccgaaaccgtagggttcgacctgaaacagaaggcccaagccaggagtgaaattgcggacccggccgtcgtacccatactcgccgggtttatctccgtggtggactggatcggttcgaatcaggatttctttccttgtgccgctgaatgtggaactccgcttagaatcggtgcgccggattattggacgaaggcgcaagagcaagcgcgagaagctcttgagacgctgggctggctgccggccccgagttttgccggtgaggcgcgttttgacaccgtctttagtagattcgtgcccaacgctctccaggcggccgcaatcacgttggcctcaaagcaaacctctccgtatctcatgattgtcgaagcaccgatgggccaaggcaagaccgaagctgcgctccatgcggcggacatggcgatgtgcagaggctttggacgtggcatgtatatcgcgatgccgacgcaggccaccgggaatgcgatgttcaggagggtgttggatgactacctgaaagagcgaggacacaaaggaaagctcaacctgcagctcgtgcatggcgacgcactccttgcgcaggcgaaggaagtgaagcgaggtgagattccggagttcaaccccaaggccatcgcagaagagggcgacgtggaggcccaatcctggttcaccgccaagaaacgcccgcttctcgcccccttcggggttggcaccattgaccaaagcctgttgagcgtccttcagaccaagcattggttcgtgcgtctcttcgggctggcaggcaaggtggtgatcttcgacgaggtccacgcctacgacgcctacatgagcaccatcctcgagcggcttttgcattggctggcagaggtggattgcaccgtcatcctgctttccgcgacacttcccgaggccaagcgaaaggcgctcgcaaaggcctattccggccgggacgatatcgagtataaacgctacccgcgaatcactctggcgagcccacagcacctttgtagcgtcggtctccgaccgacgttcggcgatcggagatcgccgccacaggtatgccatgagatccccatggagaaaccgcgcaccgtggctctgcgctcaaggaatacggatttgccaaccctaacccccaccctaagccggcaactggaccttggcggctgcgccgcggtcatctgcaacacagtgagccgcgccatcgaggtttaccgacacttgcgagacaacctgaaagacacggagtgcctgctcttccatgcccgcacgctccagatgtggcggcgggagcgggaggaagaagtccttcgcaagtttggcaagggtgagaaacaagccgatggtacgtatgcgaacccgcaccggcctcggcgagcggtcctggtcgcaacgcaggtaattgaacagagcctggacctggacttcgatctcatggtttcggagattgcccccgtggacttgctcctccaacgctgcgggcggctgcaccgccacccacgctgccgcccggcgggtctggacacgccgcagctcatcgagcgctggaagagagcgtccgctcgctgggcaccacagcctgggacacccaagccgtcgcgcgcgttcgcaccgatttcagcgacgacgatctcaagccacaggaagcggcgaagacaagaccaagaacgaaaagcggtgggaagaaatgagaatcaacaaccaggaaatctcgccggaggccctcggcactttatgccggaaatggaagattcgacggctggagctcttcggctccgcgcattccggccaactccgggccgagagcgatattgatttcttggcggagttcgagcccggcgaacaatggtccctgatggacctggcccgcgctgaggaagagttctccctgcttttggggcgcagcgtagacctggtagaccgcaagagcgtggagaaaagcgccaattggatacgtcgcgacgccatcctccgctccacggaggtggtttatggggcgtgatccacgcgccgcgatcctgcacatgcttcgacaaggtagctttttcctccaggtcccagtattttcgtggaggcaaggtagcgcggacctgttcttgaggtccgcggcttttcccttaaaatcaacaccctgcgcctgatcttgtgctagaattcgcagcatgccagctccaagggtaaggtacagaccgttgctggcgaccggcgattccgtccgccgcgaagactgctgggcaaaaacgggtaaagatggcgagcccggcattactgttcgagaccaccgcctgaacgtcggctgcgccgccgaagccctcctgcactttctaccacctcttgccctgacaaggagaaaccgtgagctataacctgctcgacgaagagtggattcccgttctgtggaggaatggtcgtgcctgtcgcgtgggcatcattgaggccctccaacaagcaggccagattcgccaaatcgccgccagcaatcccatggaccgcgtggccatcctgcgcttcctgctcgcgctactctattggtgccaggggaatcccccggacgataccggctcgatctcttcgctccgctccgattggttcaagaagctcgacgaccacaaagattgtttcaaccttctgggcgacgggaagcgattctatcaggaccgtactgcaaagcgcgtccgcccgataacggttttgagtcaggaggtaccggctggcaataacttctggcacctcaggcattcaacagataacgaaaccggcctctgtccggcctgctgcgccgccgggctaacgcgcttgccgatgttctccgtgagcggtctgagcggcccgggagagccaaacctcatggctggaatcaatggggttccgccagtgtacgttgtaccctggggccaatcgctttttgagacgctcctggctaactgggctagtgctgcgaaccttggagaaccttcctgggtcgacaatgcaacctgccaaaatcccaatgccgacgttgcattcgtcacaggcctgaccctcgttccaaggcgggtgtttctgcacgacccagtcgacttgcgtcacgcctgcatgggctgcggggcatccggctcgcccctcattctgacgtgtgatttccagacggccggcaagcaggagaacgagaaatggagtgatccccacgcggtctatttggggggcgaggcgcgaaaagccgttagggcagcggacctaaccgcctcaggccgattcaggatggaccgtccctggaccgaccttgtcgcgcgccttctcgaaacggggaaatctacggctctcctagtggtgggtttcgcgacgaacaaggcgaggaacatcgatgtatgggaacggaccgttcatctgccagcgatcgcctcaatctcagaggcggcgccggcgttggtaaggaactggcgattacaaggatgggccttggagaagaagatcgaggagataagcaggtcggaagctgagggggccgcccttattgctgcaattcgcccccaggtcgaatcaacggtctccgataagatggctgagctgatttctgggggcggggatgcctgggaaggggcagcccaggagtacaccccgatgatggccgccgtggccaaatcgctttcaccgggctacacgacggctgccctccgccggcgacgagagatcgccaacgtaaggccggacatgcgtccgaagccgggagccgatgaaaaggccagccggaaaaggggaggtgacaggtgactccaacggagcaatacgtcgaagtcctcacacatctgaagtccggtcaactcgcgctcctgcgcaggcatgccgggcaaggcctcgaccaatcggttgacggctttgatctcttcgccgggctctggtggcccttgcgagcgaagaatcagcgcgcgcctcgtcgcgccgtggcgtggctgatcgccaaactttacgcatttcggccagtcgagcactcacccggccagacgctcgcctggcagcttgcacgatgccgcgacgacactgtagcggcggtctctgaccgccgtcgtcgatcagagatcgatgctgcaagggcggtctccgaccgccgtcgtcgatcagagatcgacgctacaattcgcccagtcgcccaaaggttcgacgggctgctcacgctgccgctcgccaaagtcgagcctgccctgcgctgggcgctggacctcatagcctccgaacgcctcaaagtcgactgggtgaggctgacaaacgacctttccatttgggaacgcgaaaccacccggctcaactgggccgaggaatttttgaaatcttcaaaggaggaacgtcatgttaattgagattcacgccattcaaaaccacagcccggccaacctgaaccgggacgatttgggcgcccccaagacctgttattttggcggggtcttgcgctcccgcatttccagccagtgcctcaagcgcagcatccgtatgagcgatgagttcaagttgttatgtggcggagttcgtacgcggcgcctaccgaagctacttgcagagaactttcaaggtaaggaaaaggacgattttttcggcttggcccaacaagtcgtccagaaatgtggggtgctggcaggcgatgacggacaagaaaaagatgtcatcgtttttctatcaaaaagcgcgttgccgcgaatggtgcaataccttcgcgatctgagtggcaagtctggtgaggagcaagtcaaaggggtcgcccgcaagtttgcgcaactgatcgcacgagagcgtcacatgccggacatggccttgtcgggacgcatgttagagccctcgaagaccgcgaaggaggtgtggaaggacttggacccccaaatagaggccgctctccaagtgggacacgccatctcgacccacgaggcgcgtccggaagtggactatttcgttgccgcagacgatgtgaagggcgaagacgtcggcggtgcccacatcggagaggccatgtacagctcggcttgttactacaagtacttctccgtccattgggaaactttggtcacgaatctcgccgggttctcgggtaataaagagcacctggccgctcacacgctcggtgcctttgttcgcggggcggcgttgaccaaccccaccggcaagcagaacagtttcgcggcgcacaatcccccagatggcatactggtggaaatcaggaatactcccatcagctacgccaacgcctttgccaagccggttgttgccgagggcgaaggcgatatcatttcccagagcatcgcgcaactcgcccagtacgtccacgacatcgagaatgggtacggaaagccggtaaaacgcctttggttctctcccaatcttcgttttcccttagttgcacgcgagaaggttaaggaggagcaaaaggaagcaatccgtgaagtcgaactggccgcgaacaaccttaagtcgctcgatggacttgtaaggtccgtagtcgaagaaatcggctacgactgggaggaggttcagaaggtggctgtgaacgcggaggtggcctgatgagcgcgaacaccctgttcctccgcctcgaaggtccccttcagtcatggggcgatcaacaatcgaaatttgttatccgccgcacggcggaggcgccaaccaaatcgggcgtgttcgggctactctgcgcggccctgggcgtcagccgggctgaagcccctggaaaatggcttcccggacttgccgcgctgcgcctgggcgtccgcatcgattcacccggggtccgctggtgggactatcacaccgtcggcgcgggaatgcagatgccgacagccgacggcggaagcaaacccggcgccatgctcacccgtcgggaatacctctgcgattcctctttccttgtcgcgttgcacggcgaagcgagcctgattggcgaattggagaacgcagtaaaaacccccgcatggacgctgtacctcggcaggaagtgctgccccccttctcgccccttgctagagcatccgacaggcgaatattgcgatttgctatcggccctcaggtcggttccttggcggaaacgcctggaggcagacccggtaccccaagagctcgagtgtctgctggactgggacccgaccaaagagcagccggaggctccccgcgacgcgctgatctggtacgacgtgccggtgaccttcgagccgccttcgcaccaaccccgtttcgtcattcgcaagctgcttcgaatgggtgaagacggcgtaaagcttgcggctcagccggctcagcacgacacgccaccgcctccgcgtccgcgagcggattacaccaacacagaatacaaaaaccgccgccgggacaggctcaacctcgaccatggactgtgcgtcttttgcaagtctcctgccactacagtgcagcacgttacttaccgccgcgccggcggcgccgaactccgggacgatctgcgctctctgtgccgcctctgccacgacgccgtgacgatgatcgaatacggcctgagcatgggtctggaccggatcaaccccgaagagccccgctggcgcgataagatcattcagaagcggcaacagatcatacagttccgatctctggagacgcgccgcaggcgcctttccgccgaggaggtggaatagccatgtacctttcctgtctcctgatcgacaccggcgacaaccccgaccggccccggcccggacgcctatggctgcggaacctctatcacgtccaccagcggctctgcatggcgtttccctccgctctcagaaaaaagggcgatcccgaattccttgcgccctatgcgcctgacgactttcccgagcaacgctatttggcagacaagaagaaaaccgaagttgatccagaagtcttgaagcaagtgcacagccggcggagtcctgaggccgggttcctctttcgcattgacccgcagccgggtggtcgggccttgattgttgtacagtccgccgcggagcccaactgggactacgcgtttcacaacgcgcgctatctgcttgccgctcctcacgaactgaaaccattcgagccctgcttcacgaacgggcagcgtcttcgcttccgcctcgccgctaatcctacccggcggctctccgagcattctttggaacgggatggaagaccggtcgaagagaagtggatcgggaaacgcgttcctgtgccgcatgaccagcttcttgactggcttgctgaatggcggttccgccaagacgggcaggacgagccgtcaggattctgtatcgacagggaccggacgatggtgcagccgggctatatgtatttcaagaaacctaaggagggacggcaaagccgttgccaagaccacacggatatcaaaggggatggcgtaggacgtagcttgttctcggcccgctacgaagggattctcgaagtaacggagcccgacaaattctgtaacacccttcttcgcggcgtcgggcccggcaaagccttcgggttcgggctgctctcagtcgcgccctgccgcacgcctgccgtggcggacgcgctgtagcggcggtctccgaccgccgtcgtcgatcagagatcgacgctacaagactacaaaatgaaattcaaaccacgtttacggcggctggattggctctataccgacaaccctatctactaccttacgctctgtacgcaggatcgaaaatgctcgttggcaaacaccgcaatccaccaggaattcacgaggttctccgaacgggcaaccgattttctagtttgggtcggcttcttcatgatcatgcccgatcacatccatcttttcgctggcttttgtggcgagtccccacctttgtggaaatgggtcaaagccctgcggggcgacctgtccaaggtcctccgccaggatgaaggtgaaggcacgcactgggaaaaggatttcttcgatcacgtcatgagatcggaagaatcctatcgggagaaatatgagtatgtccgacagaatccggtccgtgccggtttagtcaagcgcccggaagattggccgtaccaaggcgagattcatcgcctggttttgtaattgtggcgccggtctccgaccgtcgtcgttgatcggagatcgacgctacaacccatttgcgattgccgtgctgtagcggcggtctccgaccgccgtcgtcgatcagagatcgacgctacaagggacgtcgatcggagatcgacgcgacagcgcgtgccggctcgaagccagcgttacgagggcggcgcgccctgtggaggcaatatgagaatccaagatctccacgttttaccgaaattcagtgatggatggagttacctgtatgtggagcactgccgcgtggaccaggaggatcaagccattgcagttcatgatcaagccgggaaggtccctgtcccctgcgccagcttggctttgctcatgttgggtccgggcgtctcgattactcacgccgccatctcggtgctggcggaccatgggtgccttgtggcctggtgcggggaagagggagtccgcttctacgccgtgggcatgggggagacgcgcaacgctgccaatttcctgcatcaggcgcgcatgtgggcgcatgagggtttccatatggaggtcgtgcgccgcctctaccagttgcgtttttccgagaagttcgaccccgccttgactctccaacaaatacgcggcatggagggcgtgcgagtccgcgacgcatacgccaaagccgcccgcgacgcaggtatcacgtggtcaggccgtagctatcgccgcgaccagtgggccaacgccgacccggcgaaccggggcttgtccgtcgccaattcctgcctctatgggatatgccatgcggccatcgtatcggcgggtttctcgcctgccctcggctttatccataccggcaagatgctgtccttcgtgtatgatctcgccgacctttacaagacggagattacagttccggtggcgtttcgagccgccgccgaggggccaggccaactggagcggcgcgtccgtattacctgccgcgatcagtttgtgtccacgaggcttctggagagaatcatcccggacgtccagaccgctctcatgctgtcaaaagcgacggcagccgatagcttcgacgtggatgccgccgcccccggctccctctgggacgatttggaaggagtagtcgaaggaggacgtatgctagccccggaaatgggcgaaagggagcccgagaatggtagtcctgatccttgagagggtgccgccagggctgcgcggcgagctcacacggtggtttctggagcctcaggccggtgtattcgtgggacgcgtttccgctctggtccgcgagcgcctgtgggaaaaggcgtgtgccaaggcccaagggggtggctgcctgatgctctactcgagcgataatgaacagggctttcaagtccgaacctggggtcgcacggcacggcagatcgaagacttcgagggccttttcctcgttcgtatgccgtagaatcaataacttttccagggttgtccccacgcgcgtgggggtgaaccggaggaagtcatcgctttacttagttcgcttaagttgtccccacgcgcgtgggggtgaaccggaggcggaggacttcaaagcgtacgccaccctgttgtccccacgcgcgtgggggtgaaccggcagcaatcggtattgggttgacaggagactagttgtccccacgcgcgtgggggtgaaccgcgggaggggactcctaagcctcgaccggcggagttgtccccacgcgcgtgggggtgaaccgtgagagcggaactcaaggcgctgagagaatcagttgtccccacgcgcgtgggggtgaaccgcggagcgtcccgcgtggtagcgggggaggctagttgtccccacgcgcgtgggggtgaaccgccaaggcttggcaggaaatcgcgtcggacattgttgtccccacgcgcgtgggggtgaaccggtgggggtggcgcatgagaactgagcgagacggttgtccccacgcgcgtgggggtgaaccgcttcgacggagacatttcgcataatatcgtaaattgtccccacgcgcgtgggggtgaaccgcctgcgcaattgcgccaaactctccagcgccagttgtccccacgcgcgtgggggtgaaccgcattgcgccccatgagagccaccagaagaggagttgtccccacgcgcgtgggggtgaaccgactaggcgggatattcgacgtggacggggatagttgtccccacgcgcgtgggggtgaaccgagcgtccccaagggtcaagaggtccttggaacgttgtccccacgcgcgtgggggtgaaccgattgtcgaaccggcgaaccggcaaatagtcaagttgtccccacgcgcgtgggggtgaaccgttcgtggctcgcgacaagtcgcgtgggctctagttgtccccacgcgcgtgggggtgaaccgaggacatcgcggattccaaagtgggccgcttcgttgtccccacgcgcgtgggggtgaaccggtgacggggccctactggtgactagcggactggttgtccccacgcgcgtgggggtgaaccggagctttcatggagcgagatcgagtcggcctagttgtccccacgcgcgtgggggtgaaccgtgaacgccgcaaaatccaagtccctgcgcaacgttgtccccacgcgcgtgggggtgaaccgcttacatccgcgcgggcgccatggcctgggtcgttgtccccacgcgcgtgggggtgaaccgctacccgagccagaagcagagcccccggcagggttgtccccacgcgcgtgggggtgaaccggcggcaaaggcacatagccagcagtctctgcggttgtccccacgcgcgtgggggtgaaccgcggcccatggaccgattccgcccggctatcgagttgtccccacgcgcgtgggggtgaaccgtcctcgagcgcatccgggacctcttcggtcttgttgtccccacgcgcgtgggggtgaaccgggcgccggccaggcagcaagaagtaagaagcagttgtccccacgcgcgtgggggtgaaccgctatgctccacccgaaacgagttccatcaaccgttgtccccacgcgcgtgggggtgaaccgcgaaacgccgacagattagggctgacgaaatagttgtccccacgcgcgtgggggtgaaccgacg

SEQ ID NO: 1014 - DNA, 105710 bp, Artificial Sequence; identical to SEQ ID NO: 497
  Synthetic Oligonucleotide
  misc_feature (1)..(93034): n is a, c, g, or t

SEQ ID NO: 1015 - DNA, 108529 bp, Artificial Sequence
  Synthetic Oligonucleotide
  misc_feature (1)..(95919): n is a, c, g, or t
nnnnnnnnnnnnnnnnnnnnnnnnnnnnnnnnnnnnnnnnnnnnnnnnnnnnnnnnnnnnnnnnnnnnnnnnnnnnnnnnnnnnnnnnnnnnnnnnnnnnnnnnnnnnnnnnnnnnnnnnnnnnnnnnnnnnnnnnnnnnnnnnnnnnnnnnnnnnnnnnnnnnnnnnnnnnnnnnnnnnnnnnnnnnnnnnnnnnnnnnnnnnnnnnnnnnnnnnnnnnnnnnnnnnnnnnnnnnnnnnnnnnnnnnnnnnnnnnnnnnnnnnnnnnnnnnnnnnnnnnnnnnnnnnnnnnnnnnnnnnnnnnnnnnnnnnnnnnnnnnnnnnnnnnnnnnnnnnnnnnnnnnnnnnnnnnnnnnnnnnnnnnnnnnnnnnnnnnnnnnnnnnnnnnnnnnnnnnnnnnnnnnnnnnnnnnnnnnnnnnnnnnnnnnnnnnnnnnnnnnnnnnnnnnnnnnnnnnnnnnnnnnnnnnnnnnnnnnnnnnnnnnnnnnnnnnnnnnnnnnnnnnnnnnnnnnnnnnnnnnnnnnnnnnnnnnnnnnnnnnnnnnnnnnnnnnnnnnnnnnnnnnnnnnnnnnnnnnnnnnnnnnnnnnnnnnnnnnnnnnnnnnnnnnnnnnnnnnnnnnnnnnnnnnnnnnnnnnnnnnnnnnnnnnnnnnnnnnnnnnnnnnnnnnnnnnnnnnnnnnnnnnnnnnnnnnnnnnnnnnnnnnnnnnnnnnnnnnnnnnnnnnnnnnnnnnnnnnnnnnnnnnnnnnnnnnnnnnnnnnnnnnnnnnnnnnnnnnnnnnnnnnnnnnnnnnnnnnnnnnnnnnnnnnnnnnnnnnnnnnnnnnnnnnnnnnnnnnnnnnnnnnnnnnnnnnnnnnnnnnnnnnnnnnnnnnnnnnnnnnnnnnnnnnnnnnnnnnnnnnnnnnnnnnnnnnnnnnnnnnnnnnnnnnnnnnnnnnnnnnnnnnnnnnnnnnnnnnnnnnnnnnnnnnnnnnnnnnnnnnnnnnnnnnnnnnnnnnnnnnnnnnnnnnnnnnnnnnnnnnnnnnnnnnnnnnnnnnnnnnnnnnnnnnnnnnnnnnnnnnnnnnnnnnnnnnnnnnnnnnnnnnnnnnnnnnnnnnnnnnnnnnnnnnnnnnnnnnnnnnnnnnnnnnnnnnnnnnnnnnnnnnnnnnnnnnnnnnnnnnnnnnnnnnnnnnnnnnnnnnnnnnnnnnnnnnnnnnnnnnnnnnnnnnnnnnnnnnnnnnnnnnnnnnnnnnnnnnnnnnnnnnnnnnnnnnnnnnnnnnnnnnnnnnnnnnnnnnnnnnnnnnnnnnnnnnnnnnnnnnnnnnnnnnnnnnnnnnnnnnnnnnnnnnnnnnnnnnnnnnnnnnnnnnnnnnnnnnnnnnnnnnnnnnnnnnnnnnnnnnnnnnnnnnnnnnnnnnnnnnnnnnnnnnnnnnnnnnnnnnnnnnnnnnnnnnnnnnnnnnnnnnnnnnnnnnnnnnnnnnnnnnnnnnnnnnnnnnnnnnnnnnnnnnnnnnnnnnnnnnnnnnnnnnnnnnnnnnnnnnnnnnnnnnnnnnnnnnnnnnnnnnnnnnnnnnnnnnnnnnnnnnnnnnnnnnnnnnnnnnnnnnnnnnnnnnnnnnnnnnnnnnnnnnnnnnnnnnnnnnnnnnnnnnnnnnnnnnnnnnnnnnnnnnnnnnnnnnnnnnnnnnnnnnnnnnnnnnnnnnnnnnnnnnnnnnnnnnnnnnnnnnnnnnnnnnnnnnnnnnnnnnnnnnnnnnnnnnnnnnnnnnnnnnnnnnnnnnnnnnnnnnnnnnnnnnnnnnnnnnnnnnnnnnnnnnnnnnnnnnnnnnnnnnnnnnnnnnnnnnnnnnnnnnnnnnnnnnnnnnnnnnnnnnnnnnnnnnnnnnnnnnnnnnnnnnnnnnnnnnnnnnnnnnnnnnnnnnnnnnnnnnnnnnnnnnnnnnnnnnnnnnnnnnnnnnnnnnnnnnnnnnnnnnnnnnnnnnnnnnnnnnnnnnnnnnnnnnnnnnnnnnnnnnnnnnnnnnnnnnnnnnnnnnnnnnnnnnnnnnnnnnnnnnnnnnnnnnnnnnnnnnnnnnnnnnnnnnnnnnnnnnnnnnnnnnnnnnnnnnnnnnnnnnnnnnnnnnnnnnnnnnnnnnnnnnnnnnnnnnnnnnnnnnnnnnnnnnnnnnnnnnnnnnnnnnnnnnnnnnnnnnnnnnnnnnnnnnnnnnnnnnnnnnnnnnnnnnnnnnnnnnnnnnnnnnnnnnnnnnnnnnnnnnnnnnnnnnnnnnnnnnnnnnnnnnnnnnnnnnnnnnnnnnnnnnnnnnnnnnnnnnnnnnnnnnnnnnnnnnnnnnnnnnnnnnnnnnnnnnnnnnnnnnnnnnnnnnnnnnnnnnnnnnnnnnnnnnnnnnnnnnnnnnnnnnnnnnnnnnnnnnnnnnnnnnnnnnnnnnnnnnnnnnnnnnnnnnnnnnnnnnnnnnnnnnnnnnnnnnnnnnnnnnnnnnnnnnnnnnnnnnnnnnnnnnnnnnnnnnnnnnnnnnnnnnnnnnnnnnnnnnnnnnnnnnnnnnnnnnnnnnnnnnnnnnnnnnnnnnnnnnnnnnnnnnnnnnnnnnnnnnnnnnnnnnnnnnnnnnnnnnnnnnnnnnnnnnnnnnnnnnnnnnnnnnnnnnnnnnnnnnnnnnnnnnnnnnnnnnnnnnnnnnnnnnnnnnnnnnnnnnnnnnnnnnnnnnnnnnnnnnnnnnnnnnnnnnnnnnnnnnnnnnnnnnnnnnnnnnnnnnnnnnnnnnnnnnnnnnnnnnnnnnnnnnnnnnnnnnnnnnnnnnnnnnnnnnnnnnnnnnnnnnnnnnnnnnnnnnnnnnnnnnnnnnnnnnnnnnnnnnnnnnnnnnnnnnnnnnnnnnnnnnnnnnnnnnnnnnnnnnnnnnnnnnnnnnnnnnnnnnnnnnnnnnnnnnnnnnnnnnnnnnnnnnnnnnnnnnnnnnnnnnnnnnnnnnnnnnnnnnnnnnnnnnnnnnnnnnnnnnnnnnnnnnnnnnnnnnnnnnnnnnnnnnnnnnnnnnnnnnnnnnnnnnnnnnnnnnnnnnnnnnnnnnnnnnnnnnnnnnnnnnnnnnnnnnnnnnnnnnnnnnnnnnnnnnnnnnnnnnnnnnnnnnnnnnnnnnnnnnnnnnnnnnnnnnnnnnnnnnnnnnnnnnnnnnnnnnnnnnnnnnnnnnnnnnnnnnnnnnnnnnnnnnnnnnnnnnnnnnnnnnnnnnnnnnnnnnnnnnnnnnnnnnnnnnnnnnnnnnnnnnnnnnnnnnnnnnnnnnnnnnnnnnnnnnnnnnnnnnnnnnnnnnnnnnnnnnnnnnnnnnnnnnnnnnnnnnnnnnnnnnnnnnnnnnnnnnnnnnnnnnnnnnnnnnnnnnnnnnnnnnnnnnnnnnnnnnnnnnnnnnnnnnnnnnnnnnnnnnnnnnnnnnnnnnnnnnnnnnnnnnnnnnnnnnnnnnnnnnnnnnnnnnnnnnnnnnnnnnnnnnnnnnnnnnnnnnnnnnnnnnnnnnnnnnnnnnnnnnnnnnnnnnnnnnnnnnnnnnnnnnnnnnnnnnnnnnnnnnnnnnnnnnnnnnnnnnnnnnnnnnnnnnnnnnnnnnnnnnnnnnnnnnnnnnnnnnnnnnnnnnnnnnnnnnnnnnnnnnnnnnnnnnnnnnnnnnnnnnnnnnnnnnnnnnnnnnnnnnnnnnnnnnnnnnnnnnnnnnnnnnnnnnnnnnnnnnnnnnnnnnnnnnnnnnnnnnnnnnnnnnnnnnnnnnnnnnnnnnnnnnnnnnnnnnnnnnnnnnnnnnnnnnnnnnnnnnnnnnnnnnnnnnnnnnnnnnnnnnnnnnnnnnnnnnnnnnnnnnnnnnnnnnnnnnnnnnnnnnnnnnnnnnnnnnnnnnnnnnnnnnnnnnnnnnnnnnnnnnnnnnnnnnnnnnnnnnnnnnnnnnnnnnnnnnnnnnnnnnnnnnnnnnnnnnnnnnnnnnnnnnnnnnnnnnnnnnnnnnnnnnnnnnnnnnnnnnnnnnnnnnnnnnnnnnnnnnnnnnnnnnnnnnnnnnnnnnnnnnnnnnnnnnnnnnnnnnnnnnnnnnnnnnnnnnnnnnnnnnnnnnnnnnnnnnnnnnnnnnnnnnnnnnnnnnnnnnnnnnnnnnnnnnnnnnnnnnnnnnnnnnnnnnnnnnnnnnnnnnnnnnnnnnnnnnnnnnnnnnnnnnnnnnnnnnnnnnnnnnnnnnnnnnnnnnnnnnnnnnnnnnnnnnnnnnnnnnnnnnnnnnnnnnnnnnnnnnnnnnnnnnnnnnnnnnnnnnnnnnnnnnnnnnnnnnnnnnnnnnnnnnnnnnnnnnnnnnnnnnnnnnnnnnnnnnnnnnnnnnnnnnnnnnnnnnnnnnnnnnnnnnnnnnnnnnnnnnnnnnnnnnnnnnnnnnnnnnnnnnnnnnnnnnnnnnnnnnnnnnnnnnnnnnnnnnnnnnnnnnnnnnnnnnnnnnnnnnnnnnnnnnnnnnnnnnnnnnnnnnnnnnnnnnnnnnnnnnnnnnnnnnnnnnnnnnnnnnnnnnnnnnnnnnnnnnnnnnnnnnnnnnnnnnnnnnnnnnnnnnnnnnnnnnnnnnnnnnnnnnnnnnnnnnnnnnnnnnnnnnnnnnnnnnnnnnnnnnnnnnnnnnnnnnnnnnnnnnnnnnnnnnnnnnnnnnnnnnnnnnnnnnnnnnnnnnnnnnnnnnnnnnnnnnnnnnnnnnnnnnnnnnnnnnnnnnnnnnnnnnnnnnnnnnnnnnnnnnnnnnnnnnnnnnnnnnnnnnnnnnnnnnnnnnnnnnnnnnnnnnnnnnnnnnnnnnnnnnnnnnnnnnnnnnnnnnnnnnnnnnnnnnnnnnnnnnnnnnnnnnnnnnnnnnnnnnnnnnnnnnnnnnnnnnnnnnnnnnnnnnnnnnnnnnnnnnnnnnnnnnnnnnnnnnnnnnnnnnnnnnnnnnnnnnnnnnnnnnnnnnnnnnnnnnnnnnnnnnnnnnnnnnnnnnnnnnnnnnnnnnnnnnnnnnnnnnnnnnnnnnnnnnnnnnnnnnnnnnnnnnnnnnnnnnnnnnnnnnnnnnnnnnnnnnnnnnnnnnnnnnnnnnnnnnnnnnnnnnnnnnnnnnnnnnnnnnnnnnnnnnnnnnnnnnnnnnnnnnnnnnnnnnnnnnnnnnnnnnnnnnnnnnnnnnnnnnnnnnnnnnnnnnnnnnnnnnnnnnnnnnnnnnnnnnnnnnnnnnnnnnnnnnnnnnnnnnnnnnnnnnnnnnnnnnnnnnnnnnnnnnnnnnnnnnnnnnnnnnnnnnnnnnnnnnnnnnnnnnnnnnnnnnnnnnnnnnnnnnnnnnnnnnnnnnnnnnnnnnnnnnnnnnnnnnnnnnnnnnnnnnnnnnnnnnnnnnnnnnnnnnnnnnnnnnnnnnnnnnnnnnnnnnnnnnnnnnnnnnnnnnnnnnnnnnnnnnnnnnnnnnnnnnnnnnnnnnnnnnnnnnnnnnnnnnnnnnnnnnnnnnnnnnnnnnnnnnnnnnnnnnnnnnnnnnnnnnnnnnnnnnnnnnnnnnnnnnnnnnnnnnnnnnnnnnnnnnnnnnnnnnnnnnnnnnnnnnnnnnnnnnnnnnnnnnnnnnnnnnnnnnnnnnnnnnnnnnnnnnnnnnnnnnnnnnnnnnnnnnnnnnnnnnnnnnnnnnnnnnnnnnnnnnnnnnnnnnnnnnnnnnnnnnnnnnnnnnnnnnnnnnnnnnnnnnnnnnnnnnnnnnnnnnnnnnnnnnnnnnnnnnnnnnnnnnnnnnnnnnnnnnnnnnnnnnnnnnnnnnnnnnnnnnnnnnnnnnnnnnnnnnnnnnnnnnnnnnnnnnnnnnnnnnnnnnnnnnnnnnnnnnnnnnnnnnnnnnnnnnnnnnnnnnnnnnnnnnnnnnnnnnnnnnnnnnnnnnnnnnnnnnnnnnnnnnnnnnnnnnnnnnnnnnnnnnnnnnnnnnnnnnnnnnnnnnnnnnnnnnnnnnnnnnnnnnnnnnnnnnnnnnnnnnnnnnnnnnnnnnnnnnnnnnnnnnnnnnnnnnnnnnnnnnnnnnnnnnnnnnnnnnnnnnnnnnnnnnnnnnnnnnnnnnnnnnnnnnnnnnnnnnnnnnnnnnnnnnnnnnnnnnnnnnnnnnnnnnnnnnnnnnnnnnnnnnnnnnnnnnnnnnnnnnnnnnnnnnnnnnnnnnnnnnnnnnnnnnnnnnnnnnnnnnnnnnnnnnnnnnnnnnnnnnnnnnnnnnnnnnnnnnnnnnnnnnnnnnnnnnnnnnnnnnnnnnnnnnnnnnnnnnnnnnnnnnnnnnnnnnnnnnnnnnnnnnnnnnnnnnnnnnnnnnnnnnnnnnnnnnnnnnnnnnnnnnnnnnnnnnnnnnnnnnnnnnnnnnnnnnnnnnnnnnnnnnnnnnnnnnnnnnnnnnnnnnnnnnnnnnnnnnnnnnnnnnnnnnnnnnnnnnnnnnnnnnnnnnnnnnnnnnnnnnnnnnnnnnnnnnnnnnnnnnnnnnnnnnnnnnnnnnnnnnnnnnnnnnnnnnnnnnnnnnnnnnnnnnnnnnnnnnnnnnnnnnnnnnnnnnnnnnnnnnnnnnnnnnnnnnnnnnnnnnnnnnnnnnnnnnnnnnnnnnnnnnnnnnnnnnnnnnnnnnnnnnnnnnnnnnnnnnnnnnnnnnnnnnnnnnnnnnnnnnnnnnnnnnnnnnnnnnnnnnnnnnnnnnnnnnnnnnnnnnnnnnnnnnnnnnnnnnnnnnnnnnnnnnnnnnnnnnnnnnnnnnnnnnnnnnnnnnnnnnnnnnnnnnnnnnnnnnnnnnnnnnnnnnnnnnnnnnnnnnnnnnnnnnnnnnnnnnnnnnnnnnnnnnnnnnnnnnnnnnnnnnnnnnnnnnnnnnnnnnnnnnnnnnnnnnnnnnnnnnnnnnnnnnnnnnnnnnnnnnnnnnnnnnnnnnnnnnnnnnnnnnnnnnnnnnnnnnnnnnnnnnnnnnnnnnnnnnnnnnnnnnnnnnnnnnnnnnnnnnnnnnnnnnnnnnnnnnnnnnnnnnnnnnnnnnnnnnnnnnnnnnnnnnnnnnnnnnnnnnnnnnnnnnnnnnnnnnnnnnnnnnnnnnnnnnnnnnnnnnnnnnnnnnnnnnnnnnnnnnnnnnnnnnnnnnnnnnnnnnnnnnnnnnnnnnnnnnnnnnnnnnnnnnnnnnnnnnnnnnnnnnnnnnnnnnnnnnnnnnnnnnnnnnnnnnnnnnnnnnnnnnnnnnnnnnnnnnnnnnnnnnnnnnnnnnnnnnnnnnnnnnnnnnnnnnnnnnnnnnnnnnnnnnnnnnnnnnnnnnnnnnnnnnnnnnnnnnnnnnnnnnnnnnnnnnnnnnnnnnnnnnnnnnnnnnnnnnnnnnnnnnnnnnnnnnnnnnnnnnnnnnnnnnnnnnnnnnnnnnnnnnnnnnnnnnnnnnnnnnnnnnnnnnnnnnnnnnnnnnnnnnnnnnnnnnnnnnnnnnnnnnnnnnnnnnnnnnnnnnnnnnnnnnnnnnnnnnnnnnnnnnnnnnnnnnnnnnnnnnnnnnnnnnnnnnnnnnnnnnnnnnnnnnnnnnnnnnnnnnnnnnnnnnnnnnnnnnnnnnnnnnnnnnnnnnnnnnnnnnnnnnnnnnnnnnnnnnnnnnnnnnnnnnnnnnnnnnnnnnnnnnnnnnnnnnnnnnnnnnnnnnnnnnnnnnnnnnnnnnnnnnnnnnnnnnnnnnnnnnnnnnnnnnnnnnnnnnnnnnnnnnnnnnnnnnnnnnnnnnnnnnnnnnnnnnnnnnnnnnnnnnnnnnnnnnnnnnnnnnnnnnnnnnnnnnnnnnnnnnnnnnnnnnnnnnnnnnnnnnnnnnnnnnnnnnnnnnnnnnnnnnnnnnnnnnnnnnnnnnnnnnnnnnnnnnnnnnnnnnnnnnnnnnnnnnnnnnnnnnnnnnnnnnnnnnnnnnnnnnnnnnnnnnnnnnnnnnnnnnnnnnnnnnnnnnnnnnnnnnnnnnnnnnnnnnnnnnnnnnnnnnnnnnnnnnnnnnnnnnnnnnnnnnnnnnnnnnnnnnnnnnnnnnnnnnnnnnnnnnnnnnnnnnnnnnnnnnnnnnnnnnnnnnnnnnnnnnnnnnnnnnnnnnnnnnnnnnnnnnnnnnnnnnnnnnnnnnnnnnnnnnnnnnnnnnnnnnnnnnnnnnnnnnnnnnnnnnnnnnnnnnnnnnnnnnnnnnnnnnnnnnnnnnnnnnnnnnnnnnnnnnnnnnnnnnnnnnnnnnnnnnnnnnnnnnnnnnnnnnnnnnnnnnnnnnnnnnnnnnnnnnnnnnnnnnnnnnnnnnnnnnnnnnnnnnnnnnnnnnnnnnnnnnnnnnnnnnnnnnnnnnnnnnnnnnnnnnnnnnnnnnnnnnnnnnnnnnnnnnnnnnnnnnnnnnnnnnnnnnnnnnnnnnnnnnnnnnnnnnnnnnnnnnnnnnnnnnnnnnnnnnnnnnnnnnnnnnnnnnnnnnnnnnnnnnnnnnnnnnnnnnnnnnnnnnnnnnnnnnnnnnnnnnnnnnnnnnnnnnnnnnnnnnnnnnnnnnnnnnnnnnnnnnnnnnnnnnnnnnnnnnnnnnnnnnnnnnnnnnnnnnnnnnnnnnnnnnnnnnnnnnnnnnnnnnnnnnnnnnnnnnnnnnnnnnnnnnnnnnnnnnnnnnnnnnnnnnnnnnnnnnnnnnnnnnnnnnnnnnnnnnnnnnnnnnnnnnnnnnnnnnnnnnnnnnnnnnnnnnnnnnnnnnnnnnnnnnnnnnnnnnnnnnnnnnnnnnnnnnnnnnnnnnnnnnnnnnnnnnnnnnnnnnnnnnnnnnnnnnnnnnnnnnnnnnnnnnnnnnnnnnnnnnnnnnnnnnnnnnnnnnnnnnnnnnnnnnnnnnnnnnnnnnnnnnnnnnnnnnnnnnnnnnnnnnnnnnnnnnnnnnnnnnnnnnnnnnnnnnnnnnnnnnnnnnnnnnnnnnnnnnnnnnnnnnnnnnnnnnnnnnnnnnnnnnnnnnnnnnnnnnnnnnnnnnnnnnnnnnnnnnnnnnnnnnnnnnnnnnnnnnnnnnnnnnnnnnnnnnnnnnnnnnnnnnnnnnnnnnnnnnnnnnnnnnnnnnnnnnnnnnnnnnnnnnnnnnnnnnnnnnnnnnnnnnnnnnnnnnnnnnnnnnnnnnnnnnnnnnnnnnnnnnnnnnnnnnnnnnnnnnnnnnnnnnnnnnnnnnnnnnnnnnnnnnnnnnnnnnnnnnnnnnnnnnnnnnnnnnnnnnnnnnnnnnnnnnnnnnnnnnnnnnnnnnnnnnnnnnnnnnnnnnnnnnnnnnnnnnnnnnnnnnnnnnnnnnnnnnnnnnnnnnnnnnnnnnnnnnnnnnnnnnnnnnnnnnnnnnnnnnnnnnnnnnnnnnnnnnnnnnnnnnnnnnnnnnnnnnnnnnnnnnnnnnnnnnnnnnnnnnnnnnnnnnnnnnnnnnnnnnnnnnnnnnnnnnnnnnnnnnnnnnnnnnnnnnnnnnnnnnnnnnnnnnnnnnnnnnnnnnnnnnnnnnnnnnnnnnnnnnnnnnnnnnnnnnnnnnnnnnnnnnnnnnnnnnnnnnnnnnnnnnnnnnnnnnnnnnnnnnnnnnnnnnnnnnnnnnnnnnnnnnnnnnnnnnnnnnnnnnnnnnnnnnnnnnnnnnnnnnnnnnnnnnnnnnnnnnnnnnnnnnnnnnnnnnnnnnnnnnnnnnnnnnnnnnnnnnnnnnnnnnnnnnnnnnnnnnnnnnnnnnnnnnnnnnnnnnnnnnnnnnnnnnnnnnnnnnnnnnnnnnnnnnnnnnnnnnnnnnnnnnnnnnnnnnnnnnnnnnnnnnnnnnnnnnnnnnnnnnnnnnnnnnnnnnnnnnnnnnnnnnnnnnnnnnnnnnnnnnnnnnnnnnnnnnnnnnnnnnnnnnnnnnnnnnnnnnnnnnnnnnnnnnnnnnnnnnnnnnnnnnnnnnnnnnnnnnnnnnnnnnnnnnnnnnnnnnnnnnnnnnnnnnnnnnnnnnnnnnnnnnnnnnnnnnnnnnnnnnnnnnnnnnnnnnnnnnnnnnnnnnnnnnnnnnnnnnnnnnnnnnnnnnnnnnnnnnnnnnnnnnnnnnnnnnnnnnnnnnnnnnnnnnnnnnnnnnnnnnnnnnnnnnnnnnnnnnnnnnnnnnnnnnnnnnnnnnnnnnnnnnnnnnnnnnnnnnnnnnnnnnnnnnnnnnnnnnnnnnnnnnnnnnnnnnnnnnnnnnnnnnnnnnnnnnnnnnnnnnnnnnnnnnnnnnnnnnnnnnnnnnnnnnnnnnnnnnnnnnnnnnnnnnnnnnnnnnnnnnnnnnnnnnnnnnnnnnnnnnnnnnnnnnnnnnnnnnnnnnnnnnnnnnnnnnnnnnnnnnnnnnnnnnnnnnnnnnnnnnnnnnnnnnnnnnnnnnnnnnnnnnnnnnnnnnnnnnnnnnnnnnnnnnnnnnnnnnnnnnnnnnnnnnnnnnnnnnnnnnnnnnnnnnnnnnnnnnnnnnnnnnnnnnnnnnnnnnnnnnnnnnnnnnnnnnnnnnnnnnnnnnnnnnnnnnnnnnnnnnnnnnnnnnnnnnnnnnnnnnnnnnnnnnnnnnnnnnnnnnnnnnnnnnnnnnnnnnnnnnnnnnnnnnnnnnnnnnnnnnnnnnnnnnnnnnnnnnnnnnnnnnnnnnnnnnnnnnnnnnnnnnnnnnnnnnnnnnnnnnnnnnnnnnnnnnnnnnnnnnnnnnnnnnnnnnnnnnnnnnnnnnnnnnnnnnnnnnnnnnnnnnnnnnnnnnnnnnnnnnnnnnnnnnnnnnnnnnnnnnnnnnnnnnnnnnnnnnnnnnnnnnnnnnnnnnnnnnnnnnnnnnnnnnnnnnnnnnnnnnnnnnnnnnnnnnnnnnnnnnnnnnnnnnnnnnnnnnnnnnnnnnnnnnnnnnnnnnnnnnnnnnnnnnnnnnnnnnnnnnnnnnnnnnnnnnnnnnnnnnnnnnnnnnnnnnnnnnnnnnnnnnnnnnnnnnnnnnnnnnnnnnnnnnnnnnnnnnnnnnnnnnnnnnnnnnnnnnnnnnnnnnnnnnnnnnnnnnnnnnnnnnnnnnnnnnnnnnnnnnnnnnnnnnnnnnnnnnnnnnnnnnnnnnnnnnnnnnnnnnnnnnnnnnnnnnnnnnnnnnnnnnnnnnnnnnnnnnnnnnnnnnnnnnnnnnnnnnnnnnnnnnnnnnnnnnnnnnnnnnnnnnnnnnnnnnnnnnnnnnnnnnnnnnnnnnnnnnnnnnnnnnnnnnnnnnnnnnnnnnnnnnnnnnnnnnnnnnnnnnnnnnnnnnnnnnnnnnnnnnnnnnnnnnnnnnnnnnnnnnnnnnnnnnnnnnnnnnnnnnnnnnnnnnnnnnnnnnnnnnnnnnnnnnnnnnnnnnnnnnnnnnnnnnnnnnnnnnnnnnnnnnnnnnnnnnnnnnnnnnnnnnnnnnnnnnnnnnnnnnnnnnnnnnnnnnnnnnnnnnnnnnnnnnnnnnnnnnnnnnnnnnnnnnnnnnnnnnnnnnnnnnnnnnnnnnnnnnnnnnnnnnnnnnnnnnnnnnnnnnnnnnnnnnnnnnnnnnnnnnnnnnnnnnnnnnnnnnnnnnnnnnnnnnnnnnnnnnnnnnnnnnnnnnnnnnnnnnnnnnnnnnnnnnnnnnnnnnnnnnnnnnnnnnnnnnnnnnnnnnnnnnnnnnnnnnnnnnnnnnnnnnnnnnnnnnnnnnnnnnnnnnnnnnnnnnnnnnnnnnnnnnnnnnnnnnnnnnnnnnnnnnnnnnnnnnnnnnnnnnnnnnnnnnnnnnnnnnnnnnnnnnnnnnnnnnnnnnnnnnnnnnnnnnnnnnnnnnnnnnnnnnnnnnnnnnnnnnnnnnnnnnnnnnnnnnnnnnnnnnnnnnnnnnnnnnnnnnnnnnnnnnnnnnnnnnnnnnnnnnnnnnnnnnnnnnnnnnnnnnnnnnnnnnnnnnnnnnnnnnnnnnnnnnnnnnnnnnnnnnnnnnnnnnnnnnnnnnnnnnnnnnnnnnnnnnnnnnnnnnnnnnnnnnnnnnnnnnnnnnnnnnnnnnnnnnnnnnnnnnnnnnnnnnnnnnnnnnnnnnnnnnnnnnnnnnnnnnnnnnnnnnnnnnnnnnnnnnnnnnnnnnnnnnnnnnnnnnnnnnnnnnnnnnnnnnnnnnnnnnnnnnnnnnnnnnnnnnnnnnnnnnnnnnnnnnnnnnnnnnnnnnnnnnnnnnnnnnnnnnnnnnnnnnnnnnnnnnnnnnnnnnnnnnnnnnnnnnnnnnnnnnnnnnnnnnnnnnnnnnnnnnnnnnnnnnnnnnnnnnnnnnnnnnnnnnnnnnnnnnnnnnnnnnnnnnnnnnnnnnnnnnnnnnnnnnnnnnnnnnnnnnnnnnnnnnnnnnnnnnnnnnnnnnnnnnnnnnnnnnnnnnnnnnnnnnnnnnnnnnnnnnnnnnnnnnnnnnnnnnnnnnnnnnnnnnnnnnnnnnnnnnnnnnnnnnnnnnnnnnnnnnnnnnnnnnnnnnnnnnnnnnnnnnnnnnnnnnnnnnnnnnnnnnnnnnnnnnnnnnnnnnnnnnnnnnnnnnnnnnnnnnnnnnnnnnnnnnnnnnnnnnnnnnnnnnnnnnnnnnnnnnnnnnnnnnnnnnnnnnnnnnnnnnnnnnnnnnnnnnnnnnnnnnnnnnnnnnnnnnnnnnnnnnnnnnnnnnnnnnnnnnnnnnnnnnnnnnnnnnnnnnnnnnnnnnnnnnnnnnnnnnnnnnnnnnnnnnnnnnnnnnnnnnnnnnnnnnnnnnnnnnnnnnnnnnnnnnnnnnnnnnnnnnnnnnnnnnnnnnnnnnnnnnnnnnnnnnnnnnnnnnnnnnnnnnnnnnnnnnnnnnnnnnnnnnnnnnnnnnnnnnnnnnnnnnnnnnnnnnnnnnnnnnnnnnnnnnnnnnnnnnnnnnnnnnnnnnnnnnnnnnnnnnnnnnnnnnnnnnnnnnnnnnnnnnnnnnnnnnnnnnnnnnnnnnnnnnnnnnnnnnnnnnnnnnnnnnnnnnnnnnnnnnnnnnnnnnnnnnnnnnnnnnnnnnnnnnnnnnnnnnnnnnnnnnnnnnnnnnnnnnnnnnnnnnnnnnnnnnnnnnnnnnnnnnnnnnnnnnnnnnnnnnnnnnnnnnnnnnnnnnnnnnnnnnnnnnnnnnnnnnnnnnnnnnnnnnnnnnnnnnnnnnnnnnnnnnnnnnnnnnnnnnnnnnnnnnnnnnnnnnnnnnnnnnnnnnnnnnnnnnnnnnnnnnnnnnnnnnnnnnnnnnnnnnnnnnnnnnnnnnnnnnnnnnnnnnnnnnnnnnnnnnnnnnnnnnnnnnnnnnnnnnnnnnnnnnnnnnnnnnnnnnnnnnnnnnnnnnnnnnnnnnnnnnnnnnnnnnnnnnnnnnnnnnnnnnnnnnnnnnnnnnnnnnnnnnnnnnnnnnnnnnnnnnnnnnnnnnnnnnnnnnnnnnnnnnnnnnnnnnnnnnnnnnnnnnnnnnnnnnnnnnnnnnnnnnnnnnnnnnnnnnnnnnnnnnnnnnnnnnnnnnnnnnnnnnnnnnnnnnnnnnnnnnnnnnnnnnnnnnnnnnnnnnnnnnnnnnnnnnnnnnnnnnnnnnnnnnnnnnnnnnnnnnnnnnnnnnnnnnnnnnnnnnnnnnnnnnnnnnnnnnnnnnnnnnnnnnnnnnnnnnnnnnnnnnnnnnnnnnnnnnnnnnnnnnnnnnnnnnnnnnnnnnnnnnnnnnnnnnnnnnnnnnnnnnnnnnnnnnnnnnnnnnnnnnnnnnnnnnnnnnnnnnnnnnnnnnnnnnnnnnnnnnnnnnnnnnnnnnnnnnnnnnnnnnnnnnnnnnnnnnnnnnnnnnnnnnnnnnnnnnnnnnnnnnnnnnnnnnnnnnnnnnnnnnnnnnnnnnnnnnnnnnnnnnnnnnnnnnnnnnnnnnnnnnnnnnnnnnnnnnnnnnnnnnnnnnnnnnnnnnnnnnnnnnnnnnnnnnnnnnnnnnnnnnnnnnnnnnnnnnnnnnnnnnnnnnnnnnnnnnnnnnnnnnnnnnnnnnnnnnnnnnnnnnnnnnnnnnnnnnnnnnnnnnnnnnnnnnnnnnnnnnnnnnnnnnnnnnnnnnnnnnnnnnnnnnnnnnnnnnnnnnnnnnnnnnnnnnnnnnnnnnnnnnnnnnnnnnnnnnnnnnnnnnnnnnnnnnnnnnnnnnnnnnnnnnnnnnnnnnnnnnnnnnnnnnnnnnnnnnnnnnnnnnnnnnnnnnnnnnnnnnnnnnnnnnnnnnnnnnnnnnnnnnnnnnnnnnnnnnnnnnnnnnnnnnnnnnnnnnnnnnnnnnnnnnnnnnnnnnnnnnnnnnnnnnnnnnnnnnnnnnnnnnnnnnnnnnnnnnnnnnnnnnnnnnnnnnnnnnnnnnnnnnnnnnnnnnnnnnnnnnnnnnnnnnnnnnnnnnnnnnnnnnnnnnnnnnnnnnnnnnnnnnnnnnnnnnnnnnnnnnnnnnnnnnnnnnnnnnnnnnnnnnnnnnnnnnnnnnnnnnnnnnnnnnnnnnnnnnnnnnnnnnnnnnnnnnnnnnnnnnnnnnnnnnnnnnnnnnnnnnnnnnnnnnnnnnnnnnnnnnnnnnnnnnnnnnnnnnnnnnnnnnnnnnnnnnnnnnnnnnnnnnnnnnnnnnnnnnnnnnnnnnnnnnnnnnnnnnnnnnnnnnnnnnnnnnnnnnnnnnnnnnnnnnnnnnnnnnnnnnnnnnnnnnnnnnnnnnnnnnnnnnnnnnnnnnnnnnnnnnnnnnnnnnnnnnnnnnnnnnnnnnnnnnnnnnnnnnnnnnnnnnnnnnnnnnnnnnnnnnnnnnnnnnnnnnnnnnnnnnnnnnnnnnnnnnnnnnnnnnnnnnnnnnnnnnnnnnnnnnnnnnnnnnnnnnnnnnnnnnnnnnnnnnnnnnnnnnnnnnnnnnnnnnnnnnnnnnnnnnnnnnnnnnnnnnnnnnnnnnnnnnnnnnnnnnnnnnnnnnnnnnnnnnnnnnnnnnnnnnnnnnnnnnnnnnnnnnnnnnnnnnnnnnnnnnnnnnnnnnnnnnnnnnnnnnnnnnnnnnnnnnnnnnnnnnnnnnnnnnnnnnnnnnnnnnnnnnnnnnnnnnnnnnnnnnnnnnnnnnnnnnnnnnnnnnnnnnnnnnnnnnnnnnnnnnnnnnnnnnnnnnnnnnnnnnnnnnnnnnnnnnnnnnnnnnnnnnnnnnnnnnnnnnnnnnnnnnnnnnnnnnnnnnnnnnnnnnnnnnnnnnnnnnnnnnnnnnnnnnnnnnnnnnnnnnnnnnnnnnnnnnnnnnnnnnnnnnnnnnnnnnnnnnnnnnnnnnnnnnnnnnnnnnnnnnnnnnnnnnnnnnnnnnnnnnnnnnnnnnnnnnnnnnnnnnnnnnnnnnnnnnnnnnnnnnnnnnnnnnnnnnnnnnnnnnnnnnnnnnnnnnnnnnnnnnnnnnnnnnnnnnnnnnnnnnnnnnnnnnnnnnnnnnnnnnnnnnnnnnnnnnnnnnnnnnnnnnnnnnnnnnnnnnnnnnnnnnnnnnnnnnnnnnnnnnnnnnnnnnnnnnnnnnnnnnnnnnnnnnnnnnnnnnnnnnnnnnnnnnnnnnnnnnnnnnnnnnnnnnnnnnnnnnnnnnnnnnnnnnnnnnnnnnnnnnnnnnnnnnnnnnnnnnnnnnnnnnnnnnnnnnnnnnnnnnnnnnnnnnnnnnnnnnnnnnnnnnnnnnnnnnnnnnnnnnnnnnnnnnnnnnnnnnnnnnnnnnnnnnnnnnnnnnnnnnnnnnnnnnnnnnnnnnnnnnnnnnnnnnnnnnnnnnnnnnnnnnnnnnnnnnnnnnnnnnnnnnnnnnnnnnnnnnnnnnnnnnnnnnnnnnnnnnnnnnnnnnnnnnnnnnnnnnnnnnnnnnnnnnnnnnnnnnnnnnnnnnnnnnnnnnnnnnnnnnnnnnnnnnnnnnnnnnnnnnnnnnnnnnnnnnnnnnnnnnnnnnnnnnnnnnnnnnnnnnnnnnnnnnnnnnnnnnnnnnnnnnnnnnnnnnnnnnnnnnnnnnnnnnnnnnnnnnnnnnnnnnnnnnnnnnnnnnnnnnnnnnnnnnnnnnnnnnnnnnnnnnnnnnnnnnnnnnnnnnnnnnnnnnnnnnnnnnnnnnnnnnnnnnnnnnnnnnnnnnnnnnnnnnnnnnnnnnnnnnnnnnnnnnnnnnnnnnnnnnnnnnnnnnnnnnnnnnnnnnnnnnnnnnnnnnnnnnnnnnnnnnnnnnnnnnnnnnnnnnnnnnnnnnnnnnnnnnnnnnnnnnnnnnnnnnnnnnnnnnnnnnnnnnnnnnnnnnnnnnnnnnnnnnnnnnnnnnnnnnnnnnnnnnnnnnnnnnnnnnnnnnnnnnnnnnnnnnnnnnnnnnnnnnnnnnnnnnnnnnnnnnnnnnnnnnnnnnnnnnnnnnnnnnnnnnnnnnnnnnnnnnnnnnnnnnnnnnnnnnnnnnnnnnnnnnnnnnnnnnnnnnnnnnnnnnnnnnnnnnnnnnnnnnnnnnnnnnnnnnnnnnnnnnnnnnnnnnnnnnnnnnnnnnnnnnnnnnnnnnnnnnnnnnnnnnnnnnnnnnnnnnnnnnnnnnnnnnnnnnnnnnnnnnnnnnnnnnnnnnnnnnnnnnnnnnnnnnnnnnnnnnnnnnnnnnnnnnnnnnnnnnnnnnnnnnnnnnnnnnnnnnnnnnnnnnnnnnnnnnnnnnnnnnnnnnnnnnnnnnnnnnnnnnnnnnnnnnnnnnnnnnnnnnnnnnnnnnnnnnnnnnnnnnnnnnnnnnnnnnnnnnnnnnnnnnnnnnnnnnnnnnnnnnnnnnnnnnnnnnnnnnnnnnnnnnnnnnnnnnnnnnnnnnnnnnnnnnnnnnnnnnnnnnnnnnnnnnnnnnnnnnnnnnnnnnnnnnnnnnnnnnnnnnnnnnnnnnnnnnnnnnnnnnnnnnnnnnnnnnnnnnnnnnnnnnnnnnnnnnnnnnnnnnnnnnnnnnnnnnnnnnnnnnnnnnnnnnnnnnnnnnnnnnnnnnnnnnnnnnnnnnnnnnnnnnnnnnnnnnnnnnnnnnnnnnnnnnnnnnnnnnnnnnnnnnnnnnnnnnnnnnnnnnnnnnnnnnnnnnnnnnnnnnnnnnnnnnnnnnnnnnnnnnnnnnnnnnnnnnnnnnnnnnnnnnnnnnnnnnnnnnnnnnnnnnnnnnnnnnnnnnnnnnnnnnnnnnnnnnnnnnnnnnnnnnnnnnnnnnnnnnnnnnnnnnnnnnnnnnnnnnnnnnnnnnnnnnnnnnnnnnnnnnnnnnnnnnnnnnnnnnnnnnnnnnnnnnnnnnnnnnnnnnnnnnnnnnnnnnnnnnnnnnnnnnnnnnnnnnnnnnnnnnnnnnnnnnnnnnnnnnnnnnnnnnnnnnnnnnnnnnnnnnnnnnnnnnnnnnnnnnnnnnnnnnnnnnnnnnnnnnnnnnnnnnnnnnnnnnnnnnnnnnnnnnnnnnnnnnnnnnnnnnnnnnnnnnnnnnnnnnnnnnnnnnnnnnnnnnnnnnnnnnnnnnnnnnnnnnnnnnnnnnnnnnnnnnnnnnnnnnnnnnnnnnnnnnnnnnnnnnnnnnnnnnnnnnnnnnnnnnnnnnnnnnnnnnnnnnnnnnnnnnnnnnnnnnnnnnnnnnnnnnnnnnnnnnnnnnnnnnnnnnnnnnnnnnnnnnnnnnnnnnnnnnnnnnnnnnnnnnnnnnnnnnnnnnnnnnnnnnnnnnnnnnnnnnnnnnnnnnnnnnnnnnnnnnnnnnnnnnnnnnnnnnnnnnnnnnnnnnnnnnnnnnnnnnnnnnnnnnnnnnnnnnnnnnnnnnnnnnnnnnnnnnnnnnnnnnnnnnnnnnnnnnnnnnnnnnnnnnnnnnnnnnnnnnnnnnnnnnnnnnnnnnnnnnnnnnnnnnnnnnnnnnnnnnnnnnnnnnnnnnnnnnnnnnnnnnnnnnnnnnnnnnnnnnnnnnnnnnnnnnnnnnnnnnnnnnnnnnnnnnnnnnnnnnnnnnnnnnnnnnnnnnnnnnnnnnnnnnnnnnnnnnnnnnnnnnnnnnnnnnnnnnnnnnnnnnnnnnnnnnnnnnnnnnnnnnnnnnnnnnnnnnnnnnnnnnnnnnnnnnnnnnnnnnnnnnnnnnnnnnnnnnnnnnnnnnnnnnnnnnnnnnnnnnnnnnnnnnnnnnnnnnnnnnnnnnnnnnnnnnnnnnnnnnnnnnnnnnnnnnnnnnnnnnnnnnnnnnnnnnnnnnnnnnnnnnnnnnnnnnnnnnnnnnnnnnnnnnnnnnnnnnnnnnnnnnnnnnnnnnnnnnnnnnnnnnnnnnnnnnnnnnnnnnnnnnnnnnnnnnnnnnnnnnnnnnnnnnnnnnnnnnnnnnnnnnnnnnnnnnnnnnnnnnnnnnnnnnnnnnnnnnnnnnnnnnnnnnnnnnnnnnnnnnnnnnnnnnnnnnnnnnnnnnnnnnnnnnnnnnnnnnnnnnnnnnnnnnnnnnnnnnnnnnnnnnnnnnnnnnnnnnnnnnnnnnnnnnnnnnnnnnnnnnnnnnnnnnnnnnnnnnnnnnnnnnnnnnnnnnnnnnnnnnnnnnnnnnnnnnnnnnnnnnnnnnnnnnnnnnnnnnnnnnnnnnnnnnnnnnnnnnnnnnnnnnnnnnnnnnnnnnnnnnnnnnnnnnnnnnnnnnnnnnnnnnnnnnnnnnnnnnnnnnnnnnnnnnnnnnnnnnnnnnnnnnnnnnnnnnnnnnnnnnnnnnnnnnnnnnnnnnnnnnnnnnnnnnnnnnnnnnnnnnnnnnnnnnnnnnnnnnnnnnnnnnnnnnnnnnnnnnnnnnnnnnnnnnnnnnnnnnnnnnnnnnnnnnnnnnnnnnnnnnnnnnnnnnnnnnnnnnnnnnnnnnnnnnnnnnnnnnnnnnnnnnnnnnnnnnnnnnnnnnnnnnnnnnnnnnnnnnnnnnnnnnnnnnnnnnnnnnnnnnnnnnnnnnnnnnnnnnnnnnnnnnnnnnnnnnnnnnnnnnnnnnnnnnnnnnnnnnnnnnnnnnnnnnnnnnnnnnnnnnnnnnnnnnnnnnnnnnnnnnnnnnnnnnnnnnnnnnnnnnnnnnnnnnnnnnnnnnnnnnnnnnnnnnnnnnnnnnnnnnnnnnnnnnnnnnnnnnnnnnnnnnnnnnnnnnnnnnnnnnnnnnnnnnnnnnnnnnnnnnnnnnnnnnnnnnnnnnnnnnnnnnnnnnnnnnnnnnnnnnnnnnnnnnnnnnnnnnnnnnnnnnnnnnnnnnnnnnnnnnnnnnnnnnnnnnnnnnnnnnnnnnnnnnnnnnnnnnnnnnnnnnnnnnnnnnnnnnnnnnnnnnnnnnnnnnnnnnnnnnnnnnnnnnnnnnnnnnnnnnnnnnnnnnnnnnnnnnnnnnnnnnnnnnnnnnnnnnnnnnnnnnnnnnnnnnnnnnnnnnnnnnnnnnnnnnnnnnnnnnnnnnnnnnnnnnnnnnnnnnnnnnnnnnnnnnnnnnnnnnnnnnnnnnnnnnnnnnnnnnnnnnnnnnnnnnnnnnnnnnnnnnnnnnnnnnnnnnnnnnnnnnnnnnnnnnnnnnnnnnnnnnnnnnnnnnnnnnnnnnnnnnnnnnnnnnnnnnnnnnnnnnnnnnnnnnnnnnnnnnnnnnnnnnnnnnnnnnnnnnnnnnnnnnnnnnnnnnnnnnnnnnnnnnnnnnnnnnnnnnnnnnnnnnnnnnnnnnnnnnnnnnnnnnnnnnnnnnnnnnnnnnnnnnnnnnnnnnnnnnnnnnnnnnnnnnnnnnnnnnnnnnnnnnnnnnnnnnnnnnnnnnnnnnnnnnnnnnnnnnnnnnnnnnnnnnnnnnnnnnnnnnnnnnnnnnnnnnnnnnnnnnnnnnnnnnnnnnnnnnnnnnnnnnnnnnnnnnnnnnnnnnnnnnnnnnnnnnnnnnnnnnnnnnnnnnnnnnnnnnnnnnnnnnnnnnnnnnnnnnnnnnnnnnnnnnnnnnnnnnnnnnnnnnnnnnnnnnnnnnnnnnnnnnnnnnnnnnnnnnnnnnnnnnnnnnnnnnnnnnnnnnnnnnnnnnnnnnnnnnnnnnnnnnnnnnnnnnnnnnnnnnnnnnnnnnnnnnnnnnnnnnnnnnnnnnnnnnnnnnnnnnnnnnnnnnnnnnnnnnnnnnnnnnnnnnnnnnnnnnnnnnnnnnnnnnnnnnnnnnnnnnnnnnnnnnnnnnnnnnnnnnnnnnnnnnnnnnnnnnnnnnnnnnnnnnnnnnnnnnnnnnnnnnnnnnnnnnnnnnnnnnnnnnnnnnnnnnnnnnnnnnnnnnnnnnnnnnnnnnnnnnnnnnnnnnnnnnnnnnnnnnnnnnnnnnnnnnnnnnnnnnnnnnnnnnnnnnnnnnnnnnnnnnnnnnnnnnnnnnnnnnnnnnnnnnnnnnnnnnnnnnnnnnnnnnnnnnnnnnnnnnnnnnnnnnnnnnnnnnnnnnnnnnnnnnnnnnnnnnnnnnnnnnnnnnnnnnnnnnnnnnnnnnnnnnnnnnnnnnnnnnnnnnnnnnnnnnnnnnnnnnnnnnnnnnnnnnnnnnnnnnnnnnnnnnnnnnnnnnnnnnnnnnnnnnnnnnnnnnnnnnnnnnnnnnnnnnnnnnnnnnnnnnnnnnnnnnnnnnnnnnnnnnnnnnnnnnnnnnnnnnnnnnnnnnnnnnnnnnnnnnnnnnnnnnnnnnnnnnnnnnnnnnnnnnnnnnnnnnnnnnnnnnnnnnnnnnnnnnnnnnnnnnnnnnnnnnnnnnnnnnnnnnnnnnnnnnnnnnnnnnnnnnnnnnnnnnnnnnnnnnnnnnnnnnnnnnnnnnnnnnnnnnnnnnnnnnnnnnnnnnnnnnnnnnnnnnnnnnnnnnnnnnnnnnnnnnnnnnnnnnnnnnnnnnnnnnnnnnnnnnnnnnnnnnnnnnnnnnnnnnnnnnnnnnnnnnnnnnnnnnnnnnnnnnnnnnnnnnnnnnnnnnnnnnnnnnnnnnnnnnnnnnnnnnnnnnnnnnnnnnnnnnnnnnnnnnnnnnnnnnnnnnnnnnnnnnnnnnnnnnnnnnnnnnnnnnnnnnnnnnnnnnnnnnnnnnnnnnnnnnnnnnnnnnnnnnnnnnnnnnnnnnnnnnnnnnnnnnnnnnnnnnnnnnnnnnnnnnnnnnnnnnnnnnnnnnnnnnnnnnnnnnnnnnnnnnnnnnnnnnnnnnnnnnnnnnnnnnnnnnnnnnnnnnnnnnnnnnnnnnnnnnnnnnnnnnnnnnnnnnnnnnnnnnnnnnnnnnnnnnnnnnnnnnnnnnnnnnnnnnnnnnnnnnnnnnnnnnnnnnnnnnnnnnnnnnnnnnnnnnnnnnnnnnnnnnnnnnnnnnnnnnnnnnnnnnnnnnnnnnnnnnnnnnnnnnnnnnnnnnnnnnnnnnnnnnnnnnnnnnnnnnnnnnnnnnnnnnnnnnnnnnnnnnnnnnnnnnnnnnnnnnnnnnnnnnnnnnnnnnnnnnnnnnnnnnnnnnnnnnnnnnnnnnnnnnnnnnnnnnnnnnnnnnnnnnnnnnnnnnnnnnnnnnnnnnnnnnnnnnnnnnnnnnnnnnnnnnnnnnnnnnnnnnnnnnnnnnnnnnnnnnnnnnnnnnnnnnnnnnnnnnnnnnnnnnnnnnnnnnnnnnnnnnnnnnnnnnnnnnnnnnnnnnnnnnnnnnnnnnnnnnnnnnnnnnnnnnnnnnnnnnnnnnnnnnnnnnnnnnnnnnnnnnnnnnnnnnnnnnnnnnnnnnnnnnnnnnnnnnnnnnnnnnnnnnnnnnnnnnnnnnnnnnnnnnnnnnnnnnnnnnnnnnnnnnnnnnnnnnnnnnnnnnnnnnnnnnnnnnnnnnnnnnnnnnnnnnnnnnnnnnnnnnnnnnnnnnnnnnnnnnnnnnnnnnnnnnnnnnnnnnnnnnnnnnnnnnnnnnnnnnnnnnnnnnnnnnnnnnnnnnnnnnnnnnnnnnnnnnnnnnnnnnnnnnnnnnnnnnnnnnnnnnnnnnnnnnnnnnnnnnnnnnnnnnnnnnnnnnnnnnnnnnnnnnnnnnnnnnnnnnnnnnnnnnnnnnnnnnnnnnnnnnnnnnnnnnnnnnnnnnnnnnnnnnnnnnnnnnnnnnnnnnnnnnnnnnnnnnnnnnnnnnnnnnnnnnnnnnnnnnnnnnnnnnnnnnnnnnnnnnnnnnnnnnnnnnnnnnnnnnnnnnnnnnnnnnnnnnnnnnnnnnnnnnnnnnnnnnnnnnnnnnnnnnnnnnnnnnnnnnnnnnnnnnnnnnnnnnnnnnnnnnnnnnnnnnnnnnnnnnnnnnnnnnnnnnnnnnnnnnnnnnnnnnnnnnnnnnnnnnnnnnnnnnnnnnnnnnnnnnnnnnnnnnnnnnnnnnnnnnnnnnnnnnnnnnnnnnnnnnnnnnnnnnnnnnnnnnnnnnnnnnnnnnnnnnnnnnnnnnnnnnnnnnnnnnnnnnnnnnnnnnnnnnnnnnnnnnnnnnnnnnnnnnnnnnnnnnnnnnnnnnnnnnnnnnnnnnnnnnnnnnnnnnnnnnnnnnnnnnnnnnnnnnnnnnnnnnnnnnnnnnnnnnnnnnnnnnnnnnnnnnnnnnnnnnnnnnnnnnnnnnnnnnnnnnnnnnnnnnnnnnnnnnnnnnnnnnnnnnnnnnnnnnnnnnnnnnnnnnnnnnnnnnnnnnnnnnnnnnnnnnnnnnnnnnnnnnnnnnnnnnnnnnnnnnnnnnnnnnnnnnnnnnnnnnnnnnnnnnnnnnnnnnnnnnnnnnnnnnnnnnnnnnnnnnnnnnnnnnnnnnnnnnnnnnnnnnnnnnnnnnnnnnnnnnnnnnnnnnnnnnnnnnnnnnnnnnnnnnnnnnnnnnnnnnnnnnnnnnnnnnnnnnnnnnnnnnnnnnnnnnnnnnnnnnnnnnnnnnnnnnnnnnnnnnnnnnnnnnnnnnnnnnnnnnnnnnnnnnnnnnnnnnnnnnnnnnnnnnnnnnnnnnnnnnnnnnnnnnnnnnnnnnnnnnnnnnnnnnnnnnnnnnnnnnnnnnnnnnnnnnnnnnnnnnnnnnnnnnnnnnnnnnnnnnnnnnnnnnnnnnnnnnnnnnnnnnnnnnnnnnnnnnnnnnnnnnnnnnnnnnnnnnnnnnnnnnnnnnnnnnnnnnnnnnnnnnnnnnnnnnnnnnnnnnnnnnnnnnnnnnnnnnnnnnnnnnnnnnnnnnnnnnnnnnnnnnnnnnnnnnnnnnnnnnnnnnnnnnnnnnnnnnnnnnnnnnnnnnnnnnnnnnnnnnnnnnnnnnnnnnnnnnnnnnnnnnnnnnnnnnnnnnnnnnnnnnnnnnnnnnnnnnnnnnnnnnnnnnnnnnnnnnnnnnnnnnnnnnnnnnnnnnnnnnnnnnnnnnnnnnnnnnnnnnnnnnnnnnnnnnnnnnnnnnnnnnnnnnnnnnnnnnnnnnnnnnnnnnnnnnnnnnnnnnnnnnnnnnnnnnnnnnnnnnnnnnnnnnnnnnnnnnnnnnnnnnnnnnnnnnnnnnnnnnnnnnnnnnnnnnnnnnnnnnnnnnnnnnnnnnnnnnnnnnnnnnnnnnnnnnnnnnnnnnnnnnnnnnnnnnnnnnnnnnnnnnnnnnnnnnnnnnnnnnnnnnnnnnnnnnnnnnnnnnnnnnnnnnnnnnnnnnnnnnnnnnnnnnnnnnnnnnnnnnnnnnnnnnnnnnnnnnnnnnnnnnnnnnnnnnnnnnnnnnnnnnnnnnnnnnnnnnnnnnnnnnnnnnnnnnnnnnnnnnnnnnnnnnnnnnnnnnnnnnnnnnnnnnnnnnnnnnnnnnnnnnnnnnnnnnnnnnnnnnnnnnnnnnnnnnnnnnnnnnnnnnnnnnnnnnnnnnnnnnnnnnnnnnnnnnnnnnnnnnnnnnnnnnnnnnnnnnnnnnnnnnnnnnnnnnnnnnnnnnnnnnnnnnnnnnnnnnnnnnnnnnnnnnnnnnnnnnnnnnnnnnnnnnnnnnnnnnnnnnnnnnnnnnnnnnnnnnnnnnnnnnnnnnnnnnnnnnnnnnnnnnnnnnnnnnnnnnnnnnnnnnnnnnnnnnnnnnnnnnnnnnnnnnnnnnnnnnnnnnnnnnnnnnnnnnnnnnnnnnnnnnnnnnnnnnnnnnnnnnnnnnnnnnnnnnnnnnnnnnnnnnnnnnnnnnnnnnnnnnnnnnnnnnnnnnnnnnnnnnnnnnnnnnnnnnnnnnnnnnnnnnnnnnnnnnnnnnnnnnnnnnnnnnnnnnnnnnnnnnnnnnnnnnnnnnnnnnnnnnnnnnnnnnnnnnnnnnnnnnnnnnnnnnnnnnnnnnnnnnnnnnnnnnnnnnnnnnnnnnnnnnnnnnnnnnnnnnnnnnnnnnnnnnnnnnnnnnnnnnnnnnnnnnnnnnnnnnnnnnnnnnnnnnnnnnnnnnnnnnnnnnnnnnnnnnnnnnnnnnnnnnnnnnnnnnnnnnnnnnnnnnnnnnnnnnnnnnnnnnnnnnnnnnnnnnnnnnnnnnnnnnnnnnnnnnnnnnnnnnnnnnnnnnnnnnnnnnnnnnnnnnnnnnnnnnnnnnnnnnnnnnnnnnnnnnnnnnnnnnnnnnnnnnnnnnnnnnnnnnnnnnnnnnnnnnnnnnnnnnnnnnnnnnnnnnnnnnnnnnnnnnnnnnnnnnnnnnnnnnnnnnnnnnnnnnnnnnnnnnnnnnnnnnnnnnnnnnnnnnnnnnnnnnnnnnnnnnnnnnnnnnnnnnnnnnnnnnnnnnnnnnnnnnnnnnnnnnnnnnnnnnnnnnnnnnnnnnnnnnnnnnnnnnnnnnnnnnnnnnnnnnnnnnnnnnnnnnnnnnnnnnnnnnnnnnnnnnnnnnnnnnnnnnnnnnnnnnnnnnnnnnnnnnnnnnnnnnnnnnnnnnnnnnnnnnnnnnnnnnnnnnnnnnnnnnnnnnnnnnnnnnnnnnnnnnnnnnnnnnnnnnnnnnnnnnnnnnnnnnnnnnnnnnnnnnnnnnnnnnnnnnnnnnnnnnnnnnnnnnnnnnnnnnnnnnnnnnnnnnnnnnnnnnnnnnnnnnnnnnnnnnnnnnnnnnnnnnnnnnnnnnnnnnnnnnnnnnnnnnnnnnnnnnnnnnnnnnnnnnnnnnnnnnnnnnnnnnnnnnnnnnnnnnnnnnnnnnnnnnnnnnnnnnnnnnnnnnnnnnnnnnnnnnnnnnnnnnnnnnnnnnnnnnnnnnnnnnnnnnnnnnnnnnnnnnnnnnnnnnnnnnnnnnnnnnnnnnnnnnnnnnnnnnnnnnnnnnnnnnnnnnnnnnnnnnnnnnnnnnnnnnnnnnnnnnnnnnnnnnnnnnnnnnnnnnnnnnnnnnnnnnnnnnnnnnnnnnnnnnnnnnnnnnnnnnnnnnnnnnnnnnnnnnnnnnnnnnnnnnnnnnnnnnnnnnnnnnnnnnnnnnnnnnnnnnnnnnnnnnnnnnnnnnnnnnnnnnnnnnnnnnnnnnnnnnnnnnnnnnnnnnnnnnnnnnnnnnnnnnnnnnnnnnnnnnnnnnnnnnnnnnnnnnnnnnnnnnnnnnnnnnnnnnnnnnnnnnnnnnnnnnnnnnnnnnnnnnnnnnnnnnnnnnnnnnnnnnnnnnnnnnnnnnnnnnnnnnnnnnnnnnnnnnnnnnnnnnnnnnnnnnnnnnnnnnnnnnnnnnnnnnnnnnnnnnnnnnnnnnnnnnnnnnnnnnnnnnnnnnnnnnnnnnnnnnnnnnnnnnnnnnnnnnnnnnnnnnnnnnnnnnnnnnnnnnnnnnnnnnnnnnnnnnnnnnnnnnnnnnnnnnnnnnnnnnnnnnnnnnnnnnnnnnnnnnnnnnnnnnnnnnnnnnnnnnnnnnnnnnnnnnnnnnnnnnnnnnnnnnnnnnnnnnnnnnnnnnnnnnnnnnnnnnnnnnnnnnnnnnnnnnnnnnnnnnnnnnnnnnnnnnnnnnnnnnnnnnnnnnnnnnnnnnnnnnnnnnnnnnnnnnnnnnnnnnnnnnnnnnnnnnnnnnnnnnnnnnnnnnnnnnnnnnnnnnnnnnnnnnnnnnnnnnnnnnnnnnnnnnnnnnnnnnnnnnnnnnnnnnnnnnnnnnnnnnnnnnnnnnnnnnnnnnnnnnnnnnnnnnnnnnnnnnnnnnnnnnnnnnnnnnnnnnnnnnnnnnnnnnnnnnnnnnnnnnnnnnnnnnnnnnnnnnnnnnnnnnnnnnnnnnnnnnnnnnnnnnnnnnnnnnnnnnnnnnnnnnnnnnnnnnnnnnnnnnnnnnnnnnnnnnnnnnnnnnnnnnnnnnnnnnnnnnnnnnnnnnnnnnnnnnnnnnnnnnnnnnnnnnnnnnnnnnnnnnnnnnnnnnnnnnnnnnnnnnnnnnnnnnnnnnnnnnnnnnnnnnnnnnnnnnnnnnnnnnnnnnnnnnnnnnnnnnnnnnnnnnnnnnnnnnnnnnnnnnnnnnnnnnnnnnnnnnnnnnnnnnnnnnnnnnnnnnnnnnnnnnnnnnnnnnnnnnnnnnnnnnnnnnnnnnnnnnnnnnnnnnnnnnnnnnnnnnnnnnnnnnnnnnnnnnnnnnnnnnnnnnnnnnnnnnnnnnnnnnnnnnnnnnnnnnnnnnnnnnnnnnnnnnnnnnnnnnnnnnnnnnnnnnnnnnnnnnnnnnnnnnnnnnnnnnnnnnnnnnnnnnnnnnnnnnnnnnnnnnnnnnnnnnnnnnnnnnnnnnnnnnnnnnnnnnnnnnnnnnnnnnnnnnnnnnnnnnnnnnnnnnnnnnnnnnnnnnnnnnnnnnnnnnnnnnnnnnnnnnnnnnnnnnnnnnnnnnnnnnnnnnnnnnnnnnnnnnnnnnnnnnnnnnnnnnnnnnnnnnnnnnnnnnnnnnnnnnnnnnnnnnnnnnnnnnnnnnnnnnnnnnnnnnnnnnnnnnnnnnnnnnnnnnnnnnnnnnnnnnnnnnnnnnnnnnnnnnnnnnnnnnnnnnnnnnnnnnnnnnnnnnnnnnnnnnnnnnnnnnnnnnnnnnnnnnnnnnnnnnnnnnnnnnnnnnnnnnnnnnnnnnnnnnnnnnnnnnnnnnnnnnnnnnnnnnnnnnnnnnnnnnnnnnnnnnnnnnnnnnnnnnnnnnnnnnnnnnnnnnnnnnnnnnnnnnnnnnnnnnnnnnnnnnnnnnnnnnnnnnnnnnnnnnnnnnnnnnnnnnnnnnnnnnnnnnnnnnnnnnnnnnnnnnnnnnnnnnnnnnnnnnnnnnnnnnnnnnnnnnnnnnnnnnnnnnnnnnnnnnnnnnnnnnnnnnnnnnnnnnnnnnnnnnnnnnnnnnnnnnnnnnnnnnnnnnnnnnnnnnnnnnnnnnnnnnnnnnnnnnnnnnnnnnnnnnnnnnnnnnnnnnnnnnnnnnnnnnnnnnnnnnnnnnnnnnnnnnnnnnnnnnnnnnnnnnnnnnnnnnnnnnnnnnnnnnnnnnnnnnnnnnnnnnnnnnnnnnnnnnnnnnnnnnnnnnnnnnnnnnnnnnnnnnnnnnnnnnnnnnnnnnnnnnnnnnnnnnnnnnnnnnnnnnnnnnnnnnnnnnnnnnnnnnnnnnnnnnnnnnnnnnnnnnnnnnnnnnnnnnnnnnnnnnnnnnnnnnnnnnnnnnnnnnnnnnnnnnnnnnnnnnnnnnnnnnnnnnnnnnnnnnnnnnnnnnnnnnnnnnnnnnnnnnnnnnnnnnnnnnnnnnnnnnnnnnnnnnnnnnnnnnnnnnnnnnnnnnnnnnnnnnnnnnnnnnnnnnnnnnnnnnnnnnnnnnnnnnnnnnnnnnnnnnnnnnnnnnnnnnnnnnnnnnnnnnnnnnnnnnnnnnnnnnnnnnnnnnnnnnnnnnnnnnnnnnnnnnnnnnnnnnnnnnnnnnnnnnnnnnnnnnnnnnnnnnnnnnnnnnnnnnnnnnnnnnnnnnnnnnnnnnnnnnnnnnnnnnnnnnnnnnnnnnnnnnnnnnnnnnnnnnnnnnnnnnnnnnnnnnnnnnnnnnnnnnnnnnnnnnnnnnnnnnnnnnnnnnnnnnnnnnnnnnnnnnnnnnnnnnnnnnnnnnnnnnnnnnnnnnnnnnnnnnnnnnnnnnnnnnnnnnnnnnnnnnnnnnnnnnnnnnnnnnnnnnnnnnnnnnnnnnnnnnnnnnnnnnnnnnnnnnnnnnnnnnnnnnnnnnnnnnnnnnnnnnnnnnnnnnnnnnnnnnnnnnnnnnnnnnnnnnnnnnnnnnnnnnnnnnnnnnnnnnnnnnnnnnnnnnnnnnnnnnnnnnnnnnnnnnnnnnnnnnnnnnnnnnnnnnnnnnnnnnnnnnnnnnnnnnnnnnnnnnnnnnnnnnnnnnnnnnnnnnnnnnnnnnnnnnnnnnnnnnnnnnnnnnnnnnnnnnnnnnnnnnnnnnnnnnnnnnnnnnnnnnnnnnnnnnnnnnnnnnnnnnnnnnnnnnnnnnnnnnnnnnnnnnnnnnnnnnnnnnnnnnnnnnnnnnnnnnnnnnnnnnnnnnnnnnnnnnnnnnnnnnnnnnnnnnnnnnnnnnnnnnnnnnnnnnnnnnnnnnnnnnnnnnnnnnnnnnnnnnnnnnnnnnnnnnnnnnnnnnnnnnnnnnnnnnnnnnnnnnnnnnnnnnnnnnnnnnnnnnnnnnnnnnnnnnnnnnnnnnnnnnnnnnnnnnnnnnnnnnnnnnnnnnnnnnnnnnnnnnnnnnnnnnnnnnnnnnnnnnnnnnnnnnnnnnnnnnnnnnnnnnnnnnnnnnnnnnnnnnnnnnnnnnnnnnnnnnnnnnnnnnnnnnnnnnnnnnnnnnnnnnnnnnnnnnnnnnnnnnnnnnnnnnnnnnnnnnnnnnnnnnnnnnnnnnnnnnnnnnnnnnnnnnnnnnnnnnnnnnnnnnnnnnnnnnnnnnnnnnnnnnnnnnnnnnnnnnnnnnnnnnnnnnnnnnnnnnnnnnnnnnnnnnnnnnnnnnnnnnnnnnnnnnnnnnnnnnnnnnnnnnnnnnnnnnnnnnnnnnnnnnnnnnnnnnnnnnnnnnnnnnnnnnnnnnnnnnnnnnnnnnnnnnnnnnnnnnnnnnnnnnnnnnnnnnnnnnnnnnnnnnnnnnnnnnnnnnnnnnnnnnnnnnnnnnnnnnnnnnnnnnnnnnnnnnnnnnnnnnnnnnnnnnnnnnnnnnnnnnnnnnnnnnnnnnnnnnnnnnnnnnnnnnnnnnnnnnnnnnnnnnnnnnnnnnnnnnnnnnnnnnnnnnnnnnnnnnnnnnnnnnnnnnnnnnnnnnnnnnnnnnnnnnnnnnnnnnnnnnnnnnnnnnnnnnnnnnnnnnnnnnnnnnnnnnnnnnnnnnnnnnnnnnnnnnnnnnnnnnnnnnnnnnnnnnnnnnnnnnnnnnnnnnnnnnnnnnnnnnnnnnnnnnnnnnnnnnnnnnnnnnnnnnnnnnnnnnnnnnnnnnnnnnnnnnnnnnnnnnnnnnnnnnnnnnnnnnnnnnnnnnnnnnnnnnnnnnnnnnnnnnnnnnnnnnnnnnnnnnnnnnnnnnnnnnnnnnnnnnnnnnnnnnnnnnnnnnnnnnnnnnnnnnnnnnnnnnnnnnnnnnnnnnnnnnnnnnnnnnnnnnnnnnnnnnnnnnnnnnnnnnnnnnnnnnnnnnnnnnnnnnnnnnnnnnnnnnnnnnnnnnnnnnnnnnnnnnnnnnnnnnnnnnnnnnnnnnnnnnnnnnnnnnnnnnnnnnnnnnnnnnnnnnnnnnnnnnnnnnnnnnnnnnnnnnnnnnnnnnnnnnnnnnnnnnnnnnnnnnnnnnnnnnnnnnnnnnnnnnnnnnnnnnnnnnnnnnnnnnnnnnnnnnnnnnnnnnnnnnnnnnnnnnnnnnnnnnnnnnnnnnnnnnnnnnnnnnnnnnnnnnnnnnnnnnnnnnnnnnnnnnnnnnnnnnnnnnnnnnnnnnnnnnnnnnnnnnnnnnnnnnnnnnnnnnnnnnnnnnnnnnnnnnnnnnnnnnnnnnnnnnnnnnnnnnnnnnnnnnnnnnnnnnnnnnnnnnnnnnnnnnnnnnnnnnnnnnnnnnnnnnnnnnnnnnnnnnnnnnnnnnnnnnnnnnnnnnnnnnnnnnnnnnnnnnnnnnnnnnnnnnnnnnnnnnnnnnnnnnnnnnnnnnnnnnnnnnnnnnnnnnnnnnnnnnnnnnnnnnnnnnnnnnnnnnnnnnnnnnnnnnnnnnnnnnnnnnnnnnnnnnnnnnnnnnnnnnnnnnnnnnnnnnnnnnnnnnnnnnnnnnnnnnnnnnnnnnnnnnnnnnnnnnnnnnnnnnnnnnnnnnnnnnnnnnnnnnnnnnnnnnnnnnnnnnnnnnnnnnnnnnnnnnnnnnnnnnnnnnnnnnnnnnnnnnnnnnnnnnnnnnnnnnnnnnnnnnnnnnnnnnnnnnnnnnnnnnnnnnnnnnnnnnnnnnnnnnnnnnnnnnnnnnnnnnnnnnnnnnnnnnnnnnnnnnnnnnnnnnnnnnnnnnnnnnnnnnnnnnnnnnnnnnnnnnnnnnnnnnnnnnnnnnnnnnnnnnnnnnnnnnnnnnnnnnnnnnnnnnnnnnnnnnnnnnnnnnnnnnnnnnnnnnnnnnnnnnnnnnnnnnnnnnnnnnnnnnnnnnnnnnnnnnnnnnnnnnnnnnnnnnnnnnnnnnnnnnnnnnnnnnnnnnnnnnnnnnnnnnnnnnnnnnnnnnnnnnnnnnnnnnnnnnnnnnnnnnnnnnnnnnnnnnnnnnnnnnnnnnnnnnnnnnnnnnnnnnnnnnnnnnnnnnnnnnnnnnnnnnnnnnnnnnnnnnnnnnnnnnnnnnnnnnnnnnnnnnnnnnnnnnnnnnnnnnnnnnnnnnnnnnnnnnnnnnnnnnnnnnnnnnnnnnnnnnnnnnnnnnnnnnnnnnnnnnnnnnnnnnnnnnnnnnnnnnnnnnnnnnnnnnnnnnnnnnnnnnnnnnnnnnnnnnnnnnnnnnnnnnnnnnnnnnnnnnnnnnnnnnnnnnnnnnnnnnnnnnnnnnnnnnnnnnnnnnnnnnnnnnnnnnnnnnnnnnnnnnnnnnnnnnnnnnnnnnnnnnnnnnnnnnnnnnnnnnnnnnnnnnnnnnnnnnnnnnnnnnnnnnnnnnnnnnnnnnnnnnnnnnnnnnnnnnnnnnnnnnnnnnnnnnnnnnnnnnnnnnnnnnnnnnnnnnnnnnnnnnnnnnnnnnnnnnnnnnnnnnnnnnnnnnnnnnnnnnnnnnnnnnnnnnnnnnnnnnnnnnnnnnnnnnnnnnnnnnnnnnnnnnnnnnnnnnnnnnnnnnnnnnnnnnnnnnnnnnnnnnnnnnnnnnnnnnnnnnnnnnnnnnnnnnnnnnnnnnnnnnnnnnnnnnnnnnnnnnnnnnnnnnnnnnnnnnnnnnnnnnnnnnnnnnnnnnnnnnnnnnnnnnnnnnnnnnnnnnnnnnnnnnnnnnnnnnnnnnnnnnnnnnnnnnnnnnnnnnnnnnnnnnnnnnnnnnnnnnnnnnnnnnnnnnnnnnnnnnnnnnnnnnnnnnnnnnnnnnnnnnnnnnnnnnnnnnnnnnnnnnnnnnnnnnnnnnnnnnnnnnnnnnnnnnnnnnnnnnnnnnnnnnnnnnnnnnnnnnnnnnnnnnnnnnnnnnnnnnnnnnnnnnnnnnnnnnnnnnnnnnnnnnnnnnnnnnnnnnnnnnnnnnnnnnnnnnnnnnnnnnnnnnnnnnnnnnnnnnnnnnnnnnnnnnnnnnnnnnnnnnnnnnnnnnnnnnnnnnnnnnnnnnnnnnnnnnnnnnnnnnnnnnnnnnnnnnnnnnnnnnnnnnnnnnnnnnnnnnnnnnnnnnnnnnnnnnnnnnnnnnnnnnnnnnnnnnnnnnnnnnnnnnnnnnnnnnnnnnnnnnnnnnnnnnnnnnnnnnnnnnnnnnnnnnnnnnnnnnnnnnnnnnnnnnnnnnnnnnnnnnnnnnnnnnnnnnnnnnnnnnnnnnnnnnnnnnnnnnnnnnnnnnnnnnnnnnnnnnnnnnnnnnnnnnnnnnnnnnnnnnnnnnnnnnnnnnnnnnnnnnnnnnnnnnnnnnnnnnnnnnnnnnnnnnnnnnnnnnnnnnnnnnnnnnnnnnnnnnnnnnnnnnnnnnnnnnnnnnnnnnnnnnnnnnnnnnnnnnnnnnnnnnnnnnnnnnnnnnnnnnnnnnnnnnnnnnnnnnnnnnnnnnnnnnnnnnnnnnnnnnnnnnnnnnnnnnnnnnnnnnnnnnnnnnnnnnnnnnnnnnnnnnnnnnnnnnnnnnnnnnnnnnnnnnnnnnnnnnnnnnnnnnnnnnnnnnnnnnnnnnnnnnnnnnnnnnnnnnnnnnnnnnnnnnnnnnnnnnnnnnnnnnnnnnnnnnnnnnnnnnnnnnnnnnnnnnnnnnnnnnnnnnnnnnnnnnnnnnnnnnnnnnnnnnnnnnnnnnnnnnnnnnnnnnnnnnnnnnnnnnnnnnnnnnnnnnnnnnnnnnnnnnnnnnnnnnnnnnnnnnnnnnnnnnnnnnnnnnnnnnnnnnnnnnnnnnnnnnnnnnnnnnnnnnnnnnnnnnnnnnnnnnnnnnnnnnnnnnnnnnnnnnnnnnnnnnnnnnnnnnnnnnnnnnnnnnnnnnnnnnnnnnnnnnnnnnnnnnnnnnnnnnnnnnnnnnnnnnnnnnnnnnnnnnnnnnnnnnnnnnnnnnnnnnnnnnnnnnnnnnnnnnnnnnnnnnnnnnnnnnnnnnnnnnnnnnnnnnnnnnnnnnnnnnnnnnnnnnnnnnnnnnnnnnnnnnnnnnnnnnnnnnnnnnnnnnnnnnnnnnnnnnnnnnnnnnnnnnnnnnnnnnnnnnnnnnnnnnnnnnnnnnnnnnnnnnnnnnnnnnnnnnnnnnnnnnnnnnnnnnnnnnnnnnnnnnnnnnnnnnnnnnnnnnnnnnnnnnnnnnnnnnnnnnnnnnnnnnnnnnnnnnnnnnnnnnnnnnnnnnnnnnnnnnnnnnnnnnnnnnnnnnnnnnnnnnnnnnnnnnnnnnnnnnnnnnnnnnnnnnnnnnnnnnnnnnnnnnnnnnnnnnnnnnnnnnnnnnnnnnnnnnnnnnnnnnnnnnnnnnnnnnnnnnnnnnnnnnnnnnnnnnnnnnnnnnnnnnnnnnnnnnnnnnnnnnnnnnnnnnnnnnnnnnnnnnnnnnnnnnnnnnnnnnnnnnnnnnnnnnnnnnnnnnnnnnnnnnnnnnnnnnnnnnnnnnnnnnnnnnnnnnnnnnnnnnnnnnnnnnnnnnnnnnnnnnnnnnnnnnnnnnnnnnnnnnnnnnnnnnnnnnnnnnnnnnnnnnnnnnnnnnnnnnnnnnnnnnnnnnnnnnnnnnnnnnnnnnnnnnnnnnnnnnnnnnnnnnnnnnnnnnnnnnnnnnnnnnnnnnnnnnnnnnnnnnnnnnnnnnnnnnnnnnnnnnnnnnnnnnnnnnnnnnnnnnnnnnnnnnnnnnnnnnnnnnnnnnnnnnnnnnnnnnnnnnnnnnnnnnnnnnnnnnnnnnnnnnnnnnnnnnnnnnnnnnnnnnnnnnnnnnnnnnnnnnnnnnnnnnnnnnnnnnnnnnnnnnnnnnnnnnnnnnnnnnnnnnnnnnnnnnnnnnnnnnnnnnnnnnnnnnnnnnnnnnnnnnnnnnnnnnnnnnnnnnnnnnnnnnnnnnnnnnnnnnnnnnnnnnnnnnnnnnnnnnnnnnnnnnnnnnnnnnnnnnnnnnnnnnnnnnnnnnnnnnnnnnnnnnnnnnnnnnnnnnnnnnnnnnnnnnnnnnnnnnnnnnnnnnnnnnnnnnnnnnnnnnnnnnnnnnnnnnnnnnnnnnnnnnnnnnnnnnnnnnnnnnnnnnnnnnnnnnnnnnnnnnnnnnnnnnnnnnnnnnnnnnnnnnnnnnnnnnnnnnnnnnnnnnnnnnnnnnnnnnnnnnnnnnnnnnnnnnnnnnnnnnnnnnnnnnnnnnnnnnnnnnnnnnnnnnnnnnnnnnnnnnnnnnnnnnnnnnnnnnnnnnnnnnnnnnnnnnnnnnnnnnnnnnnnnnnnnnnnnnnnnnnnnnnnnnnnnnnnnnnnnnnnnnnnnnnnnnnnnnnnnnnnnnnnnnnnnnnnnnnnnnnnnnnnnnnnnnnnnnnnnnnnnnnnnnnnnnnnnnnnnnnnnnnnnnnnnnnnnnnnnnnnnnnnnnnnnnnnnnnnnnnnnnnnnnnnnnnnnnnnnnnnnnnnnnnnnnnnnnnnnnnnnnnnnnnnnnnnnnnnnnnnnnnnnnnnnnnnnnnnnnnnnnnnnnnnnnnnnnnnnnnnnnnnnnnnnnnnnnnnnnnnnnnnnnnnnnnnnnnnnnnnnnnnnnnnnnnnnnnnnnnnnnnnnnnnnnnnnnnnnnnnnnnnnnnnnnnnnnnnnnnnnnnnnnnnnnnnnnnnnnnnnnnnnnnnnnnnnnnnnnnnnnnnnnnnnnnnnnnnnnnnnnnnnnnnnnnnnnnnnnnnnnnnnnnnnnnnnnnnnnnnnnnnnnnnnnnnnnnnnnnnnnnnnnnnnnnnnnnnnnnnnnnnnnnnnnnnnnnnnnnnnnnnnnnnnnnnnnnnnnnnnnnnnnnnnnnnnnnnnnnnnnnnnnnnnnnnnnnnnnnnnnnnnnnnnnnnnnnnnnnnnnnnnnnnnnnnnnnnnnnnnnnnnnnnnnnnnnnnnnnnnnnnnnnnnnnnnnnnnnnnnnnnnnnnnnnnnnnnnnnnnnnnnnnnnnnnnnnnnnnnnnnnnnnnnnnnnnnnnnnnnnnnnnnnnnnnnnnnnnnnnnnnnnnnnnnnnnnnnnnnnnnnnnnnnnnnnnnnnnnnnnnnnnnnnnnnnnnnnnnnnnnnnnnnnnnnnnnnnnnnnnnnnnnnnnnnnnnnnnnnnnnnnnnnnnnnnnnnnnnnnnnnnnnnnnnnnnnnnnnnnnnnnnnnnnnnnnnnnnnnnnnnnnnnnnnnnnnnnnnnnnnnnnnnnnnnnnnnnnnnnnnnnnnnnnnnnnnnnnnnnnnnnnnnnnnnnnnnnnnnnnnnnnnnnnnnnnnnnnnnnnnnnnnnnnnnnnnnnnnnnnnnnnnnnnnnnnnnnnnnnnnnnnnnnnnnnnnnnnnnnnnnnnnnnnnnnnnnnnnnnnnnnnnnnnnnnnnnnnnnnnnnnnnnnnnnnnnnnnnnnnnnnnnnnnnnnnnnnnnnnnnnnnnnnnnnnnnnnnnnnnnnnnnnnnnnnnnnnnnnnnnnnnnnnnnnnnnnnnnnnnnnnnnnnnnnnnnnnnnnnnnnnnnnnnnnnnnnnnnnnnnnnnnnnnnnnnnnnnnnnnnnnnnnnnnnnnnnnnnnnnnnnnnnnnnnnnnnnnnnnnnnnnnnnnnnnnnnnnnnnnnnnnnnnnnnnnnnnnnnnnnnnnnnnnnnnnnnnnnnnnnnnnnnnnnnnnnnnnnnnnnnnnnnnnnnnnnnnnnnnnnnnnnnnnnnnnnnnnnnnnnnnnnnnnnnnnnnnnnnnnnnnnnnnnnnnnnnnnnnnnnnnnnnnnnnnnnnnnnnnnnnnnnnnnnnnnnnnnnnnnnnnnnnnnnnnnnnnnnnnnnnnnnnnnnnnnnnnnnnnnnnnnnnnnnnnnnnnnnnnnnnnnnnnnnnnnnnnnnnnnnnnnnnnnnnnnnnnnnnnnnnnnnnnnnnnnnnnnnnnnnnnnnnnnnnnnnnnnnnnnnnnnnnnnnnnnnnnnnnnnnnnnnnnnnnnnnnnnnnnnnnnnnnnnnnnnnnnnnnnnnnnnnnnnnnnnnnnnnnnnnnnnnnnnnnnnnnnnnnnnnnnnnnnnnnnnnnnnnnnnnnnnnnnnnnnnnnnnnnnnnnnnnnnnnnnnnnnnnnnnnnnnnnnnnnnnnnnnnnnnnnnnnnnnnnnnnnnnnnnnnnnnnnnnnnnnnnnnnnnnnnnnnnnnnnnnnnnnnnnnnnnnnnnnnnnnnnnnnnnnnnnnnnnnnnnnnnnnnnnnnnnnnnnnnnnnnnnnnnnnnnnnnnnnnnnnnnnnnnnnnnnnnnnnnnnnnnnnnnnnnnnnnnnnnnnnnnnnnnnnnnnnnnnnnnnnnnnnnnnnnnnnnnnnnnnnnnnnnnnnnnnnnnnnnnnnnnnnnnnnnnnnnnnnnnnnnnnnnnnnnnnnnnnnnnnnnnnnnnnnnnnnnnnnnnnnnnnnnnnnnnnnnnnnnnnnnnnnnnnnnnnnnnnnnnnnnnnnnnnnnnnnnnnnnnnnnnnnnnnnnnnnnnnnnnnnnnnnnnnnnnnnnnnnnnnnnnnnnnnnnnnnnnnnnnnnnnnnnnnnnnnnnnnnnnnnnnnnnnnnnnnnnnnnnnnnnnnnnnnnnnnnnnnnnnnnnnnnnnnnnnnnnnnnnnnnnnnnnnnnnnnnnnnnnnnnnnnnnnnnnnnnnnnnnnnnnnnnnnnnnnnnnnnnnnnnnnnnnnnnnnnnnnnnnnnnnnnnnnnnnnnnnnnnnnnnnnnnnnnnnnnnnnnnnnnnnnnnnnnnnnnnnnnnnnnnnnnnnnnnnnnnnnnnnnnnnnnnnnnnnnnnnnnnnnnnnnnnnnnnnnnnnnnnnnnnnnnnnnnnnnnnnnnnnnnnnnnnnnnnnnnnnnnnnnnnnnnnnnnnnnnnnnnnnnnnnnnnnnnnnnnnnnnnnnnnnnnnnnnnnnnnnnnnnnnnnnnnnnnnnnnnnnnnnnnnnnnnnnnnnnnnnnnnnnnnnnnnnnnnnnnnnnnnnnnnnnnnnnnnnnnnnnnnnnnnnnnnnnnnnnnnnnnnnnnnnnnnnnnnnnnnnnnnnnnnnnnnnnnnnnnnnnnnnnnnnnnnnnnnnnnnnnnnnnnnnnnnnnnnnnnnnnnnnnnnnnnnnnnnnnnnnnnnnnnnnnnnnnnnnnnnnnnnnnnnnnnnnnnnnnnnnnnnnnnnnnnnnnnnnnnnnnnnnnnnnnnnnnnnnnnnnnnnnnnnnnnnnnnnnnnnnnnnnnnnnnnnnnnnnnnnnnnnnnnnnnnnnnnnnnnnnnnnnnnnnnnnnnnnnnnnnnnnnnnnnnnnnnnnnnnnnnnnnnnnnnnnnnnnnnnnnnnnnnnnnnnnnnnnnnnnnnnnnnnnnnnnnnnnnnnnnnnnnnnnnnnnnnnnnnnnnnnnnnnnnnnnnnnnnnnnnnnnnnnnnnnnnnnnnnnnnnnnnnnnnnnnnnnnnnnnnnnnnnnnnnnnnnnnnnnnnnnnnnnnnnnnnnnnnnnnnnnnnnnnnnnnnnnnnnnnnnnnnnnnnnnnnnnnnnnnnnnnnnnnnnnnnnnnnnnnnnnnnnnnnnnnnnnnnnnnnnnnnnnnnnnnnnnnnnnnnnnnnnnnnnnnnnnnnnnnnnnnnnnnnnnnnnnnnnnnnnnnnnnnnnnnnnnnnnnnnnnnnnnnnnnnnnnnnnnnnnnnnnnnnnnnnnnnnnnnnnnnnnnnnnnnnnnnnnnnnnnnnnnnnnnnnnnnnnnnnnnnnnnnnnnnnnnnnnnnnnnnnnnnnnnnnnnnnnnnnnnnnnnnnnnnnnnnnnnnnnnnnnnnnnnnnnnnnnnnnnnnnnnnnnnnnnnnnnnnnnnnnnnnnnnnnnnnnnnnnnnnnnnnnnnnnnnnnnnnnnnnnnnnnnnnnnnnnnnnnnnnnnnnnnnnnnnnnnnnnnnnnnnnnnnnnnnnnnnnnnnnnnnnnnnnnnnnnnnnnnnnnnnnnnnnnnnnnnnnnnnnnnnnnnnnnnnnnnnnnnnnnnnnnnnnnnnnnnnnnnnnnnnnnnnnnnnnnnnnnnnnnnnnnnnnnnnnnnnnnnnnnnnnnnnnnnnnnnnnnnnnnnnnnnnnnnnnnnnnnnnnnnnnnnnnnnnnnnnnnnnnnnnnnnnnnnnnnnnnnnnnnnnnnnnnnnnnnnnnnnnnnnnnnnnnnnnnnnnnnnnnnnnnnnnnnnnnnnnnnnnnnnnnnnnnnnnnnnnnnnnnnnnnnnnnnnnnnnnnnnnnnnnnnnnnnnnnnnnnnnnnnnnnnnnnnnnnnnnnnnnnnnnnnnnnnnnnnnnnnnnnnnnnnnnnnnnnnnnnnnnnnnnnnnnnnnnnnnnnnnnnnnnnnnnnnnnnnnnnnnnnnnnnnnnnnnnnnnnnnnnnnnnnnnnnnnnnnnnnnnnnnnnnnnnnnnnnnnnnnnnnnnnnnnnnnnnnnnnnnnnnnnnnnnnnnnnnnnnnnnnnnnnnnnnnnnnnnnnnnnnnnnnnnnnnnnnnnnnnnnnnnnnnnnnnnnnnnnnnnnnnnnnnnnnnnnnnnnnnnnnnnnnnnnnnnnnnnnnnnnnnnnnnnnnnnnnnnnnnnnnnnnnnnnnnnnnnnnnnnnnnnnnnnnnnnnnnnnnnnnnnnnnnnnnnnnnnnnnnnnnnnnnnnnnnnnnnnnnnnnnnnnnnnnnnnnnnnnnnnnnnnnnnnnnnnnnnnnnnnnnnnnnnnnnnnnnnnnnnnnnnnnnnnnnnnnnnnnnnnnnnnnnnnnnnnnnnnnnnnnnnnnnnnnnnnnnnnnnnnnnnnnnnnnnnnnnnnnnnnnnnnnnnnnnnnnnnnnnnnnnnnnnnnnnnnnnnnnnnnnnnnnnnnnnnnnnnnnnnnnnnnnnnnnnnnnnnnnnnnnnnnnnnnnnnnnnnnnnnnnnnnnnnnnnnnnnnnnnnnnnnnnnnnnnnnnnnnnnnnnnnnnnnnnnnnnnnnnnnnnnnnnnnnnnnnnnnnnnnnnnnnnnnnnnnnnnnnnnnnnnnnnnnnnnnnnnnnnnnnnnnnnnnnnnnnnnnnnnnnnnnnnnnnnnnnnnnnnnnnnnnnnnnnnnnnnnnnnnnnnnnnnnnnnnnnnnnnnnnnnnnnnnnnnnnnnnnnnnnnnnnnnnnnnnnnnnnnnnnnnnnnnnnnnnnnnnnnnnnnnnnnnnnnnnnnnnnnnnnnnnnnnnnnnnnnnnnnnnnnnnnnnnnnnnnnnnnnnnnnnnnnnnnnnnnnnnnnnnnnnnnnnnnnnnnnnnnnnnnnnnnnnnnnnnnnnnnnnnnnnnnnnnnnnnnnnnnnnnnnnnnnnnnnnnnnnnnnnnnnnnnnnnnnnnnnnnnnnnnnnnnnnnnnnnnnnnnnnnnnnnnnnnnnnnnnnnnnnnnnnnnnnnnnnnnnnnnnnnnnnnnnnnnnnnnnnnnnnnnnnnnnnnnnnnnnnnnnnnnnnnnnnnnnnnnnnnnnnnnnnnnnnnnnnnnnnnnnnnnnnnnnnnnnnnnnnnnnnnnnnnnnnnnnnnnnnnnnnnnnnnnnnnnnnnnnnnnnnnnnnnnnnnnnnnnnnnnnnnnnnnnnnnnnnnnnnnnnnnnnnnnnnnnnnnnnnnnnnnnnnnnnnnnnnnnnnnnnnnnnnnnnnnnnnnnnnnnnnnnnnnnnnnnnnnnnnnnnnnnnnnnnnnnnnnnnnnnnnnnnnnnnnnnnnnnnnnnnnnnnnnnnnnnnnnnnnnnnnnnnnnnnnnnnnnnnnnnnnnnnnnnnnnnnnnnnnnnnnnnnnnnnnnnnnnnnnnnnnnnnnnnnnnnnnnnnnnnnnnnnnnnnnnnnnnnnnnnnnnnnnnnnnnnnnnnnnnnnnnnnnnnnnnnnnnnnnnnnnnnnnnnnnnnnnnnnnnnnnnnnnnnnnnnnnnnnnnnnnnnnnnnnnnnnnnnnnnnnnnnnnnnnnnnnnnnnnnnnnnnnnnnnnnnnnnnnnnnnnnnnnnnnnnnnnnnnnnnnnnnnnnnnnnnnnnnnnnnnnnnnnnnnnnnnnnnnnnnnnnnnnnnnnnnnnnnnnnnnnnnnnnnnnnnnnnnnnnnnnnnnnnnnnnnnnnnnnnnnnnnnnnnnnnnnnnnnnnnnnnnnnnnnnnnnnnnnnnnnnnnnnnnnnnnnnnnnnnnnnnnnnnnnnnnnnnnnnnnnnnnnnnnnnnnnnnnnnnnnnnnnnnnnnnnnnnnnnnnnnnnnnnnnnnnnnnnnnnnnnnnnnnnnnnnnnnnnnnnnnnnnnnnnnnnnnnnnnnnnnnnnnnnnnnnnnnnnnnnnnnnnnnnnnnnnnnnnnnnnnnnnnnnnnnnnnnnnnnnnnnnnnnnnnnnnnnnnnnnnnnnnnnnnnnnnnnnnnnnnnnnnnnnnnnnnnnnnnnnnnnnnnnnnnnnnnnnnnnnnnnnnnnnnnnnnnnnnnnnnnnnnnnnnnnnnnnnnnnnnnnnnnnnnnnnnnnnnnnnnnnnnnnnnnnnnnnnnnnnnnnnnnnnnnnnnnnnnnnnnnnnnnnnnnnnnnnnnnnnnnnnnnnnnnnnnnnnnnnnnnnnnnnnnnnnnnnnnnnnnnnnnnnnnnnnnnnnnnnnnnnnnnnnnnnnnnnnnnnnnnnnnnnnnnnnnnnnnnnnnnnnnnnnnnnnnnnnnnnnnnnnnnnnnnnnnnnnnnnnnnnnnnnnnnnnnnnnnnnnnnnnnnnnnnnnnnnnnnnnnnnnnnnnnnnnnnnnnnnnnnnnnnnnnnnnnnnnnnnnnnnnnnnnnnnnnnnnnnnnnnnnnnnnnnnnnnnnnnnnnnnnnnnnnnnnnnnnnnnnnnnnnnnnnnnnnnnnnnnnnnnnnnnnnnnnnnnnnnnnnnnnnnnnnnnnnnnnnnnnnnnnnnnnnnnnnnnnnnnnnnnnnnnnnnnnnnnnnnnnnnnnnnnnnnnnnnnnnnnnnnnnnnnnnnnnnnnnnnnnnnnnnnnnnnnnnnnnnnnnnnnnnnnnnnnnnnnnnnnnnnnnnnnnnnnnnnnnnnnnnnnnnnnnnnnnnnnnnnnnnnnnnnnnnnnnnnnnnnnnnnnnnnnnnnnnnnnnnnnnnnnnnnnnnnnnnnnnnnnnnnnnnnnnnnnnnnnnnnnnnnnnnnnnnnnnnnnnnnnnnnnnnnnnnnnnnnnnnnnnnnnnnnnnnnnnnnnnnnnnnnnnnnnnnnnnnnnnnnnnnnnnnnnnnnnnnnnnnnnnnnnnnnnnnnnnnnnnnnnnnnnnnnnnnnnnnnnnnnnnnnnnnnnnnnnnnnnnnnnnnnnnnnnnnnnnnnnnnnnnnnnnnnnnnnnnnnnnnnnnnnnnnnnnnnnnnnnnnnnnnnnnnnnnnnnnnnnnnnnnnnnnnnnnnnnnnnnnnnnnnnnnnnnnnnnnnnnnnnnnnnnnnnnnnnnnnnnnnnnnnnnnnnnnnnnnnnnnnnnnnnnnnnnnnnnnnnnnnnnnnnnnnnnnnnnnnnnnnnnnnnnnnnnnnnnnnnnnnnnnnnnnnnnnnnnnnnnnnnnnnnnnnnnnnnnnnnnnnnnnnnnnnnnnnnnnnnnnnnnnnnnnnnnnnnnnnnnnnnnnnnnnnnnnnnnnnnnnnnnnnnnnnnnnnnnnnnnnnnnnnnnnnnnnnnnnnnnnnnnnnnnnnnnnnnnnnnnnnnnnnnnnnnnnnnnnnnnnnnnnnnnnnnnnnnnnnnnnnnnnnnnnnnnnnnnnnnnnnnnnnnnnnnnnnnnnnnnnnnnnnnnnnnnnnnnnnnnnnnnnnnnnnnnnnnnnnnnnnnnnnnnnnnnnnnnnnnnnnnnnnnnnnnnnnnnnnnnnnnnnnnnnnnnnnnnnnnnnnnnnnnnnnnnnnnnnnnnnnnnnnnnnnnnnnnnnnnnnnnnnnnnnnnnnnnnnnnnnnnnnnnnnnnnnnnnnnnnnnnnnnnnnnnnnnnnnnnnnnnnnnnnnnnnnnnnnnnnnnnnnnnnnnnnnnnnnnnnnnnnnnnnnnnnnnnnnnnnnnnnnnnnnnnnnnnnnnnnnnnnnnnnnnnnnnnnnnnnnnnnnnnnnnnnnnnnnnnnnnnnnnnnnnnnnnnnnnnnnnnnnnnnnnnnnnnnnnnnnnnnnnnnnnnnnnnnnnnnnnnnnnnnnnnnnnnnnnnnnnnnnnnnnnnnnnnnnnnnnnnnnnnnnnnnnnnnnnnnnnnnnnnnnnnnnnnnnnnnnnnnnnnnnnnnnnnnnnnnnnnnnnnnnnnnnnnnnnnnnnnnnnnnnnnnnnnnnnnnnnnnnnnnnnnnnnnnnnnnnnnnnnnnnnnnnnnnnnnnnnnnnnnnnnnnnnnnnnnnnnnnnnnnnnnnnnnnnnnnnnnnnnnnnnnnnnnnnnnnnnnnnnnnnnnnnnnnnnnnnnnnnnnnnnnnnnnnnnnnnnnnnnnnnnnnnnnnnnnnnnnnnnnnnnnnnnnnnnnnnnnnnnnnnnnnnnnnnnnnnnnnnnnnnnnnnnnnnnnnnnnnnnnnnnnnnnnnnnnnnnnnnnnnnnnnnnnnnnnnnnnnnnnnnnnnnnnnnnnnnnnnnnnnnnnnnnnnnnnnnnnnnnnnnnnnnnnnnnnnnnnnnnnnnnnnnnnnnnnnnnnnnnnnnnnnnnnnnnnnnnnnnnnnnnnnnnnnnnnnnnnnnnnnnnnnnnnnnnnnnnnnnnnnnnnnnnnnnnnnnnnnnnnnnnnnnnnnnnnnnnnnnnnnnnnnnnnnnnnnnnnnnnnnnnnnnnnnnnnnnnnnnnnnnnnnnnnnnnnnnnnnnnnnnnnnnnnnnnnnnnnnnnnnnnnnnnnnnnnnnnnnnnnnnnnnnnnnnnnnnnnnnnnnnnnnnnnnnnnnnnnnnnnnnnnnnnnnnnnnnnnnnnnnnnnnnnnnnnnnnnnnnnnnnnnnnnnnnnnnnnnnnnnnnnnnnnnnnnnnnnnnnnnnnnnnnnnnnnnnnnnnnnnnnnnnnnnnnnnnnnnnnnnnnnnnnnnnnnnnnnnnnnnnnnnnnnnnnnnnnnnnnnnnnnnnnnnnnnnnnnnnnnnnnnnnnnnnnnnnnnnnnnnnnnnnnnnnnnnnnnnnnnnnnnnnnnnnnnnnnnnnnnnnnnnnnnnnnnnnnnnnnnnnnnnnnnnnnnnnnnnnnnnnnnnnnnnnnnnnnnnnnnnnnnnnnnnnnnnnnnnnnnnnnnnnnnnnnnnnnnnnnnnnnnnnnnnnnnnnnnnnnnnnnnnnnnnnnnnnnnnnnnnnnnnnnnnnnnnnnnnnnnnnnnnnnnnnnnnnnnnnnnnnnnnnnnnnnnnnnnnnnnnnnnnnnnnnnnnnnnnnnnnnnnnnnnnnnnnnnnnnnnnnnnnnnnnnnnnnnnnnnnnnnnnnnnnnnnnnnnnnnnnnnnnnnnnnnnnnnnnnnnnnnnnnnnnnnnnnnnnnnnnnnnnnnnnnnnnnnnnnnnnnnnnnnnnnnnnnnnnnnnnnnnnnnnnnnnnnnnnnnnnnnnnnnnnnnnnnnnnnnnnnnnnnnnnnnnnnnnnnnnnnnnnnnnnnnnnnnnnnnnnnnnnnnnnnnnnnnnnnnnnnnnnnnnnnnnnnnnnnnnnnnnnnnnnnnnnnnnnnnnnnnnnnnnnnnnnnnnnnnnnnnnnnnnnnnnnnnnnnnnnnnnnnnnnnnnnnnnnnnnnnnnnnnnnnnnnnnnnnnnnnnnnnnnnnnnnnnnnnnnnnnnnnnnnnnnnnnnnnnnnnnnnnnnnnnnnnnnnnnnnnnnnnnnnnnnnnnnnnnnnnnnnnnnnnnnnnnnnnnnnnnnnnnnnnnnnnnnnnnnnnnnnnnnnnnnnnnnnnnnnnnnnnnnnnnnnnnnnnnnnnnnnnnnnnnnnnnnnnnnnnnnnnnnnnnnnnnnnnnnnnnnnnnnnnnnnnnnnnnnnnnnnnnnnnnnnnnnnnnnnnnnnnnnnnnnnnnnnnnnnnnnnnnnnnnnnnnnnnnnnnnnnnnnnnnnnnnnnnnnnnnnnnnnnnnnnnnnnnnnnnnnnnnnnnnnnnnnnnnnnnnnnnnnnnnnnnnnnnnnnnnnnnnnnnnnnnnnnnnnnnnnnnnnnnnnnnnnnnnnnnnnnnnnnnnnnnnnnnnnnnnnnnnnnnnnnnnnnnnnnnnnnnnnnnnnnnnnnnnnnnnnnnnnnnnnnnnnnnnnnnnnnnnnnnnnnnnnnnnnnnnnnnnnnnnnnnnnnnnnnnnnnnnnnnnnnnnnnnnnnnnnnnnnnnnnnnnnnnnnnnnnnnnnnnnnnnnnnnnnnnnnnnnnnnnnnnnnnnnnnnnnnnnnnnnnnnnnnnnnnnnnnnnnnnnnnnnnnnnnnnnnnnnnnnnnnnnnnnnnnnnnnnnnnnnnnnnnnnnnnnnnnnnnnnnnnnnnnnnnnnnnnnnnnnnnnnnnnnnnnnnnnnnnnnnnnnnnnnnnnnnnnnnnnnnnnnnnnnnnnnnnnnnnnnnnnnnnnnnnnnnnnnnnnnnnnnnnnnnnnnnnnnnnnnnnnnnnnnnnnnnnnnnnnnnnnnnnnnnnnnnnnnnnnnnnnnnnnnnnnnnnnnnnnnnnnnnnnnnnnnnnnnnnnnnnnnnnnnnnnnnnnnnnnnnnnnnnnnnnnnnnnnnnnnnnnnnnnnnnnnnnnnnnnnnnnnnnnnnnnnnnnnnnnnnnnnnnnnnnnnnnnnnnnnnnnnnnnnnnnnnnnnnnnnnnnnnnnnnnnnnnnnnnnnnnnnnnnnnnnnnnnnnnnnnnnnnnnnnnnnnnnnnnnnnnnnnnnnnnnnnnnnnnnnnnnnnnnnnnnnnnnnnnnnnnnnnnnnnnnnnnnnnnnnnnnnnnnnnnnnnnnnnnnnnnnnnnnnnnnnnnnnnnnnnnnnnnnnnnnnnnnnnnnnnnnnnnnnnnnnnnnnnnnnnnnnnnnnnnnnnnnnnnnnnnnnnnnnnnnnnnnnnnnnnnnnnnnnnnnnnnnnnnnnnnnnnnnnnnnnnnnnnnnnnnnnnnnnnnnnnnnnnnnnnnnnnnnnnnnnnnnnnnnnnnnnnnnnnnnnnnnnnnnnnnnnnnnnnnnnnnnnnnnnnnnnnnnnnnnnnnnnnnnnnnnnnnnnnnnnnnnnnnnnnnnnnnnnnnnnnnnnnnnnnnnnnnnnnnnnnnnnnnnnnnnnnnnnnnnnnnnnnnnnnnnnnnnnnnnnnnnnnnnnnnnnnnnnnnnnnnnnnnnnnnnnnnnnnnnnnnnnnnnnnnnnnnnnnnnnnnnnnnnnnnnnnnnnnnnnnnnnnnnnnnnnnnnnnnnnnnnnnnnnnnnnnnnnnnnnnnnnnnnnnnnnnnnnnnnnnnnnnnnnnnnnnnnnnnnnnnnnnnnnnnnnnnnnnnnnnnnnnnnnnnnnnnnnnnnnnnnnnnnnnnnnnnnnnnnnnnnnnnnnnnnnnnnnnnnnnnnnnnnnnnnnnnnnnnnnnnnnnnnnnnnnnnnnnnnnnnnnnnnnnnnnnnnnnnnnnnnnnnnnnnnnnnnnnnnnnnnnnnnnnnnnnnnnnnnnnnnnnnnnnnnnnnnnnnnnnnnnnnnnnnnnnnnnnnnnnnnnnnnnnnnnnnnnnnnnnnnnnnnnnnnnnnnnnnnnnnnnnnnnnnnnnnnnnnnnnnnnnnnnnnnnnnnnnnnnnnnnnnnnnnnnnnnnnnnnnnnnnnnnnnnnnnnnnnnnnnnnnnnnnnnnnnnnnnnnnnnnnnnnnnnnnnnnnnnnnnnnnnnnnnnnnnnnnnnnnnnnnnnnnnnnnnnnnnnnnnnnnnnnnnnnnnnnnnnnnnnnnnnnnnnnnnnnnnnnnnnnnnnnnnnnnnnnnnnnnnnnnnnnnnnnnnnnnnnnnnnnnnnnnnnnnnnnnnnnnnnnnnnnnnnnnnnnnnnnnnnnnnnnnnnnnnnnnnnnnnnnnnnnnnnnnnnnnnnnnnnnnnnnnnnnnnnnnnnnnnnnnnnnnnnnnnnnnnnnnnnnnnnnnnnnnnnnnnnnnnnnnnnnnnnnnnnnnnnnnnnnnnnnnnnnnnnnnnnnnnnnnnnnnnnnnnnnnnnnnnnnnnnnnnnnnnnnnnnnnnnnnnnnnnnnnnnnnnnnnnnnnnnnnnnnnnnnnnnnnnnnnnnnnnnnnnnnnnnnnnnnnnnnnnnnnnnnnnnnnnnnnnnnnnnnnnnnnnnnnnnnnnnnnnnnnnnnnnnnnnnnnnnnnnnnnnnnnnnnnnnnnnnnnnnnnnnnnnnnnnnnnnnnnnnnnnnnnnnnnnnnnnnnnnnnnnnnnnnnnnnnnnnnnnnnnnnnnnnnnnnnnnnnnnnnnnnnnnnnnnnnnnnnnnnnnnnnnnnnnnnnnnnnnnnnnnnnnnnnnnnnnnnnnnnnnnnnnnnnnnnnnnnnnnnnnnnnnnnnnnnnnnnnnnnnnnnnnnnnnnnnnnnnnnnnnnnnnnnnnnnnnnnnnnnnnnnnnnnnnnnnnnnnnnnnnnnnnnnnnnnnnnnnnnnnnnnnnnnnnnnnnnnnnnnnnnnnnnnnnnnnnnnnnnnnnnnnnnnnnnnnnnnnnnnnnnnnnnnnnnnnnnnnnnnnnnnnnnnnnnnnnnnnnnnnnnnnnnnnnnnnnnnnnnnnnnnnnnnnnnnnnnnnnnnnnnnnnnnnnnnnnnnnnnnnnnnnnnnnnnnnnnnnnnnnnnnnnnnnnnnnnnnnnnnnnnnnnnnnnnnnnnnnnnnnnnnnnnnnnnnnnnnnnnnnnnnnnnnnnnnnnnnnnnnnnnnnnnnnnnnnnnnnnnnnnnnnnnnnnnnnnnnnnnnnnnnnnnnnnnnnnnnnnnnnnnnnnnnnnnnnnnnnnnnnnnnnnnnnnnnnnnnnnnnnnnnnnnnnnnnnnnnnnnnnnnnnnnnnnnnnnnnnnnnnnnnnnnnnnnnnnnnnnnnnnnnnnnnnnnnnnnnnnnnnnnnnnnnnnnnnnnnnnnnnnnnnnnnnnnnnnnnnnnnnnnnnnnnnnnnnnnnnnnnnnnnnnnnnnnnnnnnnnnnnnnnnnnnnnnnnnnnnnnnnnnnnnnnnnnnnnnnnnnnnnnnnnnnnnnnnnnnnnnnnnnnnnnnnnnnnnnnnnnnnnnnnnnnnnnnnnnnnnnnnnnnnnnnnnnnnnnnnnnnnnnnnnnnnnnnnnnnnnnnnnnnnnnnnnnnnnnnnnnnnnnnnnnnnnnnnnnnnnnnnnnnnnnnnnnnnnnnnnnnnnnnnnnnnnnnnnnnnnnnnnnnnnnnnnnnnnnnnnnnnnnnnnnnnnnnnnnnnnnnnnnnnnnnnnnnnnnnnnnnnnnnnnnnnnnnnnnnnnnnnnnnnnnnnnnnnnnnnnnnnnnnnnnnnnnnnnnnnnnnnnnnnnnnnnnnnnnnnnnnnnnnnnnnnnnnnnnnnnnnnnnnnnnnnnnnnnnnnnnnnnnnnnnnnnnnnnnnnnnnnnnnnnnnnnnnnnnnnnnnnnnnnnnnnnnnnnnnnnnnnnnnnnnnnnnnnnnnnnnnnnnnnnnnnnnnnnnnnnnnnnnnnnnnnnnnnnnnnnnnnnnnnnnnnnnnnnnnnnnnnnnnnnnnnnnnnnnnnnnnnnnnnnnnnnnnnnnnnnnnnnnnnnnnnnnnnnnnnnnnnnnnnnnnnnnnnnnnnnnnnnnnnnnnnnnnnnnnnnnnnnnnnnnnnnnnnnnnnnnnnnnnnnnnnnnnnnnnnnnnnnnnnnnnnnnnnnnnnnnnnnnnnnnnnnnnnnnnnnnnnnnnnnnnnnnnnnnnnnnnnnnnnnnnnnnnnnnnnnnnnnnnnnnnnnnnnnnnnnnnnnnnnnnnnnnnnnnnnnnnnnnnnnnnnnnnnnnnnnnnnnnnnnnnnnnnnnnnnnnnnnnnnnnnnnnnnnnnnnnnnnnnnnnnnnnnnnnnnnnnnnnnnnnnnnnnnnnnnnnnnnnnnnnnnnnnnnnnnnnnnnnnnnnnnnnnnnnnnnnnnnnnnnnnnnnnnnnnnnnnnnnnnnnnnnnnnnnnnnnnnnnnnnnnnnnnnnnnnnnnnnnnnnnnnnnnnnnnnnnnnnnnnnnnnnnnnnnnnnnnnnnnnnnnnnnnnnnnnnnnnnnnnnnnnnnnnnnnnnnnnnnnnnnnnnnnnnnnnnnnnnnnnnnnnnnnnnnnnnnnnnnnnnnnnnnnnnnnnnnnnnnnnnnnnnnnnnnnnnnnnnnnnnnnnnnnnnnnnnnnnnnnnnnnnnnnnnnnnnnnnnnnnnnnnnnnnnnnnnnnnnnnnnnnnnnnnnnnnnnnnnnnnnnnnnnnnnnnnnnnnnnnnnnnnnnnnnnnnnnnnnnnnnnnnnnnnnnnnnnnnnnnnnnnnnnnnnnnnnnnnnnnnnnnnnnnnnnnnnnnnnnnnnnnnnnnnnnnnnnnnnnnnnnnnnnnnnnnnnnnnnnnnnnnnnnnnnnnnnnnnnnnnnnnnnnnnnnnnnnnnnnnnnnnnnnnnnnnnnnnnnnnnnnnnnnnnnnnnnnnnnnnnnnnnnnnnnnnnnnnnnnnnnnnnnnnnnnnnnnnnnnnnnnnnnnnnnnnnnnnnnnnnnnnnnnnnnnnnnnnnnnnnnnnnnnnnnnnnnnnnnnnnnnnnnnnnnnnnnnnnnnnnnnnnnnnnnnnnnnnnnnnnnnnnnnnnnnnnnnnnnnnnnnnnnnnnnnnnnnnnnnnnnnnnnnnnnnnnnnnnnnnnnnnnnnnnnnnnnnnnnnnnnnnnnnnnnnnnnnnnnnnnnnnnnnnnnnnnnnnnnnnnnnnnnnnnnnnnnnnnnnnnnnnnnnnnnnnnnnnnnnnnnnnnnnnnnnnnnnnnnnnnnnnnnnnnnnnnnnnnnnnnnnnnnnnnnnnnnnnnnnnnnnnnnnnnnnnnnnnnnnnnnnnnnnnnnnnnnnnnnnnnnnnnnnnnnnnnnnnnnnnnnnnnnnnnnnnnnnnnnnnnnnnnnnnnnnnnnnnnnnnnnnnnnnnnnnnnnnnnnnnnnnnnnnnnnnnnnnnnnnnnnnnnnnnnnnnnnnnnnnnnnnnnnnnnnnnnnnnnnnnnnnnnnnnnnnnnnnnnnnnnnnnnnnnnnnnnnnnnnnnnnnnnnnnnnnnnnnnnnnnnnnnnnnnnnnnnnnnnnnnnnnnnnnnnnnnnnnnnnnnnnnnnnnnnnnnnnnnnnnnnnnnnnnnnnnnnnnnnnnnnnnnnnnnnnnnnnnnnnnnnnnnnnnnnnnnnnnnnnnnnnnnnnnnnnnnnnnnnnnnnnnnnnnnnnnnnnnnnnnnnnnnnnnnnnnnnnnnnnnnnnnnnnnnnnnnnnnnnnnnnnnnnnnnnnnnnnnnnnnnnnnnnnnnnnnnnnnnnnnnnnnnnnnnnnnnnnnnnnnnnnnnnnnnnnnnnnnnnnnnnnnnnnnnnnnnnnnnnnnnnnnnnnnnnnnnnnnnnnnnnnnnnnnnnnnnnnnnnnnnnnnnnnnnnnnnnnnnnnnnnnnnnnnnnnnnnnnnnnnnnnnnnnnnnnnnnnnnnnnnnnnnnnnnnnnnnnnnnnnnnnnnnnnnnnnnnnnnnnnnnnnnnnnnnnnnnnnnnnnnnnnnnnnnnnnnnnnnnnnnnnnnnnnnnnnnnnnnnnnnnnnnnnnnnnnnnnnnnnnnnnnnnnnnnnnnnnnnnnnnnnnnnnnnnnnnnnnnnnnnnnnnnnnnnnnnnnnnnnnnnnnnnnnnnnnnnnnnnnnnnnnnnnnnnnnnnnnnnnnnnnnnnnnnnnnnnnnnnnnnnnnnnnnnnnnnnnnnnnnnnnnnnnnnnnnnnnnnnnnnnnnnnnnnnnnnnnnnnnnnnnnnnnnnnnnnnnnnnnnnnnnnnnnnnnnnnnnnnnnnnnnnnnnnnnnnnnnnnnnnnnnnnnnnnnnnnnnnnnnnnnnnnnnnnnnnnnnnnnnnnnnnnnnnnnnnnnnnnnnnnnnnnnnnnnnnnnnnnnnnnnnnnnnnnnnnnnnnnnnnnnnnnnnnnnnnnnnnnnnnnnnnnnnnnnnnnnnnnnnnnnnnnnnnnnnnnnnnnnnnnnnnnnnnnnnnnnnnnnnnnnnnnnnnnnnnnnnnnnnnnnnnnnnnnnnnnnnnnnnnnnnnnnnnnnnnnnnnnnnnnnnnnnnnnnnnnnnnnnnnnnnnnnnnnnnnnnnnnnnnnnnnnnnnnnnnnnnnnnnnnnnnnnnnnnnnnnnnnnnnnnnnnnnnnnnnnnnnnnnnnnnnnnnnnnnnnnnnnnnnnnnnnnnnnnnnnnnnnnnnnnnnnnnnnnnnnnnnnnnnnnnnnnnnnnnnnnnnnnnnnnnnnnnnnnnnnnnnnnnnnnnnnnnnnnnnnnnnnnnnnnnnnnnnnnnnnnnnnnnnnnnnnnnnnnnnnnnnnnnnnnnnnnnnnnnnnnnnnnnnnnnnnnnnnnnnnnnnnnnnnnnnnnnnnnnnnnnnnnnnnnnnnnnnnnnnnnnnnnnnnnnnnnnnnnnnnnnnnnnnnnnnnnnnnnnnnnnnnnnnnnnnnnnnnnnnnnnnnnnnnnnnnnnnnnnnnnnnnnnnnnnnnnnnnnnnnnnnnnnnnnnnnnnnnnnnnnnnnnnnnnnnnnnnnnnnnnnnnnnnnnnnnnnnnnnnnnnnnnnnnnnnnnnnnnnnnnnnnnnnnnnnnnnnnnnnnnnnnnnnnnnnnnnnnnnnnnnnnnnnnnnnnnnnnnnnnnnnnnnnnnnnnnnnnnnnnnnnnnnnnnnnnnnnnnnnnnnnnnnnnnnnnnnnnnnnnnnnnnnnnnnnnnnnnnnnnnnnnnnnnnnnnnnnnnnnnnnnnnnnnnnnnnnnnnnnnnnnnnnnnnnnnnnnnnnnnnnnnnnnnnnnnnnnnnnnnnnnnnnnnnnnnnnnnnnnnnnnnnnnnnnnnnnnnnnnnnnnnnnnnnnnnnnnnnnnnnnnnnnnnnnnnnnnnnnnnnnnnnnnnnnnnnnnnnnnnnnnnnnnnnnnnnnnnnnnnnnnnnnnnnnnnnnnnnnnnnnnnnnnnnnnnnnnnnnnnnnnnnnnnnnnnnnnnnnnnnnnnnnnnnnnnnnnnnnnnnnnnnnnnnnnnnnnnnnnnnnnnnnnnnnnnnnnnnnnnnnnnnnnnnnnnnnnnnnnnnnnnnnnnnnnnnnnnnnnnnnnnnnnnnnnnnnnnnnnnnnnnnnnnnnnnnnnnnnnnnnnnnnnnnnnnnnnnnnnnnnnnnnnnnnnnnnnnnnnnnnnnnnnnnnnnnnnnnnnnnnnnnnnnnnnnnnnnnnnnnnnnnnnnnnnnnnnnnnnnnnnnnnnnnnnnnnnnnnnnnnnnnnnnnnnnnnnnnnnnnnnnnnnnnnnnnnnnnnnnnnnnnnnnnnnnnnnnnnnnnnnnnnnnnnnnnnnnnnnnnnnnnnnnnnnnnnnnnnnnnnnnnnnnnnnnnnnnnnnnnnnnnnnnnnnnnnnnnnnnnnnnnnnnnnnnnnnnnnnnnnnnnnnnnnnnnnnnnnnnnnnnnnnnnnnnnnnnnnnnnnnnnnnnnnnnnnnnnnnnnnnnnnnnnnnnnnnnnnnnnnnnnnnnnnnnnnnnnnnnnnnnnnnnnnnnnnnnnnnnnnnnnnnnnnnnnnnnnnnnnnnnnnnnnnnnnnnnnnnnnnnnnnnnnnnnnnnnnnnnnnnnnnnnnnnnnnnnnnnnnnnnnnnnnnnnnnnnnnnnnnnnnnnnnnnnnnnnnnnnnnnnnnnnnnnnnnnnnnnnnnnnnnnnnnnnnnnnnnnnnnnnnnnnnnnnnnnnnnnnnnnnnnnnnnnnnnnnnnnnnnnnnnnnnnnnnnnnnnnnnnnnnnnnnnnnnnnnnnnnnnnnnnnnnnnnnnnnnnnnnnnnnnnnnnnnnnnnnnnnnnnnnnnnnnnnnnnnnnnnnnnnnnnnnnnnnnnnnnnnnnnnnnnnnnnnnnnnnnnnnnnnnnnnnnnnnnnnnnnnnnnnnnnnnnnnnnnnnnnnnnnnnnnnnnnnnnnnnnnnnnnnnnnnnnnnnnnnnnnnnnnnnnnnnnnnnnnnnnnnnnnnnnnnnnnnnnnnnnnnnnnnnnnnnnnnnnnnnnnnnnnnnnnnnnnnnnnnnnnnnnnnnnnnnnnnnnnnnnnnnnnnnnnnnnnnnnnnnnnnnnnnnnnnnnnnnnnnnnnnnnnnnnnnnnnnnnnnnnnnnnnnnnnnnnnnnnnnnnnnnnnnnnnnnnnnnnnnnnnnnnnnnnnnnnnnnnnnnnnnnnnnnnnnnnnnnnnnnnnnnnnnnnnnnnnnnnnnnnnnnnnnnnnnnnnnnnnnnnnnnnnnnnnnnnnnnnnnnnnnnnnnnnnnnnnnnnnnnnnnnnnnnnnnnnnnnnnnnnnnnnnnnnnnnnnnnnnnnnnnnnnnnnnnnnnnnnnnnnnnnnnnnnnnnnnnnnnnnnnnnnnnnnnnnnnnnnnnnnnnnnnnnnnnnnnnnnnnnnnnnnnnnnnnnnnnnnnnnnnnnnnnnnnnnnnnnnnnnnnnnnnnnnnnnnnnnnnnnnnnnnnnnnnnnnnnnnnnnnnnnnnnnnnnnnnnnnnnnnnnnnnnnnnnnnnnnnnnnnnnnnnnnnnnnnnnnnnnnnnnnnnnnnnnnnnnnnnnnnnnnnnnnnnnnnnnnnnnnnnnnnnnnnnnnnnnnnnnnnnnnnnnnnnnnnnnnnnnnnnnnnnnnnnnnnnnnnnnnnnnnnnnnnnnnnnnnnnnnnnnnnnnnnnnnnnnnnnnnnnnnnnnnnnnnnnnnnnnnnnnnnnnnnnnnnnnnnnnnnnnnnnnnnnnnnnnnnnnnnnnnnnnnnnnnnnnnnnnnnnnnnnnnnnnnnnnnnnnnnnnnnnnnnnnnnnnnnnnnnnnnnnnnnnnnnnnnnnnnnnnnnnnnnnnnnnnnnnnnnnnnnnnnnnnnnnnnnnnnnnnnnnnnnnnnnnnnnnnnnnnnnnnnnnnnnnnnnnnnnnnnnnnnnnnnnnnnnnnnnnnnnnnnnnnnnnnnnnnnnnnnnnnnnnnnnnnnnnnnnnnnnnnnnnnnnnnnnnnnnnnnnnnnnnnnnnnnnnnnnnnnnnnnnnnnnnnnnnnnnnnnnnnnnnnnnnnnnnnnnnnnnnnnnnnnnnnnnnnnnnnnnnnnnnnnnnnnnnnnnnnnnnnnnnnnnnnnnnnnnnnnnnnnnnnnnnnnnnnnnnnnnnnnnnnnnnnnnnnnnnnnnnnnnnnnnnnnnnnnnnnnnnnnnnnnnnnnnnnnnnnnnnnnnnnnnnnnnnnnnnnnnnnnnnnnnnnnnnnnnnnnnnnnnnnnnnnnnnnnnnnnnnnnnnnnnnnnnnnnnnnnnnnnnnnnnnnnnnnnnnnnnnnnnnnnnnnnnnnnnnnnnnnnnnnnnnnnnnnnnnnnnnnnnnnnnnnnnnnnnnnnnnnnnnnnnnnnnnnnnnnnnnnnnnnnnnnnnnnnnnnnnnnnnnnnnnnnnnnnnnnnnnnnnnnnnnnnnnnnnnnnnnnnnnnnnnnnnnnnnnnnnnnnnnnnnnnnnnnnnnnnnnnnnnnnnnnnnnnnnnnnnnnnnnnnnnnnnnnnnnnnnnnnnnnnnnnnnnnnnnnnnnnnnnnnnnnnnnnnnnnnnnnnnnnnnnnnnnnnnnnnnnnnnnnnnnnnnnnnnnnnnnnnnnnnnnnnnnnnnnnnnnnnnnnnnnnnnnnnnnnnnnnnnnnnnnnnnnnnnnnnnnnnnnnnnnnnnnnnnnnnnnnnnnnnnnnnnnnnnnnnnnnnnnnnnnnnnnnnnnnnnnnnnnnnnnnnnnnnnnnnnnnnnnnnnnnnnnnnnnnnnnnnnnnnnnnnnnnnnnnnnnnnnnnnnnnnnnnnnnnnnnnnnnnnnnnnnnnnnnnnnnnnnnnnnnnnnnnnnnnnnnnnnnnnnnnnnnnnnnnnnnnnnnnnnnnnnnnnnnnnnnnnnnnnnnnnnnnnnnnnnnnnnnnnnnnnnnnnnnnnnnnnnnnnnnnnnnnnnnnnnnnnnnnnnnnnnnnnnnnnnnnnnnnnnnnnnnnnnnnnnnnnnnnnnnnnnnnnnnnnnnnnnnnnnnnnnnnnnnnnnnnnnnnnnnnnnnnnnnnnnnnnnnnnnnnnnnnnnnnnnnnnnnnnnnnnnnnnnnnnnnnnnnnnnnnnnnnnnnnnnnnnnnnnnnnnnnnnnnnnnnnnnnnnnnnnnnnnnnnnnnnnnnnnnnnnnnnnnnnnnnnnnnnnnnnnnnnnnnnnnnnnnnnnnnnnnnnnnnnnnnnnnnnnnnnnnnnnnnnnnnnnnnnnnnnnnnnnnnnnnnnnnnnnnnnnnnnnnnnnnnnnnnnnnnnnnnnnnnnnnnnnnnnnnnnnnnnnnnnnnnnnnnnnnnnnnnnnnnnnnnnnnnnnnnnnnnnnnnnnnnnnnnnnnnnnnnnnnnnnnnnnnnnnnnnnnnnnnnnnnnnnnnnnnnnnnnnnnnnnnnnnnnnnnnnnnnnnnnnnnnnnnnnnnnnnnnnnnnnnnnnnnnnnnnnnnnnnnnnnnnnnnnnnnnnnnnnnnnnnnnnnnnnnnnnnnnnnnnnnnnnnnnnnnnnnnnnnnnnnnnnnnnnnnnnnnnnnnnnnnnnnnnnnnnnnnnnnnnnnnnnnnnnnnnnnnnnnnnnnnnnnnnnnnnnnnnnnnnnnnnnnnnnnnnnnnnnnnnnnnnnnnnnnnnnnnnnnnnnnnnnnnnnnnnnnnnnnnnnnnnnnnnnnnnnnnnnnnnnnnnnnnnnnnnnnnnnnnnnnnnnnnnnnnnnnnnnnnnnnnnnnnnnnnnnnnnnnnnnnnnnnnnnnnnnnnnnnnnnnnnnnnnnnnnnnnnnnnnnnnnnnnnnnnnnnnnnnnnnnnnnnnnnnnnnnnnnnnnnnnnnnnnnnnnnnnnnnnnnnnnnnnnnnnnnnnnnnnnnnnnnnnnnnnnnnnnnnnnnnnnnnnnnnnnnnnnnnnnnnnnnnnnnnnnnnnnnnnnnnnnnnnnnnnnnnnnnnnnnnnnnnnnnnnnnnnnnnnnnnnnnnnnnnnnnnnnnnnnnnnnnnnnnnnnnnnnnnnnnnnnnnnnnnnnnnnnnnnnnnnnnnnnnnnnnnnnnnnnnnnnnnnnnnnnnnnnnnnnnnnnnnnnnnnnnnnnnnnnnnnnnnnnnnnnnnnnnnnnnnnnnnnnnnnnnnnnnnnnnnnnnnnnnnnnnnnnnnnnnnnnnnnnnnnnnnnnnnnnnnnnnnnnnnnnnnnnnnnnnnnnnnnnnnnnnnnnnnnnnnnnnnnnnnnnnnnnnnnnnnnnnnnnnnnnnnnnnnnnnnnnnnnnnnnnnnnnnnnnnnnnnnnnnnnnnnnnnnnnnnnnnnnnnnnnnnnnnnnnnnnnnnnnnnnnnnnnnnnnnnnnnnnnnnnnnnnnnnnnnnnnnnnnnnnnnnnnnnnnnnnnnnnnnnnnnnnnnnnnnnnnnnnnnnnnnnnnnnnnnnnnnnnnnnnnnnnnnnnnnnnnnnnnnnnnnnnnnnnnnnnnnnnnnnnnnnnnnnnnnnnnnnnnnnnnnnnnnnnnnnnnnnnnnnnnnnnnnnnnnnnnnnnnnnnnnnnnnnnnnnnnnnnnnnnnnnnnnnnnnnnnnnnnnnnnnnnnnnnnnnnnnnnnnnnnnnnnnnnnnnnnnnnnnnnnnnnnnnnnnnnnnnnnnnnnnnnnnnnnnnnnnnnnnnnnnnnnnnnnnnnnnnnnnnnnnnnnnnnnnnnnnnnnnnnnnnnnnnnnnnnnnnnnnnnnnnnnnnnnnnnnnnnnnnnnnnnnnnnnnnnnnnnnnnnnnnnnnnnnnnnnnnnnnnnnnnnnnnnnnnnnnnnnnnnnnnnnnnnnnnnnnnnnnnnnnnnnnnnnnnnnnnnnnnnnnnnnnnnnnnnnnnnnnnnnnnnnnnnnnnnnnnnnnnnnnnnnnnnnnnnnnnnnnnnnnnnnnnnnnnnnnnnnnnnnnnnnnnnnnnnnnnnnnnnnnnnnnnnnnnnnnnnnnnnnnnnnnnnnnnnnnnnnnnnnnnnnnnnnnnnnnnnnnnnnnnnnnnnnnnnnnnnnnnnnnnnnnnnnnnnnnnnnnnnnnnnnnnnnnnnnnnnnnnnnnnnnnnnnnnnnnnnnnnnnnnnnnnnnnnnnnnnnnnnnnnnnnnnnnnnnnnnnnnnnnnnnnnnnnnnnnnnnnnnnnnnnnnnnnnnnnnnnnnnnnnnnnnnnnnnnnnnnnnnnnnnnnnnnnnnnnnnnnnnnnnnnnnnnnnnnnnnnnnnnnnnnnnnnnnnnnnnnnnnnnnnnnnnnnnnnnnnnnnnnnnnnnnnnnnnnnnnnnnnnnnnnnnnnnnnnnnnnnnnnnnnnnnnnnnnnnnnnnnnnnnnnnnnnnnnnnnnnnnnnnnnnnnnnnnnnnnnnnnnnnnnnnnnnnnnnnnnnnnnnnnnnnnnnnnnnnnnnnnnnnnnnnnnnnnnnnnnnnnnnnnnnnnnnnnnnnnnnnnnnnnnnnnnnnnnnnnnnnnnnnnnnnnnnnnnnnnnnnnnnnnnnnnnnnnnnnnnnnnnnnnnnnnnnnnnnnnnnnnnnnnnnnnnnnnnnnnnnnnnnnnnnnnnnnnnnnnnnnnnnnnnnnnnnnnnnnnnnnnnnnnnnnnnnnnnnnnnnnnnnnnnnnnnnnnnnnnnnnnnnnnnnnnnnnnnnnnnnnnnnnnnnnnnnnnnnnnnnnnnnnnnnnnnnnnnnnnnnnnnnnnnnnnnnnnnnnnnnnnnnnnnnnnnnnnnnnnnnnnnnnnnnnnnnnnnnnnnnnnnnnnnnnnnnnnnnnnnnnnnnnnnnnnnnnnnnnnnnnnnnnnnnnnnnnnnnnnnnnnnnnnnnnnnnnnnnnnnnnnnnnnnnnnnnnnnnnnnnnnnnnnnnnnnnnnnnnnnnnnnnnnnnnnnnnnnnnnnnnnnnnnnnnnnnnnnnnnnnnnnnnnnnnnnnnnnnnnnnnnnnnnnnnnnnnnnnnnnnnnnnnnnnnnnnnnnnnnnnnnnnnnnnnnnnnnnnnnnnnnnnnnnnnnnnnnnnnnnnnnnnnnnnnnnnnnnnnnnnnnnnnnnnnnnnnnnnnnnnnnnnnnnnnnnnnnnnnnnnnnnnnnnnnnnnnnnnnnnnnnnnnnnnnnnnnnnnnnnnnnnnnnnnnnnnnnnnnnnnnnnnnnnnnnnnnnnnnnnnnnnnnnnnnnnnnnnnnnnnnnnnnnnnnnnnnnnnnnnnnnnnnnnnnnnnnnnnnnnnnnnnnnnnnnnnnnnnnnnnnnnnnnnnnnnnnnnnnnnnnnnnnnnnnnnnnnnnnnnnnnnnnnnnnnnnnnnnnnnnnnnnnnnnnnnnnnnnnnnnnnnnnnnnnnnnnnnnnnnnnnnnnnnnnnnnnnnnnnnnnnnnnnnnnnnnnnnnnnnnnnnnnnnnnnnnnnnnnnnnnnnnnnnnnnnnnnnnnnnnnnnnnnnnnnnnnnnnnnnnnnnnnnnnnnnnnnnnnnnnnnnnnnnnnnnnnnnnnnnnnnnnnnnnnnnnnnnnnnnnnnnnnnnnnnnnnnnnnnnnnnnnnnnnnnnnnnnnnnnnnnnnnnnnnnnnnnnnnnnnnnnnnnnnnnnnnnnnnnnnnnnnnnnnnnnnnnnnnnnnnnnnnnnnnnnnnnnnnnnnnnnnnnnnnnnnnnnnnnnnnnnnnnnnnnnnnnnnnnnnnnnnnnnnnnnnnnnnnnnnnnnnnnnnnnnnnnnnnnnnnnnnnnnnnnnnnnnnnnnnnnnnnnnnnnnnnnnnnnnnnnnnnnnnnnnnnnnnnnnnnnnnnnnnnnnnnnnnnnnnnnnnnnnnnnnnnnnnnnnnnnnnnnnnnnnnnnnnnnnnnnnnnnnnnnnnnnnnnnnnnnnnnnnnnnnnnnnnnnnnnnnnnnnnnnnnnnnnnnnnnnnnnnnnnnnnnnnnnnnnnnnnnnnnnnnnnnnnnnnnnnnnnnnnnnnnnnnnnnnnnnnnnnnnnnnnnnnnnnnnnnnnnnnnnnnnnnnnnnnnnnnnnnnnnnnnnnnnnnnnnnnnnnnnnnnnnnnnnnnnnnnnnnnnnnnnnnnnnnnnnnnnnnnnnnnnnnnnnnnnnnnnnnnnnnnnnnnnnnnnnnnnnnnnnnnnnnnnnnnnnnnnnnnnnnnnnnnnnnnnnnnnnnnnnnnnnnnnnnnnnnnnnnnnnnnnnnnnnnnnnnnnnnnnnnnnnnnnnnnnnnnnnnnnnnnnnnnnnnnnnnnnnnnnnnnnnnnnnnnnnnnnnnnnnnnnnnnnnnnnnnnnnnnnnnnnnnnnnnnnnnnnnnnnnnnnnnnnnnnnnnnnnnnnnnnnnnnnnnnnnnnnnnnnnnnnnnnnnnnnnnnnnnnnnnnnnnnnnnnnnnnnnnnnnnnnnnnnnnnnnnnnnnnnnnnnnnnnnnnnnnnnnnnnnnnnnnnnnnnnnnnnnnnnnnnnnnnnnnnnnnnnnnnnnnnnnnnnnnnnnnnnnnnnnnnnnnnnnnnnnnnnnnnnnnnnnnnnnnnnnnnnnnnnnnnnnnnnnnnnnnnnnnnnnnnnnnnnnnnnnnnnnnnnnnnnnnnnnnnnnnnnnnnnnnnnnnnnnnnnnnnnnnnnnnnnnnnnnnnnnnnnnnnnnnnnnnnnnnnnnnnnnnnnnnnnnnnnnnnnnnnnnnnnnnnnnnnnnnnnnnnnnnnnnnnnnnnnnnnnnnnnnnnnnnnnnnnnnnnnnnnnnnnnnnnnnnnnnnnnnnnnnnnnnnnnnnnnnnnnnnnnnnnnnnnnnnnnnnnnnnnnnnnnnnnnnnnnnnnnnnnnnnnnnnnnnnnnnnnnnnnnnnnnnnnnnnnnnnnnnnnnnnnnnnnnnnnnnnnnnnnnnnnnnnnnnnnnnnnnnnnnnnnnnnnnnnnnnnnnnnnnnnnnnnnnnnnnnnnnnnnnnnnnnnnnnnnnnnnnnnnnnnnnnnnnnnnnnnnnnnnnnnnnnnnnnnnnnnnnnnnnnnnnnnnnnnnnnnnnnnnnnnnnnnnnnnnnnnnnnnnnnnnnnnnnnnnnnnnnnnnnnnnnnnnnnnnnnnnnnnnnnnnnnnnnnnnnnnnnnnnnnnnnnnnnnnnnnnnnnnnnnnnnnnnnnnnnnnnnnnnnnnnnnnnnnnnnnnnnnnnnnnnnnnnnnnnnnnnnnnnnnnnnnnnnnnnnnnnnnnnnnnnnnnnnnnnnnnnnnnnnnnnnnnnnnnnnnnnnnnnnnnnnnnnnnnnnnnnnnnnnnnnnnnnnnnnnnnnnnnnnnnnnnnnnnnnnnnnnnnnnnnnnnnnnnnnnnnnnnnnnnnnnnnnnnnnnnnnnnnnnnnnnnnnnnnnnnnnnnnnnnnnnnnnnnnnnnnnnnnnnnnnnnnnnnnnnnnnnnnnnnnnnnnnnnnnnnnnnnnnnnnnnnnnnnnnnnnnnnnnnnnnnnnnnnnnnnnnnnnnnnnnnnnnnnnnnnnnnnnnnnnnnnnnnnnnnnnnnnnnnnnnnnnnnnnnnnnnnnnnnnnnnnnnnnnnnnnnnnnnnnnnnnnnnnnnnnnnnnnnnnnnnnnnnnnnnnnnnnnnnnnnnnnnnnnnnnnnnnnnnnnnnnnnnnnnnnnnnnnnnnnnnnnnnnnnnnnnnnnnnnnnnnnnnnnnnnnnnnnnnnnnnnnnnnnnnnnnnnnnnnnnnnnnnnnnnnnnnnnnnnnnnnnnnnnnnnnnnnnnnnnnnnnnnnnnnnnnnnnnnnnnnnnnnnnnnnnnnnnnnnnnnnnnnnnnnnnnnnnnnnnnnnnnnnnnnnnnnnnnnnnnnnnnnnnnnnnnnnnnnnnnnnnnnnnnnnnnnnnnnnnnnnnnnnnnnnnnnnnnnnnnnnnnnnnnnnnnnnnnnnnnnnnnnnnnnnnnnnnnnnnnnnnnnnnnnnnnnnnnnnnnnnnnnnnnnnnnnnnnnnnnnnnnnnnnnnnnnnnnnnnnnnnnnnnnnnnnnnnnnnnnnnnnnnnnnnnnnnnnnnnnnnnnnnnnnnnnnnnnnnnnnnnnnnnnnnnnnnnnnnnnnnnnnnnnnnnnnnnnnnnnnnnnnnnnnnnnnnnnnnnnnnnnnnnnnnnnnnnnnnnnnnnnnnnnnnnnnnnnnnnnnnnnnnnnnnnnnnnnnnnnnnnnnnnnnnnnnnnnnnnnnnnnnnnnnnnnnnnnnnnnnnnnnnnnnnnnnnnnnnnnnnnnnnnnnnnnnnnnnnnnnnnnnnnnnnnnnnnnnnnnnnnnnnnnnnnnnnnnnnnnnnnnnnnnnnnnnnnnnnnnnnnnnnnnnnnnnnnnnnnnnnnnnnnnnnnnnnnnnnnnnnnnnnnnnnnnnnnnnnnnnnnnnnnnnnnnnnnnnnnnnnnnnnnnnnnnnnnnnnnnnnnnnnnnnnnnnnnnnnnnnnnnnnnnnnnnnnnnnnnnnnnnnnnnnnnnnnnnnnnnnnnnnnnnnnnnnnnnnnnnnnnnnnnnnnnnnnnnnnnnnnnnnnnnnnnnnnnnnnnnnnnnnnnnnnnnnnnnnnnnnnnnnnnnnnnnnnnnnnnnnnnnnnnnnnnnnnnnnnnnnnnnnnnnnnnnnnnnnnnnnnnnnnnnnnnnnnnnnnnnnnnnnnnnnnnnnnnnnnnnnnnnnnnnnnnnnnnnnnnnnnnnnnnnnnnnnnnnnnnnnnnnnnnnnnnnnnnnnnnnnnnnnnnnnnnnnnnnnnnnnnnnnnnnnnnnnnnnnnnnnnnnnnnnnnnnnnnnnnnnnnnnnnnnnnnnnnnnnnnnnnnnnnnnnnnnnnnnnnnnnnnnnnnnnnnnnnnnnnnnnnnnnnnnnnnnnnnnnnnnnnnnnnnnnnnnnnnnnnnnnnnnnnnnnnnnnnnnnnnnnnnnnnnnnnnnnnnnnnnnnnnnnnnnnnnnnnnnnnnnnnnnnnnnnnnnnnnnnnnnnnnnnnnnnnnnnnnnnnnnnnnnnnnnnnnnnnnnnnnnnnnnnnnnnnnnnnnnnnnnnnnnnnnnnnnnnnnnnnnnnnnnnnnnnnnnnnnnnnnnnnnnnnnnnnnnnnnnnnnnnnnnnnnnnnnnnnnnnnnnnnnnnnnnnnnnnnnnnnnnnnnnnnnnnnnnnnnnnnnnnnnnnnnnnnnnnnnnnnnnnnnnnnnnnnnnnnnnnnnnnnnnnnnnnnnnnnnnnnnnnnnnnnnnnnnnnnnnnnnnnnnnnnnnnnnnnnnnnnnnnnnnnnnnnnnnnnnnnnnnnnnnnnnnnnnnnnnnnnnnnnnnnnnnnnnnnnnnnnnnnnnnnnnnnnnnnnnnnnnnnnnnnnnnnnnnnnnnnnnnnnnnnnnnnnnnnnnnnnnnnnnnnnnnnnnnnnnnnnnnnnnnnnnnnnnnnnnnnnnnnnnnnnnnnnnnnnnnnnnnnnnnnnnnnnnnnnnnnnnnnnnnnnnnnnnnnnnnnnnnnnnnnnnnnnnnnnnnnnnnnnnnnnnnnnnnnnnnnnnnnnnnnnnnnnnnnnnnnnnnnnnnnnnnnnnnnnnnnnnnnnnnnnnnnnnnnnnnnnnnnnnnnnnnnnnnnnnnnnnnnnnnnnnnnnnnnnnnnnnnnnnnnnnnnnnnnnnnnnnnnnnnnnnnnnnnnnnnnnnnnnnnnnnnnnnnnnnnnnnnnnnnnnnnnnnnnnnnnnnnnnnnnnnnnnnnnnnnnnnnnnnnnnnnnnnnnnnnnnnnnnnnnnnnnnnnnnnnnnnnnnnnnnnnnnnnnnnnnnnnnnnnnnnnnnnnnnnnnnnnnnnnnnnnnnnnnnnnnnnnnnnnnnnnnnnnnnnnnnnnnnnnnnnnnnnnnnnnnnnnnnnnnnnnnnnnnnnnnnnnnnnnnnnnnnnnnnnnnnnnnnnnnnnnnnnnnnnnnnnnnnnnnnnnnnnnnnnnnnnnnnnnnnnnnnnnnnnnnnnnnnnnnnnnnnnnnnnnnnnnnnnnnnnnnnnnnnnnnnnnnnnnnnnnnnnnnnnnnnnnnnnnnnnnnnnnnnnnnnnnnnnnnnnnnnnnnnnnnnnnnnnnnnnnnnnnnnnnnnnnnnnnnnnnnnnnnnnnnnnnnnnnnnnnnnnnnnnnnnnnnnnnnnnnnnnnnnnnnnnnnnnnnnnnnnnnnnnnnnnnnnnnnnnnnnnnnnnnnnnnnnnnnnnnnnnnnnnnnnnnnnnnnnnnnnnnnnnnnnnnnnnnnnnnnnnnnnnnnnnnnnnnnnnnnnnnnnnnnnnnnnnnnnnnnnnnnnnnnnnnnnnnnnnnnnnnnnnnnnnnnnnnnnnnnnnnnnnnnnnnnnnnnnnnnnnnnnnnnnnnnnnnnnnnnnnnnnnnnnnnnnnnnnnnnnnnnnnnnnnnnnnnnnnnnnnnnnnnnnnnnnnnnnnnnnnnnnnnnnnnnnnnnnnnnnnnnnnnnnnnnnnnnnnnnnnnnnnnnnnnnnnnnnnnnnnnnnnnnnnnnnnnnnnnnnnnnnnnnnnnnnnnnnnnnnnnnnnnnnnnnnnnnnnnnnnnnnnnnnnnnnnnnnnnnnnnnnnnnnnnnnnnnnnnnnnnnnnnnnnnnnnnnnnnnnnnnnnnnnnnnnnnnnnnnnnnnnnnnnnnnnnnnnnnnnnnnnnnnnnnnnnnnnnnnnnnnnnnnnnnnnnnnnnnnnnnnnnnnnnnnnnnnnnnnnnnnnnnnnnnnnnnnnnnnnnnnnnnnnnnnnnnnnnnnnnnnnnnnnnnnnnnnnnnnnnnnnnnnnnnnnnnnnnnnnnnnnnnnnnnnnnnnnnnnnnnnnnnnnnnnnnnnnnnnnnnnnnnnnnnnnnnnnnnnnnnnnnnnnnnnnnnnnnnnnnnnnnnnnnnnnnnnnnnnnnnnnnnnnnnnnnnnnnnnnnnnnnnnnnnnnnnnnnnnnnnnnnnnnnnnnnnnnnnnnnnnnnnnnnnnnnnnnnnnnnnnnnnnnnnnnnnnnnnnnnnnnnnnnnnnnnnnnnnnnnnnnnnnnnnnnnnnnnnnnnnnnnnnnnnnnnnnnnnnnnnnnnnnnnnnnnnnnnnnnnnnnnnnnnnnnnnnnnnnnnnnnnnnnnnnnnnnnnnnnnnnnnnnnnnnnnnnnnnnnnnnnnnnnnnnnnnnnnnnnnnnnnnnnnnnnnnnnnnnnnnnnnnnnnnnnnnnnnnnnnnnnnnnnnnnnnnnnnnnnnnnnnnnnnnnnnnnnnnnnnnnnnnnnnnnnnnnnnnnnnnnnnnnnnnnnnnnnnnnnnnnnnnnnnnnnnnnnnnnnnnnnnnnnnnnnnnnnnnnnnnnnnnnnnnnnnnnnnnnnnnnnnnnnnnnnnnnnnnnnnnnnnnnnnnnnnnnnnnnnnnnnnnnnnnnnnnnnnnnnnnnnnnnnnnnnnnnnnnnnnnnnnnnnnnnnnnnnnnnnnnnnnnnnnnnnnnnnnnnnnnnnnnnnnnnnnnnnnnnnnnnnnnnnnnnnnnnnnnnnnnnnnnnnnnnnnnnnnnnnnnnnnnnnnnnnnnnnnnnnnnnnnnnnnnnnnnnnnnnnnnnnnnnnnnnnnnnnnnnnnnnnnnnnnnnnnnnnnnnnnnnnnnnnnnnnnnnnnnnnnnnnnnnnnnnnnnnnnnnnnnnnnnnnnnnnnnnnnnnnnnnnnnnnnnnnnnnnnnnnnnnnnnnnnnnnnnnnnnnnnnnnnnnnnnnnnnnnnnnnnnnnnnnnnnnnnnnnnnnnnnnnnnnnnnnnnnnnnnnnnnnnnnnnnnnnnnnnnnnnnnnnnnnnnnnnnnnnnnnnnnnnnnnnnnnnnnnnnnnnnnnnnnnnnnnnnnnnnnnnnnnnnnnnnnnnnnnnnnnnnnnnnnnnnnnnnnnnnnnnnnnnnnnnnnnnnnnnnnnnnnnnnnnnnnnnnnnnnnnnnnnnnnnnnnnnnnnnnnnnnnnnnnnnnnnnnnnnnnnnnnnnnnnnnnnnnnnnnnnnnnnnnnnnnnnnnnnnnnnnnnnnnnnnnnnnnnnnnnnnnnnnnnnnnnnnnnnnnnnnnnnnnnnnnnnnnnnnnnnnnnnnnnnnnnnnnnnnnnnnnnnnnnnnnnnnnnnnnnnnnnnnnnnnnnnnnnnnnnnnnnnnnnnnnnnnnnnnnnnnnnnnnnnnnnnnnnnnnnnnnnnnnnnnnnnnnnnnnnnnnnnnnnnnnnnnnnnnnnnnnnnnnnnnnnnnnnnnnnnnnnnnnnnnnnnnnnnnnnnnnnnnnnnnnnnnnnnnnnnnnnnnnnnnnnnnnnnnnnnnnnnnnnnnnnnnnnnnnnnnnnnnnnnnnnnnnnnnnnnnnnnnnnnnnnnnnnnnnnnnnnnnnnnnnnnnnnnnnnnnnnnnnnnnnnnnnnnnnnnnnnnnnnnnnnnnnnnnnnnnnnnnnnnnnnnnnnnnnnnnnnnnnnnnnnnnnnnnnnnnnnnnnnnnnnnnnnnnnnnnnnnnnnnnnnnnnnnnnnnnnnnnnnnnnnnnnnnnnnnnnnnnnnnnnnnnnnnnnnnnnnnnnnnnnnnnnnnnnnnnnnnnnnnnnnnnnnnnnnnnnnnnnnnnnnnnnnnnnnnnnnnnnnnnnnnnnnnnnnnnnnnnnnnnnnnnnnnnnnnnnnnnnnnnnnnnnnnnnnnnnnnnnnnnnnnnnnnnnnnnnnnnnnnnnnnnnnnnnnnnnnnnnnnnnnnnnnnnnnnnnnnnnnnnnnnnnnnnnnnnnnnnnnnnnnnnnnnnnnnnnnnnnnnnnnnnnnnnnnnnnnnnnnnnnnnnnnnnnnnnnnnnnnnnnnnnnnnnnnnnnnnnnnnnnnnnnnnnnnnnnnnnnnnnnnnnnnnnnnnnnnnnnnnnnnnnnnnnnnnnnnnnnnnnnnnnnnnnnnnnnnnnnnnnnnnnnnnnnnnnnnnnnnnnnnnnnnnnnnnnnnnnnnnnnnnnnnnnnnnnnnnnnnnnnnnnnnnnnnnnnnnnnnnnnnnnnnnnnnnnnnnnnnnnnnnnnnnnnnnnnnnnnnnnnnnnnnnnnnnnnnnnnnnnnnnnnnnnnnnnnnnnnnnnnnnnnnnnnnnnnnnnnnnnnnnnnnnnnnnnnnnnnnnnnnnnnnnnnnnnnnnnnnnnnnnnnnnnnnnnnnnnnnnnnnnnnnnnnnnnnnnnnnnnnnnnnnnnnnnnnnnnnnnnnnnnnnnnnnnnnnnnnnnnnnnnnnnnnnnnnnnnnnnnnnnnnnnnnnnnnnnnnnnnnnnnnnnnnnnnnnnnnnnnnnnnnnnnnnnnnnnnnnnnnnnnnnnnnnnnnnnnnnnnnnnnnnnnnnnnnnnnnnnnnnnnnnnnnnnnnnnnnnnnnnnnnnnnnnnnnnnnnnnnnnnnnnnnnnnnnnnnnnnnnnnnnnnnnnnnnnnnnnnnnnnnnnnnnnnnnnnnnnnnnnnnnnnnnnnnnnnnnnnnnnnnnnnnnnnnnnnnnnnnnnnnnnnnnnnnnnnnnnnnnnnnnnnnnnnnnnnnnnnnnnnnnnnnnnnnnnnnnnnnnnnnnnnnnnnnnnnnnnnnnnnnnnnnnnnnnnnnnnnnnnnnnnnnnnnnnnnnnnnnnnnnnnnnnnnnnnnnnnnnnnnnnnnnnnnnnnnnnnnnnnnnnnnnnnnnnnnnnnnnnnnnnnnnnnnnnnnnnnnnnnnnnnnnnnnnnnnnnnnnnnnnnnnnnnnnnnnnnnnnnnnnnnnnnnnnnnnnnnnnnnnnnnnnnnnnnnnnnnnnnnnnnnnnnnnnnnnnnnnnnnnnnnnnnnnnnnnnnnnnnnnnnnnnnnnnnnnnnnnnnnnnnnnnnnnnnnnnnnnnnnnnnnnnnnnnnnnnnnnnnnnnnnnnnnnnnnnnnnnnnnnnnnnnnnnnnnnnnnnnnnnnnnnnnnnnnnnnnnnnnnnnnnnnnnnnnnnnnnnnnnnnnnnnnnnnnnnnnnnnnnnnnnnnnnnnnnnnnnnnnnnnnnnnnnnnnnnnnnnnnnnnnnnnnnnnnnnnnnnnnnnnnnnnnnnnnnnnnnnnnnnnnnnnnnnnnnnnnnnnnnnnnnnnnnnnnnnnnnnnnnnnnnnnnnnnnnnnnnnnnnnnnnnnnnnnnnnnnnnnnnnnnnnnnnnnnnnnnnnnnnnnnnnnnnnnnnnnnnnnnnnnnnnnnnnnnnnnnnnnnnnnnnnnnnnnnnnnnnnnnnnnnnnnnnnnnnnnnnnnnnnnnnnnnnnnnnnnnnnnnnnnnnnnnnnnnnnnnnnnnnnnnnnnnnnnnnnnnnnnnnnnnnnnnnnnnnnnnnnnnnnnnnnnnnnnnnnnnnnnnnnnnnnnnnnnnnnnnnnnnnnnnnnnnnnnnnnnnnnnnnnnnnnnnnnnnnnnnnnnnnnnnnnnnnnnnnnnnnnnnnnnnnnnnnnnnnnnnnnnnnnnnnnnnnnnnnnnnnnnnnnnnnnnnnnnnnnnnnnnnnnnnnnnnnnnnnnnnnnnnnnnnnnnnnnnnnnnnnnnnnnnnnnnnnnnnnnnnnnnnnnnnnnnnnnnnnnnnnnnnnnnnnnnnnnnnnnnnnnnnnnnnnnnnnnnnnnnnnnnnnnnnnnnnnnnnnnnnnnnnnnnnnnnnnnnnnnnnnnnnnnnnnnnnnnnnnnnnnnnnnnnnnnnnnnnnnnnnnnnnnnnnnnnnnnnnnnnnnnnnnnnnnnnnnnnnnnnnnnnnnnnnnnnnnnnnnnnnnnnnnnnnnnnnnnnnnnnnnnnnnnnnnnnnnnnnnnnnnnnnnnnnnnnnnnnnnnnnnnnnnnnnnnnnnnnnnnnnnnnnnnnnnnnnnnnnnnnnnnnnnnnnnnnnnnnnnnnnnnnnnnnnnnnnnnnnnnnnnnnnnnnnnnnnnnnnnnnnnnnnnnnnnnnnnnnnnnnnnnnnnnnnnnnnnnnnnnnnnnnnnnnnnnnnnnnnnnnnnnnnnnnnnnnnnnnnnnnnnnnnnnnnnnnnnnnnnnnnnnnnnnnnnnnnnnnnnnnnnnnnnnnnnnnnnnnnnnnnnnnnnnnnnnnnnnnnnnnnnnnnnnnnnnnnnnnnnnnnnnnnnnnnnnnnnnnnnnnnnnnnnnnnnnnnnnnnnnnnnnnnnnnnnnnnnnnnnnnnnnnnnnnnnnnnnnnnnnnnnnnnnnnnnnnnnnnnnnnnnnnnnnnnnnnnnnnnnnnnnnnnnnnnnnnnnnnnnnnnnnnnnnnnnnnnnnnnnnnnnnnnnnnnnnnnnnnnnnnnnnnnnnnnnnnnnnnnnnnnnnnnnnnnnnnnnnnnnnnnnnnnnnnnnnnnnnnnnnnnnnnnnnnnnnnnnnnnnnnnnnnnnnnnnnnnnnnnnnnnnnnnnnnnnnnnnnnnnnnnnnnnnnnnnnnnnnnnnnnnnnnnnnnnnnnnnnnnnnnnnnnnnnnnnnnnnnnnnnnnnnnnnnnnnnnnnnnnnnnnnnnnnnnnnnnnnnnnnnnnnnnnnnnnnnnnnnnnnnnnnnnnnnnnnnnnnnnnnnnnnnnnnnnnnnnnnnnnnnnnnnnnnnnnnnnnnnnnnnnnnnnnnnnnnnnnnnnnnnnnnnnnnnnnnnnnnnnnnnnnnnnnnnnnnnnnnnnnnnnnnnnnnnnnnnnnnnnnnnnnnnnnnnnnnnnnnnnnnnnnnnnnnnnnnnnnnnnnnnnnnnnnnnnnnnnnnnnnnnnnnnnnnnnnnnnnnnnnnnnnnnnnnnnnnnnnnnnnnnnnnnnnnnnnnnnnnnnnnnnnnnnnnnnnnnnnnnnnnnnnnnnnnnnnnnnnnnnnnnnnnnnnnnnnnnnnnnnnnnnnnnnnnnnnnnnnnnnnnnnnnnnnnnnnnnnnnnnnnnnnnnnnnnnnnnnnnnnnnnnnnnnnnnnnnnnnnnnnnnnnnnnnnnnnnnnnnnnnnnnnnnnnnnnnnnnnnnnnnnnnnnnnnnnnnnnnnnnnnnnnnnnnnnnnnnnnnnnnnnnnnnnnnnnnnnnnnnnnnnnnnnnnnnnnnnnnnnnnnnnnnnnnnnnnnnnnnnnnnnnnnnnnnnnnnnnnnnnnnnnnnnnnnnnnnnnnnnnnnnnnnnnnnnnnnnnnnnnnnnnnnnnnnnnnnnnnnnnnnnnnnnnnnnnnnnnnnnnnnnnnnnnnnnnnnnnnnnnnnnnnnnnnnnnnnnnnnnnnnnnnnnnnnnnnnnnnnnnnnnnnnnnnnnnnnnnnnnnnnnnnnnnnnnnnnnnnnnnnnnnnnnnnnnnnnnnnnnnnnnnnnnnnnnnnnnnnnnnnnnnnnnnnnnnnnnnnnnnnnnnnnnnnnnnnnnnnnnnnnnnnnnnnnnnnnnnnnnnnnnnnnnnnnnnnnnnnnnnnnnnnnnnnnnnnnnnnnnnnnnnnnnnnnnnnnnnnnnnnnnnnnnnnnnnnnnnnnnnnnnnnnnnnnnnnnnnnnnnnnnnnnnnnnnnnnnnnnnnnnnnnnnnnnnnnnnnnnnnnnnnnnnnnnnnnnnnnnnnnnnnnnnnnnnnnnnnnnnnnnnnnnnnnnnnnnnnnnnnnnnnnnnnnnnnnnnnnnnnnnnnnnnnnnnnnnnnnnnnnnnnnnnnnnnnnnnnnnnnnnnnnnnnnnnnnnnnnnnnnnnnnnnnnnnnnnnnnnnnnnnnnnnnnnnnnnnnnnnnnnnnnnnnnnnnnnnnnnnnnnnnnnnnnnnnnnnnnnnnnnnnnnnnnnnnnnnnnnnnnnnnnnnnnnnnnnnnnnnnnnnnnnnnnnnnnnnnnnnnnnnnnnnnnnnnnnnnnnnnnnnnnnnnnnnnnnnnnnnnnnnnnnnnnnnnnnnnnnnnnnnnnnnnnnnnnnnnnnnnnnnnnnnnnnnnnnnnnnnnnnnnnnnnnnnnnnnnnnnnnnnnnnnnnnnnnnnnnnnnnnnnnnnnnnnnnnnnnnnnnnnnnnnnnnnnnnnnnnnnnnnnnnnnnnnnnnnnnnnnnnnnnnnnnnnnnnnnnnnnnnnnnnnnnnnnnnnnnnnnnnnnnnnnnnnnnnnnnnnnnnnnnnnnnnnnnnnnnnnnnnnnnnnnnnnnnnnnnnnnnnnnnnnnnnnnnnnnnnnnnnnnnnnnnnnnnnnnnnnnnnnnnnnnnnnnnnnnnnnnnnnnnnnnnnnnnnnnnnnnnnnnnnnnnnnnnnnnnnnnnnnnnnnnnnnnnnnnnnnnnnnnnnnnnnnnnnnnnnnnnnnnnnnnnnnnnnnnnnnnnnnnnnnnnnnnnnnnnnnnnnnnnnnnnnnnnnnnnnnnnnnnnnnnnnnnnnnnnnnnnnnnnnnnnnnnnnnnnnnnnnnnnnnnnnnnnnnnnnnnnnnnnnnnnnnnnnnnnnnnnnnnnnnnnnnnnnnnnnnnnnnnnnnnnnnnnnnnnnnnnnnnnnnnnnnnnnnnnnnnnnnnnnnnnnnnnnnnnnnnnnnnnnnnnnnnnnnnnnnnnnnnnnnnnnnnnnnnnnnnnnnnnnnnnnnnnnnnnnnnnnnnnnnnnnnnnnnnnnnnnnnnnnnnnnnnnnnnnnnnnnnnnnnnnnnnnnnnnnnnnnnnnnnnnnnnnnnnnnnnnnnnnnnnnnnnnnnnnnnnnnnnnnnnnnnnnnnnnnnnnnnnnnnnnnnnnnnnnnnnnnnnnnnnnnnnnnnnnnnnnnnnnnnnnnnnnnnnnnnnnnnnnnnnnnnnnnnnnnnnnnnnnnnnnnnnnnnnnnnnnnnnnnnnnnnnnnnnnnnnnnnnnnnnnnnnnnnnnnnnnnnnnnnnnnnnnnnnnnnnnnnnnnnnnnnnnnnnnnnnnnnnnnnnnnnnnnnnnnnnnnnnnnnnnnnnnnnnnnnnnnnnnnnnnnnnnnnnnnnnnnnnnnnnnnnnnnnnnnnnnnnnnnnnnnnnnnnnnnnnnnnnnnnnnnnnnnnnnnnnnnnnnnnnnnnnnnnnnnnnnnnnnnnnnnnnnnnnnnnnnnnnnnnnnnnnnnnnnnnnnnnnnnnnnnnnnnnnnnnnnnnnnnnnnnnnnnnnnnnnnnnnnnnnnnnnnnnnnnnnnnnnnnnnnnnnnnnnnnnnnnnnnnnnnnnnnnnnnnnnnnnnnnnnnnnnnnnnnnnnnnnnnnnnnnnnnnnnnnnnnnnnnnnnnnnnnnnnnnnnnnnnnnnnnnnnnnnnnnnnnnnnnnnnnnnnnnnnnnnnnnnnnnnnnnnnnnnnnnnnnnnnnnnnnnnnnnnnnnnnnnnnnnnnnnnnnnnnnnnnnnnnnnnnnnnnnnnnnnnnnnnnnnnnnnnnnnnnnnnnnnnnnnnnnnnnnnnnnnnnnnnnnnnnnnnnnnnnnnnnnnnnnnnnnnnnnnnnnnnnnnnnnnnnnnnnnnnnnnnnnnnnnnnnnnnnnnnnnnnnnnnnnnnnnnnnnnnnnnnnnnnnnnnnnnnnnnnnnnnnnnnnnnnnnnnnnnnnnnnnnnnnnnnnnnnnnnnnnnnnnnnnnnnnnnnnnnnnnnnnnnnnnnnnnnnnnnnnnnnnnnnnnnnnnnnnnnnnnnnnnnnnnnnnnnnnnnnnnnnnnnnnnnnnnnnnnnnnnnnnnnnnnnnnnnnnnnnnnnnnnnnnnnnnnnnnnnnnnnnnnnnnnnnnnnnnnnnnnnnnnnnnnnnnnnnnnnnnnnnnnnnnnnnnnnnnnnnnnnnnnnnnnnnnnnnnnnnnnnnnnnnnnnnnnnnnnnnnnnnnnnnnnnnnnnnnnnnnnnnnnnnnnnnnnnnnnnnnnnnnnnnnnnnnnnnnnnnnnnnnnnnnnnnnnnnnnnnnnnnnnnnnnnnnnnnnnnnnnnnnnnnnnnnnnnnnnnnnnnnnnnnnnnnnnnnnnnnnnnnnnnnnnnnnnnnnnnnnnnnnnnnnnnnnnnnnnnnnnnnnnnnnnnnnnnnnnnnnnnnnnnnnnnnnnnnnnnnnnnnnnnnnnnnnnnnnnnnnnnnnnnnnnnnnnnnnnnnnnnnnnnnnnnnnnnnnnnnnnnnnnnnnnnnnnnnnnnnnnnnnnnnnnnnnnnnnnnnnnnnnnnnnnnnnnnnnnnnnnnnnnnnnnnnnnnnnnnnnnnnnnnnnnnnnnnnnnnnnnnnnnnnnnnnnnnnnnnnnnnnnnnnnnnnnnnnnnnnnnnnnnnnnnnnnnnnnnnnnnnnnnnnnnnnnnnnnnnnnnnnnnnnnnnnnnnnnnnnnnnnnnnnnnnnnnnnnnnnnnnnnnnnnnnnnnnnnnnnnnnnnnnnnnnnnnnnnnnnnnnnnnnnnnnnnnnnnnnnnnnnnnnnnnnnnnnnnnnnnnnnnnnnnnnnnnnnnnnnnnnnnnnnnnnnnnnnnnnnnnnnnnnnnnnnnnnnnnnnnnnnnnnnnnnnnnnnnnnnnnnnnnnnnnnnnnnnnnnnnnnnnnnnnnnnnnnnnnnnnnnnnnnnnnnnnnnnnnnnnnnnnnnnnnnnnnnnnnnnnnnnnnnnnnnnnnnnnnnnnnnnnnnnnnnnnnnnnnnnnnnnnnnnnnnnnnnnnnnnnnnnnnnnnnnnnnnnnnnnnnnnnnnnnnnnnnnnnnnnnnnnnnnnnnnnnnnnnnnnnnnnnnnnnnnnnnnnnnnnnnnnnnnnnnnnnnnnnnnnnnnnnnnnnnnnnnnnnnnnnnnnnnnnnnnnnnnnnnnnnnnnnnnnnnnnnnnnnnnnnnnnnnnnnnnnnnnnnnnnnnnnnnnnnnnnnnnnnnnnnnnnnnnnnnnnnnnnnnnnnnnnnnnnnnnnnnnnnnnnnnnnnnnnnnnnnnnnnnnnnnnnnnnnnnnnnnnnnnnnnnnnnnnnnnnnnnnnnnnnnnnnnnnnnnnnnnnnnnnnnnnnnnnnnnnnnnnnnnnnnnnnnnnnnnnnnnnnnnnnnnnnnnnnnnnnnnnnnnnnnnnnnnnnnnnnnnnnnnnnnnnnnnnnnnnnnnnnnnnnnnnnnnnnnnnnnnnnnnnnnnnnnnnnnnnnnnnnnnnnnnnnnnnnnnnnnnnnnnnnnnnnnnnnnnnnnnnnnnnnnnnnnnnnnnnnnnnnnnnnnnnnnnnnnnnnnnnnnnnnnnnnnnnnnnnnnnnnnnnnnnnnnnnnnnnnnnnnnnnnnnnnnnnnnnnnnnnnnnnnnnnnnnnnnnnnnnnnnnnnnnnnnnnnnnnnnnnnnnnnnnnnnnnnnnnnnnnnnnnnnnnnnnnnnnnnnnnnnnnnnnnnnnnnnnnnnnnnnnnnnnnnnnnnnnnnnnnnnnnnnnnnnnnnnnnnnnnnnnnnnnnnnnnnnnnnnnnnnnnnnnnnnnnnnnnnnnnnnnnnnnnnnnnnnnnnnnnnnnnnnnnnnnnnnnnnnnnnnnnnnnnnnnnnnnnnnnnnnnnnnnnnnnnnnnnnnnnnnnnnnnnnnnnnnnnnnnnnnnnnnnnnnnnnnnnnnnnnnnnnnnnnnnnnnnnnnnnnnnnnnnnnnnnnnnnnnnnnnnnnnnnnnnnnnnnnnnnnnnnnnnnnnnnnnnnnnnnnnnnnnnnnnnnnnnnnnnnnnnnnnnnnnnnnnnnnnnnnnnnnnnnnnnnnnnnnnnnnnnnnnnnnnnnnnnnnnnnnnnnnnnnnnnnnnnnnnnnnnnnnnnnnnnnnnnnnnnnnnnnnnnnnnnnnnnnnnnnnnnnnnnnnnnnnnnnnnnnnnnnnnnnnnnnnnnnnnnnnnnnnnnnnnnnnnnnnnnnnnnnnnnnnnnnnnnnnnnnnnnnnnnnnnnnnnnnnnnnnnnnnnnnnnnnnnnnnnnnnnnnnnnnnnnnnnnnnnnnnnnnnnnnnnnnnnnnnnnnnnnnnnnnnnnnnnnnnnnnnnnnnnnnnnnnnnnnnnnnnnnnnnnnnnnnnnnnnnnnnnnnnnnnnnnnnnnnnnnnnnnnnnnnnnnnnnnnnnnnnnnnnnnnnnnnnnnnnnnnnnnnnnnnnnnnnnnnnnnnnnnnnnnnnnnnnnnnnnnnnnnnnnnnnnnnnnnnnnnnnnnnnnnnnnnnnnnnnnnnnnnnnnnnnnnnnnnnnnnnnnnnnnnnnnnnnnnnnnnnnnnnnnnnnnnnnnnnnnnnnnnnnnnnnnnnnnnnnnnnnnnnnnnnnnnnnnnnnnnnnnnnnnnnnnnnnnnnnnnnnnnnnnnnnnnnnnnnnnnnnnnnnnnnnnnnnnnnnnnnnnnnnnnnnnnnnnnnnnnnnnnnnnnnnnnnnnnnnnnnnnnnnnnnnnnnnnnnnnnnnnnnnnnnnnnnnnnnnnnnnnnnnnnnnnnnnnnnnnnnnnnnnnnnnnnnnnnnnnnnnnnnnnnnnnnnnnnnnnnnnnnnnnnnnnnnnnnnnnnnnnnnnnnnnnnnnnnnnnnnnnnnnnnnnnnnnnnnnnnnnnnnnnnnnnnnnnnnnnnnnnnnnnnnnnnnnnnnnnnnnnnnnnnnnnnnnnnnnnnnnnnnnnnnnnnnnnnnnnnnnnnnnnnnnnnnnnnnnnnnnnnnnnnnnnnnnnnnnnnnnnnnnnnnnnnnnnnnnnnnnnnnnnnnnnnnnnnnnnnnnnnnnnnnnnnnnnnnnnnnnnnnnnnnnnnnnnnnnnnnnnnnnnnnnnnnnnnnnnnnnnnnnnnnnnnnnnnnnnnnnnnnnnnnnnnnnnnnnnnnnnnnnnnnnnnnnnnnnnnnnnnnnnnnnnnnnnnnnnnnnnnnnnnnnnnnnnnnnnnnnnnnnnnnnnnnnnnnnnnnnnnnnnnnnnnnnnnnnnnnnnnnnnnnnnnnnnnnnnnnnnnnnnnnnnnnnnnnnnnnnnnnnnnnnnnnnnnnnnnnnnnnnnnnnnnnnnnnnnnnnnnnnnnnnnnnnnnnnnnnnnnnnnnnnnnnnnnnnnnnnnnnnnnnnnnnnnnnnnnnnnnnnnnnnnnnnnnnnnnnnnnnnnnnnnnnnnnnnnnnnnnnnnnnnnnnnnnnnnnnnnnnnnnnnnnnnnnnnnnnnnnnnnnnnnnnnnnnnnnnnnnnnnnnnnnnnnnnnnnnnnnnnnnnnnnnnnnnnnnnnnnnnnnnnnnnnnnnnnnnnnnnnnnnnnnnnnnnnnnnnnnnnnnnnnnnnnnnnnnnnnnnnnnnnnnnnnnnnnnnnnnnnnnnnnnnnnnnnnnnnnnnnnnnnnnnnnnnnnnnnnnnnnnnnnnnnnnnnnnnnnnnnnnnnnnnnnnnnnnnnnnnnnnnnnnnnnnnnnnnnnnnnnnnnnnnnnnnnnnnnnnnnnnnnnnnnnnnnnnnnnnnnnnnnnnnnnnnnnnnnnnnnnnnnnnnnnnnnnnnnnnnnnnnnnnnnnnnnnnnnnnnnnnnnnnnnnnnnnnnnnnnnnnnnnnnnnnnnnnnnnnnnnnnnnnnnnnnnnnnnnnnnnnnnnnnnnnnnnnnnnnnnnnnnnnnnnnnnnnnnnnnnnnnnnnnnnnnnnnnnnnnnnnnnnnnnnnnnnnnnnnnnnnnnnnnnnnnnnnnnnnnnnnnnnnnnnnnnnnnnnnnnnnnnnnnnnnnnnnnnnnnnnnnnnnnnnnnnnnnnnnnnnnnnnnnnnnnnnnnnnnnnnnnnnnnnnnnnnnnnnnnnnnnnnnnnnnnnnnnnnnnnnnnnnnnnnnnnnnnnnnnnnnnnnnnnnnnnnnnnnnnnnnnnnnnnnnnnnnnnnnnnnnnnnnnnnnnnnnnnnnnnnnnnnnnnnnnnnnnnnnnnnnnnnnnnnnnnnnnnnnnnnnnnnnnnnnnnnnnnnnnnnnnnnnnnnnnnnnnnnnnnnnnnnnnnnnnnnnnnnnnnnnnnnnnnnnnnnnnnnnnnnnnnnnnnnnnnnnnnnnnnnnnnnnnnnnnnnnnnnnnnnnnnnnnnnnnnnnnnnnnnnnnnnnnnnnnnnnnnnnnnnnnnnnnnnnnnnnnnnnnnnnnnnnnnnnnnnnnnnnnnnnnnnnnnnnnnnnnnnnnnnnnnnnnnnnnnnnnnnnnnnnnnnnnnnnnnnnnnnnnnnnnnnnnnnnnnnnnnnnnnnnnnnnnnnnnnnnnnnnnnnnnnnnnnnnnnnnnnnnnnnnnnnnnnnnnnnnnnnnnnnnnnnnnnnnnnnnnnnnnnnnnnnnnnnnnnnnnnnnnnnnnnnnnnnnnnnnnnnnnnnnnnnnnnnnnnnnnnnnnnnnnnnnnnnnnnnnnnnnnnnnnnnnnnnnnnnnnnnnnnnnnnnnnnnnnnnnnnnnnnnnnnnnnnnnnnnnnnnnnnnnnnnnnnnnnnnnnnnnnnnnnnnnnnnnnnnnnnnnnnnnnnnnnnnnnnnnnnnnnnnnnnnnnnnnnnnnnnnnnnnnnnnnnnnnnnnnnnnnnnnnnnnnnnnnnnnnnnnnnnnnnnnnnnnnnnnnnnnnnnnnnnnnnnnnnnnnnnnnnnnnnnnnnnnnnnnnnnnnnnnnnnnnnnnnnnnnnnnnnnnnnnnnnnnnnnnnnnnnnnnnnnnnnnnnnnnnnnnnnnnnnnnnnnnnnnnnnnnnnnnnnnnnnnnnnnnnnnnnnnnnnnnnnnnnnnnnnnnnnnnnnnnnnnnnnnnnnnnnnnnnnnnnnnnnnnnnnnnnnnnnnnnnnnnnnnnnnnnnnnnnnnnnnnnnnnnnnnnnnnnnnnnnnnnnnnnnnnnnnnnnnnnnnnnnnnnnnnnnnnnnnnnnnnnnnnnnnnnnnnnnnnnnnnnnnnnnnnnnnnnnnnnnnnnnnnnnnnnnnnnnnnnnnnnnnnnnnnnnnnnnnnnnnnnnnnnnnnnnnnnnnnnnnnnnnnnnnnnnnnnnnnnnnnnnnnnnnnnnnnnnnnnnnnnnnnnnnnnnnnnnnnnnnnnnnnnnnnnnnnnnnnnnnnnnnnnnnnnnnnnnnnnnnnnnnnnnnnnnnnnnnnnnnnnnnnnnnnnnnnnnnnnnnnnnnnnnnnnnnnnnnnnnnnnnnnnnnnnnnnnnnnnnnnnnnnnnnnnnnnnnnnnnnnnnnnnnnnnnnnnnnnnnnnnnnnnnnnnnnnnnnnnnnnnnnnnnnnnnnnnnnnnnnnnnnnnnnnnnnnnnnnnnnnnnnnnnnnnnnnnnnnnnnnnnnnnnnnnnnnnnnnnnnnnnnnnnnnnnnnnnnnnnnnnnnnnnnnnnnnnnnnnnnnnnnnnnnnnnnnnnnnnnnnnnnnnnnnnnnnnnnnnnnnnnnnnnnnnnnnnnnnnnnnnnnnnnnnnnnnnnnnnnnnnnnnnnnnnnnnnnnnnnnnnnnnnnnnnnnnnnnnnnnnnnnnnnnnnnnnnnnnnnnnnnnnnnnnnnnnnnnnnnnnnnnnnnnnnnnnnnnnnnnnnnnnnnnnnnnnnnnnnnnnnnnnnnnnnnnnnnnnnnnnnnnnnnnnnnnnnnnnnnnnnnnnnnnnnnnnnnnnnnnnnnnnnnnnnnnnnnnnnnnnnnnnnnnnnnnnnnnnnnnnnnnnnnnnnnnnnnnnnnnnnnnnnnnnnnnnnnnnnnnnnnnnnnnnnnnnnnnnnnnnnnnnnnnnnnnnnnnnnnnnnnnnnnnnnnnnnnnnnnnnnnnnnnnnnnnnnnnnnnnnnnnnnnnnnnnnnnnnnnnnnnnnnnnnnnnnnnnnnnnnnnnnnnnnnnnnnnnnnnnnnnnnnnnnnnnnnnnnnnnnnnnnnnnnnnnnnnnnnnnnnnnnnnnnnnnnnnnnnnnnnnnnnnnnnnnnnnnnnnnnnnnnnnnnnnnnnnnnnnnnnnnnnnnnnnnnnnnnnnnnnnnnnnnnnnnnnnnnnnnnnnnnnnnnnnnnnnnnnnnnnnnnnnnnnnnnnnnnnnnnnnnnnnnnnnnnnnnnnnnnnnnnnnnnnnnnnnnnnnnnnnnnnnnnnnnnnnnnnnnnnnnnnnnnnnnnnnnnnnnnnnnnnnnnnnnnnnnnnnnnnnnnnnnnnnnnnnnnnnnnnnnnnnnnnnnnnnnnnnnnnnnnnnnnnnnnnnnnnnnnnnnnnnnnnnnnnnnnnnnnnnnnnnnnnnnnnnnnnnnnnnnnnnnnnnnnnnnnnnnnnnnnnnnnnnnnnnnnnnnnnnnnnnnnnnnnnnnnnnnnnnnnnnnnnnnnnnnnnnnnnnnnnnnnnnnnnnnnnnnnnnnnnnnnnnnnnnnnnnnnnnnnnnnnnnnnnnnnnnnnnnnnnnnnnnnnnnnnnnnnnnnnnnnnnnnnnnnnnnnnnnnnnnnnnnnnnnnnnnnnnnnnnnnnnnnnnnnnnnnnnnnnnnnnnnnnnnnnnnnnnnnnnnnnnnnnnnnnnnnnnnnnnnnnnnnnnnnnnnnnnnnnnnnnnnnnnnnnnnnnnnnnnnnnnnnnnnnnnnnnnnnnnnnnnnnnnnnnnnnnnnnnnnnnnnnnnnnnnnnnnnnnnnnnnnnnnnnnnnnnnnnnnnnnnnnnnnnnnnnnnnnnnnnnnnnnnnnnnnnnnnnnnnnnnnnnnnnnnnnnnnnnnnnnnnnnnnnnnnnnnnnnnnnnnnnnnnnnnnnnnnnnnnnnnnnnnnnnnnnnnnnnnnnnnnnnnnnnnnnnnnnnnnnnnnnnnnnnnnnnnnnnnnnnnnnnnnnnnnnnnnnnnnnnnnnnnnnnnnnnnnnnnnnnnnnnnnnnnnnnnnnnnnnnnnnnnnnnnnnnnnnnnnnnnnnnnnnnnnnnnnnnnnnnnnnnnnnnnnnnnnnnnnnnnnnnnnnnnnnnnnnnnnnnnnnnnnnnnnnnnnnnnnnnnnnnnnnnnnnnnnnnnnnnnnnnnnnnnnnnnnnnnnnnnnnnnnnnnnnnnnnnnnnnnnnnnnnnnnnnnnnnnnnnnnnnnnnnnnnnnnnnnnnnnnnnnnnnnnnnnnnnnnnnnnnnnnnnnnnnnnnnnnnnnnnnnnnnnnnnnnnnnnnnnnnnnnnnnnnnnnnnnnnnnnnnnnnnnnnnnnnnnnnnnnnnnnnnnnnnnnnnnnnnnnnnnnnnnnnnnnnnnnnnnnnnnnnnnnnnnnnnnnnnnnnnnnnnnnnnnnnnnnnnnnnnnnnnnnnnnnnnnnnnnnnnnnnnnnnnnnnnnnnnnnnnnnnnnnnnnnnnnnnnnnnnnnnnnnnnnnnnnnnnnnnnnnnnnnnnnnnnnnnnnnnnnnnnnnnnnnnnnnnnnnnnnnnnnnnnnnnnnnnnnnnnnnnnnnnnnnnnnnnnnnnnnnnnnnnnnnnnnnnnnnnnnnnnnnnnnnnnnnnnnnnnnnnnnnnnnnnnnnnnnnnnnnnnnnnnnnnnnnnnnnnnnnnnnnnnnnnnnnnnnnnnnnnnnnnnnnnnnnnnnnnnnnnnnnnnnnnnnnnnnnnnnnnnnnnnnnnnnnnnnnnnnnnnnnnnnnnnnnnnnnnnnnnnnnnnnnnnnnnnnnnnnnnnnnnnnnnnnnnnnnnnnnnnnnnnnnnnnnnnnnnnnnnnnnnnnnnnnnnnnnnnnnnnnnnnnnnnnnnnnnnnnnnnnnnnnnnnnnnnnnnnnnnnnnnnnnnnnnnnnnnnnnnnnnnnnnnnnnnnnnnnnnnnnnnnnnnnnnnnnnnnnnnnnnnnnnnnnnnnnnnnnnnnnnnnnnnnnnnnnnnnnnnnnnnnnnnnnnnnnnnnnnnnnnnnnnnnnnnnnnnnnnnnnnnnnnnnnnnnnnnnnnnnnnnnnnnnnnnnnnnnnnnnnnnnnnnnnnnnnnnnnnnnnnnnnnnnnnnnnnnnnnnnnnnnnnnnnnnnnnnnnnnnnnnnnnnnnnnnnnnnnnnnnnnnnnnnnnnnnnnnnnnnnnnnnnnnnnnnnnnnnnnnnnnnnnnnnnnnnnnnnnnnnnnnnnnnnnnnnnnnnnnnnnnnnnnnnnnnnnnnnnnnnnnnnnnnnnnnnnnnnnnnnnnnnnnnnnnnnnnnnnnnnnnnnnnnnnnnnnnnnnnnnnnnnnnnnnnnnnnnnnnnnnnnnnnnnnnnnnnnnnnnnnnnnnnnnnnnnnnnnnnnnnnnnnnnnnnnnnnnnnnnnnnnnnnnnnnnnnnnnnnnnnnnnnnnnnnnnnnnnnnnnnnnnnnnnnnnnnnnnnnnnnnnnnnnnnnnnnnnnnnnnnnnnnnnnnnnnnnnnnnnnnnnnnnnnnnnnnnnnnnnnnnnnnnnnnnnnnnnnnnnnnnnnnnnnnnnnnnnnnnnnnnnnnnnnnnnnnnnnnnnnnnnnnnnnnnnnnnnnnnnnnnnnnnnnnnnnnnnnnnnnnnnnnnnnnnnnnnnnnnnnnnnnnnnnnnnnnnnnnnnnnnnnnnnnnnnnnnnnnnnnnnnnnnnnnnnnnnnnnnnnnnnnnnnnnnnnnnnnnnnnnnnnnnnnnnnnnnnnnnnnnnnnnnnnnnnnnnnnnnnnnnnnnnnnnnnnnnnnnnnnnnnnnnnnnnnnnnnnnnnnnnnnnnnnnnnnnnnnnnnnnnnnnnnnnnnnnnnnnnnnnnnnnnnnnnnnnnnnnnnnnnnnnnnnnnnnnnnnnnnnnnnnnnnnnnnnnnnnnnnnnnnnnnnnnnnnnnnnnnnnnnnnnnnnnnnnnnnnnnnnnnnnnnnnnnnnnnnnnnnnnnnnnnnnnnnnnnnnnnnnnnnnnnnnnnnnnnnnnnnnnnnnnnnnnnnnnnnnnnnnnnnnnnnnnnnnnnnnnnnnnnnnnnnnnnnnnnnnnnnnnnnnnnnnnnnnnnnnnnnnnnnnnnnnnnnnnnnnnnnnnnnnnnnnnnnnnnnnnnnnnnnnnnnnnnnnnnnnnnnnnnnnnnnnnnnnnnnnnnnnnnnnnnnnnnnnnnnnnnnnnnnnnnnnnnnnnnnnnnnnnnnnnnnnnnnnnnnnnnnnnnnnnnnnnnnnnnnnnnnnnnnnnnnnnnnnnnnnnnnnnnnnnnnnnnnnnnnnnnnnnnnnnnnnnnnnnnnnnnnnnnnnnnnnnnnnnnnnnnnnnnnnnnnnnnnnnnnnnnnnnnnnnnnnnnnnnnnnnnnnnnnnnnnnnnnnnnnnnnnnnnnnnnnnnnnnnnnnnnnnnnnnnnnnnnnnnnnnnnnnnnnnnnnnnnnnnnnnnnnnnnnnnnnnnnnnnnnnnnnnnnnnnnnnnnnnnnnnnnnnnnnnnnnnnnnnnnnnnnnnnnnnnnnnnnnnnnnnnnnnnnnnnnnnnnnnnnnnnnnnnnnnnnnnnnnnnnnnnnnnnnnnnnnnnnnnnnnnnnnnnnnnnnnnnnnnnnnnnnnnnnnnnnnnnnnnnnnnnnnnnnnnnnnnnnnnnnnnnnnnnnnnnnnnnnnnnnnnnnnnnnnnnnnnnnnnnnnnnnnnnnnnnnnnnnnnnnnnnnnnnnnnnnnnnnnnnnnnnnnnnnnnnnnnnnnnnnnnnnnnnnnnnnnnnnnnnnnnnnnnnnnnnnnnnnnnnnnnnnnnnnnnnnnnnnnnnnnnnnnnnnnnnnnnnnnnnnnnnnnnnnnnnnnnnnnnnnnnnnnnnnnnnnnnnnnnnnnnnnnnnnnnnnnnnnnnnnnnnnnnnnnnnnnnnnnnnnnnnnnnnnnnnnnnnnnnnnnnnnnnnnnnnnnnnnnnnnnnnnnnnnnnnnnnnnnnnnnnnnnnnnnnnnnnnnnnnnnnnnnnnnnnnnnnnnnnnnnnnnnnnnnnnnnnnnnnnnnnnnnnnnnnnnnnnnnnnnnnnnnnnnnnnnnnnnnnnnnnnnnnnnnnnnnnnnnnnnnnnnnnnnnnnnnnnnnnnnnnnnnnnnnnnnnnnnnnnnnnnnnnnnnnnnnnnnnnnnnnnnnnnnnnnnnnnnnnnnnnnnnnnnnnnnnnnnnnnnnnnnnnnnnnnnnnnnnnnnnnnnnnnnnnnnnnnnnnnnnnnnnnnnnnnnnnnnnnnnnnnnnnnnnnnnnnnnnnnnnnnnnnnnnnnnnnnnnnnnnnnnnnnnnnnnnnnnnnnnnnnnnnnnnnnnnnnnnnnnnnnnnnnnnnnnnnnnnnnnnnnnnnnnnnnnnnnnnnnnnnnnnnnnnnnnnnnnnnnnnnnnnnnnnnnnnnnnnnnnnnnnnnnnnnnnnnnnnnnnnnnnnnnnnnnnnnnnnnnnnnnnnnnnnnnnnnnnnnnnnnnnnnnnnnnnnnnnnnnnnnnnnnnnnnnnnnnnnnnnnnnnnnnnnnnnnnnnnnnnnnnnnnnnnnnnnnnnnnnnnnnnnnnnnnnnnnnnnnnnnnnnnnnnnnnnnnnnnnnnnnnnnnnnnnnnnnnnnnnnnnnnnnnnnnnnnnnnnnnnnnnnnnnnnnnnnnnnnnnnnnnnnnnnnnnnnnnnnnnnnnnnnnnnnnnnnnnnnnnnnnnnnnnnnnnnnnnnnnnnnnnnnnnnnnnnnnnnnnnnnnnnnnnnnnnnnnnnnnnnnnnnnnnnnnnnnnnnnnnnnnnnnnnnnnnnnnnnnnnnnnnnnnnnnnnnnnnnnnnnnnnnnnnnnnnnnnnnnnnnnnnnnnnnnnnnnnnnnnnnnnnnnnnnnnnnnnnnnnnnnnnnnnnnnnnnnnnnnnnnnnnnnnnnnnnnnnnnnnnnnnnnnnnnnnnnnnnnnnnnnnnnnnnnnnnnnnnnnnnnnnnnnnnnnnnnnnnnnnnnnnnnnnnnnnnnnnnnnnnnnnnnnnnnnnnnnnnnnnnnnnnnnnnnnnnnnnnnnnnnnnnnnnnnnnnnnnnnnnnnnnnnnnnnnnnnnnnnnnnnnnnnnnnnnnnnnnnnnnnnnnnnnnnnnnnnnnnnnnnnnnnnnnnnnnnnnnnnnnnnnnnnnnnnnnnnnnnnnnnnnnnnnnnnnnnnnnnnnnnnnnnnnnnnnnnnnnnnnnnnnnnnnnnnnnnnnnnnnnnnnnnnnnnnnnnnnnnnnnnnnnnnnnnnnnnnnnnnnnnnnnnnnnnnnnnnnnnnnnnnnnnnnnnnnnnnnnnnnnnnnnnnnnnnnnnnnnnnnnnnnnnnnnnnnnnnnnnnnnnnnnnnnnnnnnnnnnnnnnnnnnnnnnnnnnnnnnnnnnnnnnnnnnnnnnnnnnnnnnnnnnnnnnnnnnnnnnnnnnnnnnnnnnnnnnnnnnnnnnnnnnnnnnnnnnnnnnnnnnnnnnnnnnnnnnnnnnnnnnnnnnnnnnnnnnnnnnnnnnnnnnnnnnnnnnnnnnnnnnnnnnnnnnnnnnnnnnnnnnnnnnnnnnnnnnnnnnnnnnnnnnnnnnnnnnnnnnnnnnnnnnnnnnnnnnnnnnnnnnnnnnnnnnnnnnnnnnnnnnnnnnnnnnnnnnnnnnnnnnnnnnnnnnnnnnnnnnnnnnnnnnnnnnnnnnnnnnnnnnnnnnnnnnnnnnnnnnnnnnnnnnnnnnnnnnnnnnnnnnnnnnnnnnnnnnnnnnnnnnnnnnnnnnnnnnnnnnnnnnnnnnnnnnnnnnnnnnnnnnnnnnnnnnnnnnnnnnnnnnnnnnnnnnnnnnnnnnnnnnnnnnnnnnnnnnnnnnnnnnnnnnnnnnnnnnnnnnnnnnnnnnnnnnnnnnnnnnnnnnnnnnnnnnnnnnnnnnnnnnnnnnnnnnnnnnnnnnnnnnnnnnnnnnnnnnnnnnnnnnnnnnnnnnnnnnnnnnnnnnnnnnnnnnnnnnnnnnnnnnnnnnnnnnnnnnnnnnnnnnnnnnnnnnnnnnnnnnnnnnnnnnnnnnnnnnnnnnnnnnnnnnnnnnnnnnnnnnnnnnnnnnnnnnnnnnnnnnnnnnnnnnnnnnnnnnnnnnnnnnnnnnnnnnnnnnnnnnnnnnnnnnnnnnnnnnnnnnnnnnnnnnnnnnnnnnnnnnnnnnnnnnnnnnnnnnnnnnnnnnnnnnnnnnnnnnnnnnnnnnnnnnnnnnnnnnnnnnnnnnnnnnnnnnnnnnnnnnnnnnnnnnnnnnnnnnnnnnnnnnnnnnnnnnnnnnnnnnnnnnnnnnnnnnnnnnnnnnnnnnnnnnnnnnnnnnnnnnnnnnnnnnnnnnnnnnnnnnnnnnnnnnnnnnnnnnnnnnnnnnnnnnnnnnnnnnnnnnnnnnnnnnnnnnnnnnnnnnnnnnnnnnnnnnnnnnnnnnnnnnnnnnnnnnnnnnnnnnnnnnnnnnnnnnnnnnnnnnnnnnnnnnnnnnnnnnnnnnnnnnnnnnnnnnnnnnnnnnnnnnnnnnnnnnnnnnnnnnnnnnnnnnnnnnnnnnnnnnnnnnnnnnnnnnnnnnnnnnnnnnnnnnnnnnnnnnnnnnnnnnnnnnnnnnnnnnnnnnnnnnnnnnnnnnnnnnnnnnnnnnnnnnnnnnnnnnnnnnnnnnnnnnnnnnnnnnnnnnnnnnnnnnnnnnnnnnnnnnnnnnnnnnnnnnnnnnnnnnnnnnnnnnnnnnnnnnnnnnnnnnnnnnnnnnnnnnnnnnnnnnnnnnnnnnnnnnnnnnnnnnnnnnnnnnnnnnnnnnnnnnnnnnnnnnnnnnnnnnnnnnnnnnnnnnnnnnnnnnnnnnnnnnnnnnnnnnnnnnnnnnnnnnnnnnnnnnnnnnnnnnnnnnnnnnnnnnnnnnnnnnnnnnnnnnnnnnnnnnnnnnnnnnnnnnnnnnnnnnnnnnnnnnnnnnnnnnnnnnnnnnnnnnnnnnnnnnnnnnnnnnnnnnnnnnnnnnnnnnnnnnnnnnnnnnnnnnnnnnnnnnnnnnnnnnnnnnnnnnnnnnnnnnnnnnnnnnnnnnnnnnnnnnnnnnnnnnnnnnnnnnnnnnnnnnnnnnnnnnnnnnnnnnnnnnnnnnnnnnnnnnnnnnnnnnnnnnnnnnnnnnnnnnnnnnnnnnnnnnnnnnnnnnnnnnnnnnnnnnnnnnnnnnnnnnnnnnnnnnnnnnnnnnnnnnnnnnnnnnnnnnnnnnnnnnnnnnnnnnnnnnnnnnnnnnnnnnnnnnnnnnnnnnnnnnnnnnnnnnnnnnnnnnnnnnnnnnnnnnnnnnnnnnnnnnnnnnnnnnnnnnnnnnnnnnnnnnnnnnnnnnnnnnnnnnnnnnnnnnnnnnnnnnnnnnnnnnnnnnnnnnnnnnnnnnnnnnnnnnnnnnnnnnnnnnnnnnnnnnnnnnnnnnnnnnnnnnnnnnnnnnnnnnnnnnnnnnnnnnnnnnnnnnnnnnnnnnnnnnnnnnnnnnnnnnnnnnnnnnnnnnnnnnnnnnnnnnnnnnnnnnnnnnnnnnnnnnnnnnnnnnnnnnnnnnnnnnnnnnnnnnnnnnnnnnnnnnnnnnnnnnnnnnnnnnnnnnnnnnnnnnnnnnnnnnnnnnnnnnnnnnnnnnnnnnnnnnnnnnnnnnnnnnnnnnnnnnnnnnnnnnnnnnnnnnnnnnnnnnnnnnnnnnnnnnnnnnnnnnnnnnnnnnnnnnnnnnnnnnnnnnnnnnnnnnnnnnnnnnnnnnnnnnnnnnnnnnnnnnnnnnnnnnnnnnnnnnnnnnnnnnnnnnnnnnnnnnnnnnnnnnnnnnnnnnnnnnnnnnnnnnnnnnnnnnnnnnnnnnnnnnnnnnnnnnnnnnnnnnnnnnnnnnnnnnnnnnnnnnnnnnnnnnnnnnnnnnnnnnnnnnnnnnnnnnnnnnnnnnnnnnnnnnnnnnnnnnnnnnnnnnnnnnnnnnnnnnnnnnnnnnnnnnnnnnnnnnnnnnnnnnnnnnnnnnnnnnnnnnnnnnnnnnnnnnnnnnnnnnnnnnnnnnnnnnnnnnnnnnnnnnnnnnnnnnnnnnnnnnnnnnnnnnnnnnnnnnnnnnnnnnnnnnnnnnnnnnnnnnnnnnnnnnnnnnnnnnnnnnnnnnnnnnnnnnnnnnnnnnnnnnnnnnnnnnnnnnnnnnnnnnnnnnnnnnnnnnnnnnnnnnnnnnnnnnnnnnnnnnnnnnnnnnnnnnnnnnnnnnnnnnnnnnnnnnnnnnnnnnnnnnnnnnnnnnnnnnnnnnnnnnnnnnnnnnnnnnnnnnnnnnnnnnnnnnnnnnnnnnnnnnnnnnnnnnnnnnnnnnnnnnnnnnnnnnnnnnnnnnnnnnnnnnnnnnnnnnnnnnnnnnnnnnnnnnnnnnnnnnnnnnnnnnnnnnnnnnnnnnnnnnnnnnnnnnnnnnnnnnnnnnnnnnnnnnnnnnnnnnnnnnnnnnnnnnnnnnnnnnnnnnnnnnnnnnnnnnnnnnnnnnnnnnnnnnnnnnnnnnnnnnnnnnnnnnnnnnnnnnnnnnnnnnnnnnnnnnnnnnnnnnnnnnnnnnnnnnnnnnnnnnnnnnnnnnnnnnnnnnnnnnnnnnnnnnnnnnnnnnnnnnnnnnnnnnnnnnnnnnnnnnnnnnnnnnnnnnnnnnnnnnnnnnnnnnnnnnnnnnnnnnnnnnnnnnnnnnnnnnnnnnnnnnnnnnnnnnnnnnnnnnnnnnnnnnnnnnnnnnnnnnnnnnnnnnnnnnnnnnnnnnnnnnnnnnnnnnnnnnnnnnnnnnnnnnnnnnnnnnnnnnnnnnnnnnnnnnnnnnnnnnnnnnnnnnnnnnnnnnnnnnnnnnnnnnnnnnnnnnnnnnnnnnnnnnnnnnnnnnnnnnnnnnnnnnnnnnnnnnnnnnnnnnnnnnnnnnnnnnnnnnnnnnnnnnnnnnnnnnnnnnnnnnnnnnnnnnnnnnnnnnnnnnnnnnnnnnnnnnnnnnnnnnnnnnnnnnnnnnnnnnnnnnnnnnnnnnnnnnnnnnnnnnnnnnnnnnnnnnnnnnnnnnnnnnnnnnnnnnnnnnnnnnnnnnnnnnnnnnnnnnnnnnnnnnnnnnnnnnnnnnnnnnnnnnnnnnnnnnnnnnnnnnnnnnnnnnnnnnnnnnnnnnnnnnnnnnnnnnnnnnnnnnnnnnnnnnnnnnnnnnnnnnnnnnnnnnnnnnnnnnnnnnnnnnnnnnnnnnnnnnnnnnnnnnnnnnnnnnnnnnnnnnnnnnnnnnnnnnnnnnnnnnnnnnnnnnnnnnnnnnnnnnnnnnnnnnnnnnnnnnnnnnnnnnnnnnnnnnnnnnnnnnnnnnnnnnnnnnnnnnnnnnnnnnnnnnnnnnnnnnnnnnnnnnnnnnnnnnnnnnnnnnnnnnnnnnnnnnnnnnnnnnnnnnnnnnnnnnnnnnnnnnnnnnnnnnnnnnnnnnnnnnnnnnnnnnnnnnnnnnnnnnnnnnnnnnnnnnnnnnnnnnnnnnnnnnnnnnnnnnnnnnnnnnnnnnnnnnnnnnnnnnnnnnnnnnnnnnnnnnnnnnnnnnnnnnnnnnnnnnnnnnnnnnnnnnnnnnnnnnnnnnnnnnnnnnnnnnnnnnnnnnnnnnnnnnnnnnnnnnnnnnnnnnnnnnnnnnnnnnnnnnnnnnnnnnnnnnnnnnnnnnnnnnnnnnnnnnnnnnnnnnnnnnnnnnnnnnnnnnnnnnnnnnnnnnnnnnnnnnnnnnnnnnnnnnnnnnnnnnnnnnnnnnnnnnnnnnnnnnnnnnnnnnnnnnnnnnnnnnnnnnnnnnnnnnnnnnnnnnnnnnnnnnnnnnnnnnnnnnnnnnnnnnnnnnnnnnnnnnnnnnnnnnnnnnnnnnnnnnnnnnnnnnnnnnnnnnnnnnnnnnnnnnnnnnnnnnnnnnnnnnnnnnnnnnnnnnnnnnnnnnnnnnnnnnnnnnnnnnnnnnnnnnnnnnnnnnnnnnnnnnnnnnnnnnnnnnnnnnnnnnnnnnnnnnnnnnnnnnnnnnnnnnnnnnnnnnnnnnnnnnnnnnnnnnnnnnnnnnnnnnnnnnnnnnnnnnnnnnnnnnnnnnnnnnnnnnnnnnnnnnnnnnnnnnnnnnnnnnnnnnnnnnnnnnnnnnnnnnnnnnnnnnnnnnnnnnnnnnnnnnnnnnnnnnnnnnnnnnnnnnnnnnnnnnnnnnnnnnnnnnnnnnnnnnnnnnnnnnnnnnnnnnnnnnnnnnnnnnnnnnnnnnnnnnnnnnnnnnnnnnnnnnnnnnnnnnnnnnnnnnnnnnnnnnnnnnnnnnnnnnnnnnnnnnnnnnnnnnnnnnnnnnnnnnnnnnnnnnnnnnnnnnnnnnnnnnnnnnnnnnnnnnnnnnnnnnnnnnnnnnnnnnnnnnnnnnnnnnnnnnnnnnnnnnnnnnnnnnnnnnnnnnnnnnnnnnnnnnnnnnnnnnnnnnnnnnnnnnnnnnnnnnnnnnnnnnnnnnnnnnnnnnnnnnnnnnnnnnnnnnnnnnnnnnnnnnnnnnnnnnnnnnnnnnnnnnnnnnnnnnnnnnnnnnnnnnnnnnnnnnnnnnnnnnnnnnnnnnnnnnnnnnnnnnnnnnnnnnnnnnnnnnnnnnnnnnnnnnnnnnnnnnnnnnnnnnnnnnnnnnnnnnnnnnnnnnnnnnnnnnnnnnnnnnnnnnnnnnnnnnnnnnnnnnnnnnnnnnnnnnnnnnnnnnnnnnnnnnnnnnnnnnnnnnnnnnnnnnnnnnnnnnnnnnnnnnnnnnnnnnnnnnnnnnnnnnnnnnnnnnnnnnnnnnnnnnnnnnnnnnnnnnnnnnnnnnnnnnnnnnnnnnnnnnnnnnnnnnnnnnnnnnnnnnnnnnnnnnnnnnnnnnnnnnnnnnnnnnnnnnnnnnnnnnnnnnnnnnnnnnnnnnnnnnnnnnnnnnnnnnnnnnnnnnnnnnnnnnnnnnnnnnnnnnnnnnnnnnnnnnnnnnnnnnnnnnnnnnnnnnnnnnnnnnnnnnnnnnnnnnnnnnnnnnnnnnnnnnnnnnnnnnnnnnnnnnnnnnnnnnnnnnnnnnnnnnnnnnnnnnnnnnnnnnnnnnnnnnnnnnnnnnnnnnnnnnnnnnnnnnnnnnnnnnnnnnnnnnnnnnnnnnnnnnnnnnnnnnnnnnnnnnnnnnnnnnnnnnnnnnnnnnnnnnnnnnnnnnnnnnnnnnnnnnnnnnnnnnnnnnnnnnnnnnnnnnnnnnnnnnnnnnnnnnnnnnnnnnnnnnnnnnnnnnnnnnnnnnnnnnnnnnnnnnnnnnnnnnnnnnnnnnnnnnnnnnnnnnnnnnnnnnnnnnnnnnnnnnnnnnnnnnnnnnnnnnnnnnnnnnnnnnnnnnnnnnnnnnnnnnnnnnnnnnnnnnnnnnnnnnnnnnnnnnnnnnnnnnnnnnnnnnnnnnnnnnnnnnnnnnnnnnnnnnnnnnnnnnnnnnnnnnnnnnnnnnnnnnnnnnnnnnnnnnnnnnnnnnnnnnnnnnnnnnnnnnnnnnnnnnnnnnnnnnnnnnnnnnnnnnnnnnnnnnnnnnnnnnnnnnnnnnnnnnnnnnnnnnnnnnnnnnnnnnnnnnnnnnnnnnnnnnnnnnnnnnnnnnnnnnnnnnnnnnnnnnnnnnnnnnnnnnnnnnnnnnnnnnnnnnnnnnnnnnnnnnnnnnnnnnnnnnnnnnnnnnnnnnnnnnnnnnnnnnnnnnnnnnnnnnnnnnnnnnnnnnnnnnnnnnnnnnnnnnnnnnnnnnnnnnnnnnnnnnnnnnnnnnnnnnnnnnnnnnnnnnnnnnnnnnnnnnnnnnnnnnnnnnnnnnnnnnnnnnnnnnnnnnnnnnnnnnnnnnnnnnnnnnnnnnnnnnnnnnnnnnnnnnnnnnnnnnnnnnnnnnnnnnnnnnnnnnnnnnnnnnnnnnnnnnnnnnnnnnnnnnnnnnnnnnnnnnnnnnnnnnnnnnnnnnnnnnnnnnnnnnnnnnnnnnnnnnnnnnnnnnnnnnnnnnnnnnnnnnnnnnnnnnnnnnnnnnnnnnnnnnnnnnnnnnnnnnnnnnnnnnnnnnnnnnnnnnnnnnnnnnnnnnnnnnnnnnnnnnnnnnnnnnnnnnnnnnnnnnnnnnnnnnnnnnnnnnnnnnnnnnnnnnnnnnnnnnnnnnnnnnnnnnnnnnnnnnnnnnnnnnnnnnnnnnnnnnnnnnnnnnnnnnnnnnnnnnnnnnnnnnnnnnnnnnnnnnnnnnnnnnnnnnnnnnnnnnnnnnnnnnnnnnnnnnnnnnnnnnnnnnnnnnnnnnnnnnnnnnnnnnnnnnnnnnnnnnnnnnnnnnnnnnnnnnnnnnnnnnnnnnnnnnnnnnnnnnnnnnnnnnnnnnnnnnnnnnnnnnnnnnnnnnnnnnnnnnnnnnnnnnnnnnnnnnnnnnnnnnnnnnnnnnnnnnnnnnnnnnnnnnnnnnnnnnnnnnnnnnnnnnnnnnnnnnnnnnnnnnnnnnnnnnnnnnnnnnnnnnnnnnnnnnnnnnnnnnnnnnnnnnnnnnnnnnnnnnnnnnnnnnnnnnnnnnnnnnnnnnnnnnnnnnnnnnnnnnnnnnnnnnnnnnnnnnnnnnnnnnnnnnnnnnnnnnnnnnnnnnnnnnnnnnnnnnnnnnnnnnnnnnnnnnnnnnnnnnnnnnnnnnnnnnnnnnnnnnnnnnnnnnnnnnnnnnnnnnnnnnnnnnnnnnnnnnnnnnnnnnnnnnnnnnnnnnnnnnnnnnnnnnnnnnnnnnnnnnnnnnnnnnnnnnnnnnnnnnnnnnnnnnnnnnnnnnnnnnnnnnnnnnnnnnnnnnnnnnnnnnnnnnnnnnnnnnnnnnnnnnnnnnnnnnnnnnnnnnnnnnnnnnnnnnnnnnnnnnnnnnnnnnnnnnnnnnnnnnnnnnnnnnnnnnnnnnnnnnnnnnnnnnnnnnnnnnnnnnnnnnnnnnnnnnnnnnnnnnnnnnnnnnnnnnnnnnnnnnnnnnnnnnnnnnnnnnnnnnnnnnnnnnnnnnnnnnnnnnnnnnnnnnnnnnnnnnnnnnnnnnnnnnnnnnnnnnnnnnnnnnnnnnnnnnnnnnnnnnnnnnnnnnnnnnnnnnnnnnnnnnnnnnnnnnnnnnnnnnnnnnnnnnnnnnnnnnnnnnnnnnnnnnnnnnnnnnnnnnnnnnnnnnnnnnnnnnnnnnnnnnnnnnnnnnnnnnnnnnnnnnnnnnnnnnnnnnnnnnnnnnnnnnnnnnnnnnnnnnnnnnnnnnnnnnnnnnnnnnnnnnnnnnnnnnnnnnnnnnnnnnnnnnnnnnnnnnnnnnnnnnnnnnnnnnnnnnnnnnnnnnnnnnnnnnnnnnnnnnnnnnnnnnnnnnnnnnnnnnnnnnnnnnnnnnnnnnnnnnnnnnnnnnnnnnnnnnnnnnnnnnnnnnnnnnnnnnnnnnnnnnnnnnnnnnnnnnnnnnnnnnnnnnnnnnnnnnnnnnnnnnnnnnnnnnnnnnnnnnnnnnnnnnnnnnnnnnnnnnnnnnnnnnnnnnnnnnnnnnnnnnnnnnnnnnnnnnnnnnnnnnnnnnnnnnnnnnnnnnnnnnnnnnnnnnnnnnnnnnnnnnnnnnnnnnnnnnnnnnnnnnnnnnnnnnnnnnnnnnnnnnnnnnnnnnnnnnnnnnnnnnnnnnnnnnnnnnnnnnnnnnnnnnnnnnnnnnnnnnnnnnnnnnnnnnnnnnnnnnnnnnnnnnnnnnnnnnnnnnnnnnnnnnnnnnnnnnnnnnnnnnnnnnnnnnnnnnnnnnnnnnnnnnnnnnnnnnnnnnnnnnnnnnnnnnnnnnnnnnnnnnnnnnnnnnnnnnnnnnnnnnnnnnnnnnnnnnnnnnnnnnnnnnnnnnnnnnnnnnnnnnnnnnnnnnnnnnnnnnnnnnnnnnnnnnnnnnnnnnnnnnnnnnnnnnnnnnnnnnnnnnnnnnnnnnnnnnnnnnnnnnnnnnnnnnnnnnnnnnnnnnnnnnnnnnnnnnnnnnnnnnnnnnnnnnnnnnnnnnnnnnnnnnnnnnnnnnnnnnnnnnnnnnnnnnnnnnnnnnnnnnnnnnnnnnnnnnnnnnnnnnnnnnnnnnnnnnnnnnnnnnnnnnnnnnnnnnnnnnnnnnnnnnnnnnnnnnnnnnnnnnnnnnnnnnnnnnnnnnnnnnnnnnnnnnnnnnnnnnnnnnnnnnnnnnnnnnnnnnnnnnnnnnnnnnnnnnnnnnnnnnnnnnnnnnnnnnnnnnnnnnnnnnnnnnnnnnnnnnnnnnnnnnnnnnnnnnnnnnnnnnnnnnnnnnnnnnnnnnnnnnnnnnnnnnnnnnnnnnnnnnnnnnnnnnnnnnnnnnnnnnnnnnnnnnnnnnnnnnnnnnnnnnnnnnnnnnnnnnnnnnnnnnnnnnnnnnnnnnnnnnnnnnnnnnnnnnnnnnnnnnnnnnnnnnnnnnnnnnnnnnnnnnnnnnnnnnnnnnnnnnnnnnnnnnnnnnnnnnnnnnnnnnnnnnnnnnnnnnnnnnnnnnnnnnnnnnnnnnnnnnnnnnnnnnnnnnnnnnnnnnnnnnnnnnnnnnnnnnnnnnnnnnnnnnnnnnnnnnnnnnnnnnnnnnnnnnnnnnnnnnnnnnnnnnnnnnnnnnnnnnnnnnnnnnnnnnnnnnnnnnnnnnnnnnnnnnnnnnnnnnnnnnnnnnnnnnnnnnnnnnnnnnnnnnnnnnnnnnnnnnnnnnnnnnnnnnnnnnnnnnnnnnnnnnnnnnnnnnnnnnnnnnnnnnnnnnnnnnnnnnnnnnnnnnnnnnnnnnnnnnnnnnnnnnnnnnnnnnnnnnnnnnnnnnnnnnnnnnnnnnnnnnnnnnnnnnnnnnnnnnnnnnnnnnnnnnnnnnnnnnnnnnnnnnnnnnnnnnnnnnnnnnnnnnnnnnnnnnnnnnnnnnnnnnnnnnnnnnnnnnnnnnnnnnnnnnnnnnnnnnnnnnnnnnnnnnnnnnnnnnnnnnnnnnnnnnnnnnnnnnnnnnnnnnnnnnnnnnnnnnnnnnnnnnnnnnnnnnnnnnnnnnnnnnnnnnnnnnnnnnnnnnnnnnnnnnnnnnnnnnnnnnnnnnnnnnnnnnnnnnnnnnnnnnnnnnnnnnnnnnnnnnnnnnnnnnnnnnnnnnnnnnnnnnnnnnnnnnnnnnnnnnnnnnnnnnnnnnnnnnnnnnnnnnnnnnnnnnnnnnnnnnnnnnnnnnnnnnnnnnnnnnnnnnnnnnnnnnnnnnnnnnnnnnnnnnnnnnnnnnnnnnnnnnnnnnnnnnnnnnnnnnnnnnnnnnnnnnnnnnnnnnnnnnnnnnnnnnnnnnnnnnnnnnnnnnnnnnnnnnnnnnnnnnnnnnnnnnnnnnnnnnnnnnnnnnnnnnnnnnnnnnnnnnnnnnnnnnnnnnnnnnnnnnnnnnnnnnnnnnnnnnnnnnnnnnnnnnnnnnnnnnnnnnnnnnnnnnnnnnnnnnnnnnnnnnnnnnnnnnnnnnnnnnnnnnnnnnnnnnnnnnnnnnnnnnnnnnnnnnnnnnnnnnnnnnnnnnnnnnnnnnnnnnnnnnnnnnnnnnnnnnnnnnnnnnnnnnnnnnnnnnnnnnnnnnnnnnnnnnnnnnnnnnnnnnnnnnnnnnnnnnnnnnnnnnnnnnnnnnnnnnnnnnnnnnnnnnnnnnnnnnnnnnnnnnnnnnnnnnnnnnnnnnnnnnnnnnnnnnnnnnnnnnnnnnnnnnnnnnnnnnnnnnnnnnnnnnnnnnnnnnnnnnnnnnnnnnnnnnnnnnnnnnnnnnnnnnnnnnnnnnnnnnnnnnnnnnnnnnnnnnnnnnnnnnnnnnnnnnnnnnnnnnnnnnnnnnnnnnnnnnnnnnnnnnnnnnnnnnnnnnnnnnnnnnnnnnnnnnnnnnnnnnnnnnnnnnnnnnnnnnnnnnnnnnnnnnnnnnnnnnnnnnnnnnnnnnnnnnnnnnnnnnnnnnnnnnnnnnnnnnnnnnnnnnnnnnnnnnnnnnnnnnnnnnnnnnnnnnnnnnnnnnnnnnnnnnnnnnnnnnnnnnnnnnnnnnnnnnnnnnnnnnnnnnnnnnnnnnnnnnnnnnnnnnnnnnnnnnnnnnnnnnnnnnnnnnnnnnnnnnnnnnnnnnnnnnnnnnnnnnnnnnnnnnnnnnnnnnnnnnnnnnnnnnnnnnnnnnnnnnnnnnnnnnnnnnnnnnnnnnnnnnnnnnnnnnnnnnnnnnnnnnnnnnnnnnnnnnnnnnnnnnnnnnnnnnnnnnnnnnnnnnnnnnnnnnnnnnnnnnnnnnnnnnnnnnnnnnnnnnnnnnnnnnnnnnnnnnnnnnnnnnnnnnnnnnnnnnnnnnnnnnnnnnnnnnnnnnnnnnnnnnnnnnnnnnnnnnnnnnnnnnnnnnnnnnnnnnnnnnnnnnnnnnnnnnnnnnnnnnnnnnnnnnnnnnnnnnnnnnnnnnnnnnnnnnnnnnnnnnnnnnnnnnnnnnnnnnnnnnnnnnnnnnnnnnnnnnnnnnnnnnnnnnnnnnnnnnnnnnnnnnnnnnnnnnnnnnnnnnnnnnnnnnnnnnnnnnnnnnnnnnnnnnnnnnnnnnnnnnnnnnnnnnnnnnnnnnnnnnnnnnnnnnnnnnnnnnnnnnnnnnnnnnnnnnnnnnnnnnnnnnnnnnnnnnnnnnnnnnnnnnnnnnnnnnnnnnnnnnnnnnnnnnnnnnnnnnnnnnnnnnnnnnnnnnnnnnnnnnnnnnnnnnnnnnnnnnnnnnnnnnnnnnnnnnnnnnnnnnnnnnnnnnnnnnnnnnnnnnnnnnnnnnnnnnnnnnnnnnnnnnnnnnnnnnnnnnnnnnnnnnnnnnnnnnnnnnnnnnnnnnnnnnnnnnnnnnnnnnnnnnnnnnnnnnnnnnnnnnnnnnnnnnnnnnnnnnnnnnnnnnnnnnnnnnnnnnnnnnnnnnnnnnnnnnnnnnnnnnnnnnnnnnnnnnnnnnnnnnnnnnnnnnnnnnnnnnnnnnnnnnnnnnnnnnnnnnnnnnnnnnnnnnnnnnnnnnnnnnnnnnnnnnnnnnnnnnnnnnnnnnnnnnnnnnnnnnnnnnnnnnnnnnnnnnnnnnnnnnnnnnnnnnnnnnnnnnnnnnnnnnnnnnnnnnnnnnnnnnnnnnnnnnnnnnnnnnnnnnnnnnnnnnnnnnnnnnnnnnnnnnnnnnnnnnnnnnnnnnnnnnnnnnnnnnnnnnnnnnnnnnnnnnnnnnnnnnnnnnnnnnnnnnnnnnnnnnnnnnnnnnnnnnnnnnnnnnnnnnnnnnnnnnnnnnnnnnnnnnnnnnnnnnnnnnnnnnnnnnnnnnnnnnnnnnnnnnnnnnnnnnnnnnnnnnnnnnnnnnnnnnnnnnnnnnnnnnnnnnnnnnnnnnnnnnnnnnnnnnnnnnnnnnnnnnnnnnnnnnnnnnnnnnnnnnnnnnnnnnnnnnnnnnnnnnnnnnnnnnnnnnnnnnnnnnnnnnnnnnnnnnnnnnnnnnnnnnnnnnnnnnnnnnnnnnnnnnnnnnnnnnnnnnnnnnnnnnnnnnnnnnnnnnnnnnnnnnnnnnnnnnnnnnnnnnnnnnnnnnnnnnnnnnnnnnnnnnnnnnnnnnnnnnnnnnnnnnnnnnnnnnnnnnnnnnnnnnnnnnnnnnnnnnnnnnnnnnnnnnnnnnnnnnnnnnnnnnnnnnnnnnnnnnnnnnnnnnnnnnnnnnnnnnnnnnnnnnnnnnnnnnnnnnnnnnnnnnnnnnnnnnnnnnnnnnnnnnnnnnnnnnnnnnnnnnnnnnnnnnnnnnnnnnnnnnnnnnnnnnnnnnnnnnnnnnnnnnnnnnnnnnnnnnnnnnnnnnnnnnnnnnnnnnnnnnnnnnnnnnnnnnnnnnnnnnnnnnnnnnnnnnnnnnnnnnnnnnnnnnnnnnnnnnnnnnnnnnnnnnnnnnnnnnnnnnnnnnnnnnnnnnnnnnnnnnnnnnnnnnnnnnnnnnnnnnnnnnnnnnnnnnnnnnnnnnnnnnnnnnnnnnnnnnnnnnnnnnnnnnnnnnnnnnnnnnnnnnnnnnnnnnnnnnnnnnnnnnnnnnnnnnnnnnnnnnnnnnnnnnnnnnnnnnnnnnnnnnnnnnnnnnnnnnnnnnnnnnnnnnnnnnnnnnnnnnnnnnnnnnnnnnnnnnnnnnnnnnnnnnnnnnnnnnnnnnnnnnnnnnnnnnnnnnnnnnnnnnnnnnnnnnnnnnnnnnnnnnnnnnnnnnnnnnnnnnnnnnnnnnnnnnnnnnnnnnnnnnnnnnnnnnnnnnnnnnnnnnnnnnnnnnnnnnnnnnnnnnnnnnnnnnnnnnnnnnnnnnnnnnnnnnnnnnnnnnnnnnnnnnnnnnnnnnnnnnnnnnnnnnnnnnnnnnnnnnnnnnnnnnnnnnnnnnnnnnnnnnnnnnnnnnnnnnnnnnnnnnnnnnnnnnnnnnnnnnnnnnnnnnnnnnnnnnnnnnnnnnnnnnnnnnnnnnnnnnnnnnnnnnnnnnnnnnnnnnnnnnnnnnnnnnnnnnnnnnnnnnnnnnnnnnnnnnnnnnnnnnnnnnnnnnnnnnnnnnnnnnnnnnnnnnnnnnnnnnnnnnnnnnnnnnnnnnnnnnnnnnnnnnnnnnnnnnnnnnnnnnnnnnnnnnnnnnnnnnnnnnnnnnnnnnnnnnnnnnnnnnnnnnnnnnnnnnnnnnnnnnnnnnnnnnnnnnnnnnnnnnnnnnnnnnnnnnnnnnnnnnnnnnnnnnnnnnnnnnnnnnnnnnnnnnnnnnnnnnnnnnnnnnnnnnnnnnnnnnnnnnnnnnnnnnnnnnnnnnnnnnnnnnnnnnnnnnnnnnnnnnnnnnnnnnnnnnnnnnnnnnnnnnnnnnnnnnnnnnnnnnnnnnnnnnnnnnnnnnnnnnnnnnnnnnnnnnnnnnnnnnnnnnnnnnnnnnnnnnnnnnnnnnnnnnnnnnnnnnnnnnnnnnnnnnnnnnnnnnnnnnnnnnnnnnnnnnnnnnnnnnnnnnnnnnnnnnnnnnnnnnnnnnnnnnnnnnnnnnnnnnnnnnnnnnnnnnnnnnnnnnnnnnnnnnnnnnnnnnnnnnnnnnnnnnnnnnnnnnnnnnnnnnnnnnnnnnnnnnnnnnnnnnnnnnnnnnnnnnnnnnnnnnnnnnnnnnnnnnnnnnnnnnnnnnnnnnnnnnnnnnnnnnnnnnnnnnnnnnnnnnnnnnnnnnnnnnnnnnnnnnnnnnnnnnnnnnnnnnnnnnnnnnnnnnnnnnnnnnnnnnnnnnnnnnnnnnnnnnnnnnnnnnnnnnnnnnnnnnnnnnnnnnnnnnnnnnnnnnnnnnnnnnnnnnnnnnnnnnnnnnnnnnnnnnnnnnnnnnnnnnnnnnnnnnnnnnnnnnnnnnnnnnnnnnnnnnnnnnnnnnnnnnnnnnnnnnnnnnnnnnnnnnnnnnnnnnnnnnnnnnnnnnnnnnnnnnnnnnnnnnnnnnnnnnnnnnnnnnnnnnnnnnnnnnnnnnnnnnnnnnnnnnnnnnnnnnnnnnnnnnnnnnnnnnnnnnnnnnnnnnnnnnnnnnnnnnnnnnnnnnnnnnnnnnnnnnnnnnnnnnnnnnnnnnnnnnnnnnnnnnnnnnnnnnnnnnnnnnnnnnnnnnnnnnnnnnnnnnnnnnnnnnnnnnnnnnnnnnnnnnnnnnnnnnnnnnnnnnnnnnnnnnnnnnnnnnnnnnnnnnnnnnnnnnnnnnnnnnnnnnnnnnnnnnnnnnnnnnnnnnnnnnnnnnnnnnnnnnnnnnnnnnnnnnnnnnnnnnnnnnnnnnnnnnnnnnnnnnnnnnnnnnnnnnnnnnnnnnnnnnnnnnnnnnnnnnnnnnnnnnnnnnnnnnnnnnnnnnnnnnnnnnnnnnnnnnnnnnnnnnnnnnnnnnnnnnnnnnnnnnnnnnnnnnnnnnnnnnnnnnnnnnnnnnnnnnnnnnnnnnnnnnnnnnnnnnnnnnnnnnnnnnnnnnnnnnnnnnnnnnnnnnnnnnnnnnnnnnnnnnnnnnnnnnnnnnnnnnnnnnnnnnnnnnnnnnnnnnnnnnnnnnnnnnnnnnnnnnnnnnnnnnnnnnnnnnnnnnnnnnnnnnnnnnnnnnnnnnnnnnnnnnnnnnnnnnnnnnnnnnnnnnnnnnnnnnnnnnnnnnnnnnnnnnnnnnnnnnnnnnnnnnnnnnnnnnnnnnnnnnnnnnnnnnnnnnnnnnnnnnnnnnnnnnnnnnnnnnnnnnnnnnnnnnnnnnnnnnnnnnnnnnnnnnnnnnnnnnnnnnnnnnnnnnnnnnnnnnnnnnnnnnnnnnnnnnnnnnnnnnnnnnnnnnnnnnnnnnnnnnnnnnnnnnnnnnnnnnnnnnnnnnnnnnnnnnnnnnnnnnnnnnnnnnnnnnnnnnnnnnnnnnnnnnnnnnnnnnnnnnnnnnnnnnnnnnnnnnnnnnnnnnnnnnnnnnnnnnnnnnnnnnnnnnnnnnnnnnnnnnnnnnnnnnnnnnnnnnnnnnnnnnnnnnnnnnnnnnnnnnnnnnnnnnnnnnnnnnnnnnnnnnnnnnnnnnnnnnnnnnnnnnnnnnnnnnnnnnnnnnnnnnnnnnnnnnnnnnnnnnnnnnnnnnnnnnnnnnnnnnnnnnnnnnnnnnnnnnnnnnnnnnnnnnnnnnnnnnnnnnnnnnnnnnnnnnnnnnnnnnnnnnnnnnnnnnnnnnnnnnnnnnnnnnnnnnnnnnnnnnnnnnnnnnnnnnnnnnnnnnnnnnnnnnnnnnnnnnnnnnnnnnnnnnnnnnnnnnnnnnnnnnnnnnnnnnnnnnnnnnnnnnnnnnnnnnnnnnnnnnnnnnnnnnnnnnnnnnnnnnnnnnnnnnnnnnnnnnnnnnnnnnnnnnnnnnnnnnnnnnnnnnnnnnnnnnnnnnnnnnnnnnnnnnnnnnnnnnnnnnnnnnnnnnnnnnnnnnnnnnnnnnnnnnnnnnnnnnnnnnnnnnnnnnnnnnnnnnnnnnnnnnnnnnnnnnnnnnnnnnnnnnnnnnnnnnnnnnnnnnnnnnnnnnnnnnnnnnnnnnnnnnnnnnnnnncatatagtagatgcaagaatcgttccgaatctgccacaataactgcggattcctttcccaaagcctttttcgcccacggacaggccgtttgccccttcccactaacatcccgtaaacctccccttaaattcccgcccggccaatgggaactcagcgggaagtattttagatgtgtatgggatggggcaaatggggcttctattgatagtgggtatcaaaatgggaggaagtccacaaattgcgcgaattcatacgaattgcttttccagttacgctaccaactgtggtagataacctaaaataaaggacttacttcccaatcgggcaagtaatccatatgtttggagcccgaaggtcccagaacgattggccgacggggacatcgaccttcctgacgctggcgtcgagcgaggcacgagcatggacgccagcaacatctcctgtagtccatactcgcaagctcgctgcactccaggctcaccaacgttggaaggcaaattcacaaattcacaaccggtaaatatggcttgtgaatttgcaacctgctgatagacgggtaattatgaggctaattcacaaaaaaggggtctcttatacatccgcggaagccgattgtaaacaggatatgatgtatccacgctaccagtctataatacatatagaaatagtatatataatatataatagtattatatattattatatattgatattatatcatctctaccttcccttcatctcttgtttgcggcatgagccactgcaaaccggcattctcccctggtccggctggatataagagataagcgtattttgtgaatttgtcccccaactcactgtgccacaataacacacggattcacaagccatatttaccggttgtgaatttgtgaatctgaccttgccggccttaaggaagtttgaaattagagccctattttggacttgacaaattattccttggtaaatttggtgtataatagctatggggcataatgatgttagcctgtggaacggcctctgtaaaggatcaacaagctatcaaccctccccatgcgacaggagcttcaatgtattataatttgacagacaaaccctggatcagtgtgctacagcttgacgggcattctgccaggctcggcctggctgaggtcctgcgaaaagcacacacactgcgtttggcttacggcaatccgatggaccgcatgtccgttttccgtttcctcctcgccctgggctattggtgttttgccaatacaaaacaagcgccggtatcagataagccactgcctcaggcatggacggactggcttgaacaaaaccaagaatatttcgaattgttcggtgatggccccagattctaccaatccccaggaacatccagaatacgccccagcacggaccttatccacgagcttcccacggcaaacaatttctggcacttccgccatgtgaccgatttcatcgatggcatttgcccagcttgctgcgttaccggtctgctgcgcctgccactctttaccaccgtaggcggcagcggaatcggagccggcatcaacagaactcctcccttctatgccatctggcagggtgatagtctgtcggaatcgatattcctgaattgggaacccacttcccggttgggtgttcctgcctggctgaacccgtttggatcccaaaacgagaaggatgtagccttgctgactggcctcacctggctgccccgcaaggtattcctgcttggcccggtgtcagacggagcaaaatgcagcgcctgcggagaagagcatgagcctctggtctatgcctgcaacaatgaggcggtgaaagtgcctccgaaccttgtctggaacgaccctcacgcgatttaccgggatgacaataatggcctgactgcccaggtggctctgatgtccggggacaaatacactttcgctaacagggattggcataaacccctggtcggcttcttacgggcgaaaggcatgtctcggaccgccacgctgtttttagtgggcttcacaagcgttcaagccaaatgtgtggacgtttgggaaaagaccattgccctatccggaaaaacaagctccgaggaactgctggaccagatatccgaaagagcctactccctgcacaggatgaggaaacaagaccgccggggcgattacaaggaatccgtgggaatcaccgccgtggcggacatcatcccgcacgtagagcatcgggttgacgtccattcgggcgagatggtggaaaacagcggcaatgtctggcaggaagcggatgaagattacggattcttcatgaagcgttttgccgtttctctagtgccggaaattacggttgccgccaagcttgaacgagaacaactggctcggcgcaagccctggcccctaaaaccaaaatcaattaaaaaaccttcatccggaggcgataatgaatgagagcaccgtgaaatttgttcggagcctgggcgaactcaaagagggcgacctgggcttgctcagaaagctcaggggtcgccgtctggatgaatccctgccgggtttcgacctgttttccggcctgtggtggccactccgcagtataagccccaaaacccccaggcggaaggtggtctggctagtcaccaagcttttcgcggaattccgctttgagcaaaagaaaggcgccagcctgccttggctcatgggcagaatatgccgtggacttaaagaagaaaaagagttcccacgtgttttagccaggttcgaccgcttgctcacgctcgagttgaaccaactggaggaaccgctggcgcaagtgctcgcgattttaaaaagacatgacattgccagtctggactgggttgccctcatcgatgacctctccgcttgggaacgggaatcaaacagagcgatatggtcagacacatttatttcagcatttaataatcagcaaggaggaatcaaatgttgattgaaatacacatgatccaaaaccacagcccggccaacctgaaccgggacgacctgggcgcgcccaagacctgttatttcggtggggtgttgcggtcccgcatctccagccagtgcctaaagcggagcatcaggatgagcgatgaattcaaaaacttgctcgggggtatccgtacccgtcggttggccgagttgattacaaaagctacaggacaggactgcaggaatcaggcagaggaagttctgaacaaagccggtttgaaacacgaaaacggacatagtaagatgctggtgttcatgacccggaacaagatcgatgcccttgctcaaattgtcaccagcgaaggcctgagtgttgcagagaaagccaagaaagcggcagatgtaatatcgggggcaatacattcccctgacatcgctctgtgcggaagaatgctcgagcccgataccaaggacaagaacacagacaaggtcaagtgggaaaataccactgttgaagcagccctgcaggtgtcgcacgccatttcaacccacatcgcccgcccagaaatagattactatgtagcagctgatgacgagcctggcgacgacacaggtgctggattcatagacgaggcgatgtttgcttcggcctgtttctacaaatattactcaattgattggaataccttgataatcaacctccagggtaatgaaaagttggcagctcatactgtcggagcctttatccaggccgctgcactcactaatcccagcggaaagcagaacagctttgccgcacataaccttcccgatggaatattggtagaaataaaagagacacctgtcagctatgcaaatgcctttgtgcgaccggtgggaatcgttaaggattctgacttggtagaacaaagcattggccaactggccaactatgtgaaggatataagtgccggtttcttccctggacagatgaaaggcaacgctctgtggttctcgcccaatggacgttatcccctaaagcctcaacagggcacgctggacataaagccagtttgcaacctgctagaacttgttcgcgaagcagttgagatgttgggttttgaatgggatgatgtaaaaaacgagaaagtagagagttgaaatgtcttctccgcctaataccctgttcctgagattggaggctccccttcaggcctggggaagcaatgaggccaaattcgccgtgcgcaggacagccgacgcgcccaccaaatccggagtggcaggcctgctctgcgctgccctgggaatcagccgggccgaagccggacagtattggctgggtgaaattgccaaattgcgcatgggggtgcggatagaccgcccgggcatccgctggtgggattaccatactgtgggagcggagcagaagctgcgcatttctgacctgaaaatgcccaacggcctagttctggttggcactgccctggccaaaaacctgggcgcggacaagatcaaatccaaacccggggctttgctctcccgacgcgagtatttggctgatgccagcttcctggttgcgctccagggtgaaccggatatcgtggcacaactggctgaagcgctgaaaaaaccagtctggacgctttatctggggcgaaaatcctgtcccccctcccgtccggtggatgaacacccgccagggttttatgccagtctgaaagaggctttgcggtcgatcccggcgcaactgagggaaaaaggcgaaccgatacctgacagtgttccctgtgtgctcgactgggttccggcccatgatgacgtgcacgctccgccgaacgccgaagcgcattacgacgtgccggtgtcctttgagcctccccaccacttgccccggctggtgatccgctgtaacctgccattggaccgcaacttcgaggcagagaccgtgctttccggcaaagcctggcaaccgccccgcaaccgggcaaattacgacaatcctgaatacaaaagggtccgcgctgagcgtttggtgatggacaatgccgcctgcatgttctgcaaggcacccgccactactgtgcagcacgtgaattaccgacgcgccggaggcagcgagaagccggaggacttgcgcgccctctgccgcctctgccacgatgcctgcaccatgctggaatatggcagcggcatgaccatggaccgcatagatccctgtgaccccgcctggcgtgagcgcatcttggccaaacgcgaggaaataatcaaattccgctcgctggagcagcgcaggcgcaaactcgatccgaaggaggagaacggatgatgtatctatcccaactgctcatcgacacaggcggcaaccctgaccggccaaggcccgggcgcttgtggctgaacaatatctataatgtccaccggcggctcagcatggctttccccatgcgcaagcgcaaggaaggagacccgaggtttctgcagccctttgaccccgcagattttgaaaagcgccagttcctctttcgggtggacaacaacaccgatggagaaaatcaaagggcgatggttttggtgcagtcgtccctgccgccggattgggactgggctttccagaatgccacgggatttttggcagcccctccccaggttaaggaatacgatccccagttctcagcaggtcagcggctgcgcttccgcatcctcgtgaatgccagtgtcaaacgcaaaatcgacgagttgcgggaaggacccggaggaaaggaaaaaacgggaagggttctgcacaaacgggtcgcccttacctgggacacaaattccaacccaaaggatgcggtggcgcaatggtttgccgccaaggctggcagactgggcttcacgcccggggagaccgaactggtaagcctgggctgggtatacggttccaaaccggagccccggggaaattcgccccggcgtgagaacgaataccgtcccctgagataccgttccgccctgctggaaggttatctgacagtggatgatgcctttctgttccgggaagccttggaaaaaggtatcggcagcgccaaaggaatgggcttcggcctcctttccgtggttccggcaagtgatgcgtaacagagaccttcacctaatgccaaaaatgcgggaccgcttcacctatctctatgtggagcatgccaaaatagacaaagaacaacaggcaatcgcctttcacgatgccatgggctccactcctgttccctgcgctggactggccctgctgatgctggggccaggcgtatccatcacccatgcggccatccttgttttagcagaatgcggctgtttggtggcttgggtgggggaacagggagtccgcttttactcatccgggacagggaccacccgtagttccgccaaccttatgcgtcaggctgccgcctggtcaaatcgagatacgcatctgcggatagttcgcagaatgtatgaattgaggttcaaggaaaaactggacccaaccctctctcttgaacagataaggggaaaagagggagcgagagtacgggatacctatttcagactttcaaaagaattcgatgtgcccatgagtgcgaggaattacgacaggagcaactggaataaaaccgaccccatcaacagagccctgtccgttgccaattcctgtctctatggcatctgccacgccgcgatagtggccgctggctattcacctgccctgggtttcgttcatactggcaaacaactgtcatttgtttatgacattgccgatctttataaaatggaaacctccgtgcccgcggctttcatagccacagccgcaggggtcgataacctggacagaaggacacgcattgcctgccgtgaccagttctatcaatttggtctgctaaagaagatagtggccgacattcacgcccttttcggtattctggaaacttcggacgatgagccagaccttgctgatgtcgatccagccgtgccaggcgggctttggaacccagatgataaagtgagccccggcggcttgtcatggggtctggatgatcctggaggccatgatgatggttctggtgcttgaaaaagttccctctggcctgagaggagaaattacacgctggctcctcgaaatcaaggctggagtatttgtcggtcaggtatcggccatgataagggaaaagctgtgggacaaggccaggtctggttgtgccggtggaacttgtatcatgatttacagcaagcattgcgaacaaggctttggaattgagttttggggtgccgcggaaaggatagtgacagaatgggaaggattgaaattgatgaccaagcatccgtgatccatacttgaagcctgttcaatggcctcaaagcgtctactttcgaagtgtgttccccacctgcgtgggggtgaaccgcggattcgccaagcttgtccctaccgtgatgcgtgttccccacctgcgtgggggtgaaccgaagagcggttttgggcgtataacggcccgcttgtgttccccacctgcgtgggggtgaaccgcctctgggccttagctccgcacaggacaagcagtgttccccacctgcgtgggggtgaaccgctgagaccgctcgctccctgtccgtcattgacgtgttccccacctgcgtgggggtgaaccgtggggtgggggcggttgcccgccccgttccccgtgttccccacctgcgtgggggtgaaccggcaaccaaccgcataggcatagcgaaatcaaggtgttccccacctgcgtgggggtgaaccggacatctggaaagattgggtggcaatggcgatgtgttccccacctgcgtgggggtgaaccggtattcttgcccatcatggaaatgccgtgtccgtgttccccacctgcgtgggggtgaaccggtagctcaactacaagcggcgagccgaacctagtgttccccacctgcgtgggggtgaaccgactgccgctgctccagagtttatgaaacctctgtgttccccacctgcgtgggggtgaaccgatgttcgccggagaggcgctcgactacaccgagtgttccccacctgcgtgggggtgaaccgccctgaagatacaggagcagattgaccaggaagtgttccccacctgcgtgggggtgaaccgaacccaatgaacatggtgtaaaggaaatagaggtgttccccacctgcgtgggggtgaaccgaggtctgagtagtctgcgggccccaggatgaagtgttccccacctgcgtgggggtgaaccgtgatccggacggggctgggcgcggcggatgccgtgttccccacctgcgtgggggtgaaccggtggcttacatcagcctggtgaagaagccggcgtattccccacctgcgtgggggtgaagcggtagaagaacgttccggcaaacagagacgccagtattccccacctgcgtgggggtgaaccgggcgacacaacctctaccatacccgagggtcagtattccccacctgcgtgggggtaattccatttctgccggcgcacagacggcgccgggcagtccctgataatcgcttacttcagcagcagcatcctgatggttttggtttcgctggctgtgctcacccgggcgaaatacacaccgctggccactccccttccggtttcatcacgtccgtcccagcgcagcctgtggtttccgcccgcgagttttcctttgtgaagggagcgcactttctggccgcgaatgttgaagagatcgacgctcacctcgtttgagagggcaaggttgaaggcgatggtgacatccggattgaagggattgggataggccgatagcgcggatatggggctttggaccagatcctggagagcaacctggtaattgctcacccggatgtagccttcgtaggttcctgtagccggaggctcccaggtaaaagtatcctggccgttcagatagtggggaacgtcatccagcatcagcataatctgccattggtcgccggctccctcggtgctgaaactgatctcatgtggcccttccaggcccgcgtgggcatggatgttgaagtattcaacctgttccggcccgctgaagggctggcggtattcgctgcaaaggttccggatgtcagtggaatccgcgccggcatgatggatccagagagaggagcaatcagaaatcggaggacagggcgggctgggatggtcaaagcggaaatccacggcatttgtagccaggggatgcaggccgagttcaattccggcgggatgggctccctcgagttccatccgcagcctaaaaacgggttccggagccagcggcttgggaccgtcgcagaaaggcaggaaacgaatctgcggcgccaggtccggggagccgttgtaatagatgaggaaagcctcccagggctcgatacggctggttttttcgtaatcctcgccgcgccagacaaagacggcgggcgaaaccagttcctggcttagcatttcggtgaagctgtgcaactggccaagaagagtgaagctcaggtcctccaggtcgtaggcgcagagatgggggttgggcaaaaagttccagccggggaccaaatcaatataataagccccgctctggagcggcaagatgctgctgtagaaattgatatcgttggatgaaacccaataggcagtgccgaagtcgaaatccagcgtcatgccccagccgccattcggggtcatctgatagccgagggcggggccaaagacctgttcaaagctgaggttgctatccggccagggattggagcgcatcttcaagccggcttcgttataggccaggatcatctggggaagcagggaaaagcgatagggggatacaaacctgctacgcaccccatccaccgccacgatgtccaccacgaagcggcaatcctgcatttcagccacgttggccggcaccagccagggaaagctggtttgggtgggcgtcacggagtccgaaagcagcagactgtcggaagcgttgacaatagaaatttcggcatggtcgatgaggaagggatattggaaactccagccgaaggtgatatcggttccgccctgatagactttgttttccagcgaggcaaaggaagcccggggctgcatgtttccccagtgaaggatcatggtgcggaagtcggaatttgtgttgctgtattggtagggcccggccagcaggttgtggtaggtgccgccattctgcaaatagagcttttcctcccggctgaagttgccggatgctgtgatgttgagcgtttcgatctggtcgctgcggaccctaagcacccaggtcttgatctcagaatcggcatcgaacattgccttaacttcccggcttaggttggtgccgctgttgctccaatactgttcgaagaaagcgccccagacgtaatttgaggcgccgggggtgcctttggtcacgtcccagtaagcgtcgtttccatcggtggcgaagggattggcgctgaagaatacttcgtcggatagcgtccctgacatgttgctgacggtgaggctgtggatgggccttggttccgcgtcggcgggatagttgtggaaatactccacattctggaggtttgtgctactgattttgtaggtatagccgctgccgttgctcacatccgtatcccaccattcaaaattgtagctggagggatttgaaagggcggggttggtgagccaggaatccaccagagtgaagtcgccagcggcatcctgacgatagaccttgaaaccctggttgccgacctgaccgttcacctgccagaaaaggcgcactgtgccatccaggccgtgggctgtgaaagaggtaatgccagccggggcaaggttggcgccaacttcgttggaaagggtggagtagttgccattcttgtctttggcgcgaatcctgaaatagtagggattggagtttgtcaggttggtcaccgtgatcatctcgcaatcgggtgaggcgagaaaagagttgttatcccggttgaagacctggaagttgtcggtgccgatcgactccgtggcgtagagcacttcgtaggattcaaaatcgtaagcatggcttttctcccagctcagagtgacgctggtcagggactggttgtatatggcaaggttttgcggcgcaggcggggtttggttgtcgttcatggcgaacatatctaccaggaccggctccagatcgtagatccagcgtccgtaatattcgatgaagcggtcgaaaaggccgtccatattccagctctggctggtcgcgtcccagccgtagaaccagtgatacacgttttccgtttcgtcatagcagttgggcagttcgtccatttccagatggaagaaaggttcgtaaacgtcgtaatcggttaaaccgctctgggtgtaaagcatgtgctggttctgagtataggcgggcaggtccacctggtcgttcacgggatagctgttcacgccgtccgaaaaaatgaaatcgtgcgtgctgtagttcacgctgtaaaagtcgttcagatagacatcggcatgtatgccaatggtgttcgcgggaatcatcagatgctggccggcattgatcaggtcgcgcttcagaggcgaaaggtcccggatgggcaggttggggcaggggcgcggattaccggcagaaatctggcagttggcatagccctgatggcggttccagtcgtaggaatggatctgggcagaaaactccctcacgccaaactggtcgcggatggtgtcggcaaatttcttgtagagggtgttgaaaggatgggtggggttgcgcagggggtcggagagggatttggagttggtgtaagaaccctggttggtccagcgaacctcgcggccggagccgtttatcatcaggtagcgggcgtcccagtgcttcagagcttcatatcccatcgcgggagtgggaaaatcatcacagggatggggaacggtgatgattatgggtttgctgccctggggactgtagatgaaaagcccccagccatagacaaatgcgcccgattcgtcatcatcttccgtaaccgttccgttgtcgtcataataggcgggattgggaatctcgcgcagcatgatataggtgcgtccggtgtctgtgtcattgaactgcacaatctgaaaaggggcggaattggatgtgagtatggcctgtgcgccatcgtaatcctctgccacgaagagttccgccatgttgttccaatagatcaggtcagtggctgtgggaaggcggaaattcccaaatccgttggtttggacgtcgtaaggcgcgtagaggttgtaattggggctggctataccctcggcaatatgggaaatccagttgtcataggcgcaggcgggctcgctgcccagcagaaaagcgcggagagaaccgctctcggtgatgattgccggggccagtgccgccagcagacagagccagactgccaaaatagtttttttcatgctttcatccctgttcggaagctttttttcttatcgagcaaactacttaacaggggtgaaataagtcaagactttttctttcggctccgtccaaccttgctttcggacatactgccggactgctcccggtaaagtgcttgacagccggggcgaaattcattttatggatattcaagggagttcatgatgaagaaaacgatccgcaagacttacactttcgacgacgttctgctggt
